United States Patent Application Publication US 2023/0338579 A1 - sequence listing, part 3

SEQ ID NO: 5491 - RNA, 477 nt, synthetic construct; identical to SEQ ID NO: 5387
  misc_feature 1..477: note = derived and/or modified sequence opt1 fromCytosine_Deaminase_fcy1__Saccharomyces_cerevisiae__AJV9 4715
  source 1..477: mol_type = other RNA

SEQ ID NO: 5492 - RNA, 477 nt, synthetic construct; identical to SEQ ID NO: 5388
  misc_feature 1..477: note = derived and/or modified sequence opt2 fromCytosine_Deaminase_fcy1__Saccharomyces_cerevisiae__AJV9 4715
  source 1..477: mol_type = other RNA

SEQ ID NO: 5493 - RNA, 477 nt, synthetic construct; identical to SEQ ID NO: 5389
  misc_feature 1..477: note = derived and/or modified sequence opt3 fromCytosine_Deaminase_fcy1__Saccharomyces_cerevisiae__AJV9 4715
  source 1..477: mol_type = other RNA

SEQ ID NO: 5494 - RNA, 477 nt, synthetic construct; identical to SEQ ID NO: 5390
  misc_feature 1..477: note = derived and/or modified sequence opt4 fromCytosine_Deaminase_fcy1__Saccharomyces_cerevisiae__AJV9 4715
  source 1..477: mol_type = other RNA

SEQ ID NO: 5495 - RNA, 477 nt, synthetic construct; identical to SEQ ID NO: 5391
  misc_feature 1..477: note = derived and/or modified sequence opt5 fromCytosine_Deaminase_fcy1__Saccharomyces_cerevisiae__AJV9 4715
  source 1..477: mol_type = other RNA

SEQ ID NO: 5496 - RNA, 477 nt, synthetic construct
  misc_feature 1..477: note = derived and/or modified sequence opt6 fromCytosine_Deaminase_fcy1__Saccharomyces_cerevisiae__AJV9 4715
  source 1..477: mol_type = other RNA
atggtaacgggaggaatggcaagtaaatgggatcaaaaaggaatggacatagcatatgaagaagcagcattaggatataaagaaggaggagtaccaataggaggatgcttaataaataataaagacggaagtgtattaggaagaggacataatatgagatttcaaaaaggaagtgcaacattacacggagaaataagtacattagaaaactgtggaagactagaaggaaaagtatataaagatacaacactatatacaacattaagtccatgtgacatgtgcacaggagcaataataatgtatggaataccaagatgtgtagtaggagaaaatgtaaattttaaaagtaaaggagaaaaatatttacaaacaagaggacatgaagtagtagtagtagatgacgaaagatgtaaaaaaataatgaaacaatttatagatgaaagaccacaagattggtttgaagatataggagaataa

SEQ ID NO: 5497 - protein, 158 aa, synthetic construct; identical to SEQ ID NO: 5385
  REGION 1..158: note Cytosine_Deaminase_fcy1__Saccharomyces_cerevisiae__A0A0D4X7 R4

SEQ ID NO: 5498 - RNA, 477 nt, synthetic construct
  misc_feature 1..477: note Cytosine_Deaminase_fcy1__Saccharomyces_cerevisiae__AJV95147
  source 1..477: mol_type = other RNA
atggtgacagggggaatggcaagcaaatgggatcagaagggtatggacattgcctatgaggaggcggccttaggttacaaagagggtggtgttccaattggcggatgtcttatcaataacaaagacggaagtgttctcggtcgtggtcacaacatgagatttcaaaagggatccgccacactacatggtgagatctccactttggaaaactgtgggagattagagggcaaagtgtacaaagataccactttgtatacgacgctgtctccatgcgacatgtgtacaggtgccatcatcatgtatggtattccacgctgtgttgtcggtgagaacgttaatttcaaaagtaagggcgagaaatatttacaaactagaggtcacgaggttgttgttgttgacgatgagaggtgtaaaaagatcatgaaacaattcatcgatgaaagacctcaggattggtttgaagatattggtgagtag

SEQ ID NO: 5499 - RNA, 477 nt, synthetic construct; identical to SEQ ID NO: 5387
  misc_feature 1..477: note = derived and/or modified sequence opt1 fromCytosine_Deaminase_fcy1__Saccharomyces_cerevisiae__AJV9 5147
  source 1..477: mol_type = other RNA

SEQ ID NO: 5500 - RNA, 477 nt, synthetic construct; identical to SEQ ID NO: 5388
  misc_feature 1..477: note = derived and/or modified sequence opt2 fromCytosine_Deaminase_fcy1__Saccharomyces_cerevisiae__AJV9 5147
  source 1..477: mol_type = other RNA

SEQ ID NO: 5501 - RNA, 477 nt, synthetic construct; identical to SEQ ID NO: 5389
  misc_feature 1..477: note = derived and/or modified sequence opt3 fromCytosine_Deaminase_fcy1__Saccharomyces_cerevisiae__AJV9 5147
  source 1..477: mol_type = other RNA

SEQ ID NO: 5502 - RNA, 477 nt, synthetic construct; identical to SEQ ID NO: 5390
  misc_feature 1..477: note = derived and/or modified sequence opt4 fromCytosine_Deaminase_fcy1__Saccharomyces_cerevisiae__AJV9 5147
  source 1..477: mol_type = other RNA

SEQ ID NO: 5503 - RNA, 477 nt, synthetic construct; identical to SEQ ID NO: 5391
  misc_feature 1..477: note = derived and/or modified sequence opt5 fromCytosine_Deaminase_fcy1__Saccharomyces_cerevisiae__AJV9 5147
  source 1..477: mol_type = other RNA

SEQ ID NO: 5504 - RNA, 477 nt, synthetic construct
  misc_feature 1..477: note = derived and/or modified sequence opt6 fromCytosine_Deaminase_fcy1__Saccharomyces_cerevisiae__AJV9 5147
  source 1..477: mol_type = other RNA
atggtaacaggaggaatggcaagtaaatgggatcaaaaaggaatggacatagcatatgaagaagcagcattaggatataaagaaggaggagtaccaataggaggatgtttaataaataataaagatggaagtgtattaggaagaggacataatatgagatttcaaaaaggaagtgcaacattgcatggagaaataagtacattagaaaattgtggaagattagaaggaaaagtatataaagatacaacactatatacaacattaagcccatgtgatatgtgtacaggagcaataataatgtatggaataccaagatgtgtagtaggagaaaatgtaaattttaaaagcaaaggagaaaaatatttacaaacaagaggacatgaagtagtagtagtagatgatgaaagatgtaaaaaaataatgaaacaatttatagatgaaagaccacaagattggtttgaagatataggagaataa

SEQ ID NO: 5505 - protein, 158 aa, synthetic construct; identical to SEQ ID NO: 5385
  REGION 1..158: note Cytosine_Deaminase_fcy1__Saccharomyces_cerevisiae__A0A0D4X7 X4

SEQ ID NO: 5506 - RNA, 477 nt, synthetic construct; identical to SEQ ID NO: 5386
  misc_feature 1..477: note Cytosine_Deaminase_fcy1__Saccharomyces_cerevisiae__AJV95584
  source 1..477: mol_type = other RNA

SEQ ID NO: 5507 - RNA, 477 nt, synthetic construct; identical to SEQ ID NO: 5387
  misc_feature 1..477: note = derived and/or modified sequence opt1 fromCytosine_Deaminase_fcy1__Saccharomyces_cerevisiae__AJV9 5584
  source 1..477: mol_type = other RNA

SEQ ID NO: 5508 - RNA, 477 nt, synthetic construct; identical to SEQ ID NO: 5388
  misc_feature 1..477: note = derived and/or modified sequence opt2 fromCytosine_Deaminase_fcy1__Saccharomyces_cerevisiae__AJV9 5584
  source 1..477: mol_type = other RNA

SEQ ID NO: 5509 - RNA, 477 nt, synthetic construct; identical to SEQ ID NO: 5389
  misc_feature 1..477: note = derived and/or modified sequence opt3 fromCytosine_Deaminase_fcy1__Saccharomyces_cerevisiae__AJV9 5584
  source 1..477: mol_type = other RNA

SEQ ID NO: 5510 - RNA, 477 nt, synthetic construct; identical to SEQ ID NO: 5390
  misc_feature 1..477: note = derived and/or modified sequence opt4 fromCytosine_Deaminase_fcy1__Saccharomyces_cerevisiae__AJV9 5584
  source 1..477: mol_type = other RNA

SEQ ID NO: 5511 - RNA, 477 nt, synthetic construct; identical to SEQ ID NO: 5391
  misc_feature 1..477: note = derived and/or modified sequence opt5 fromCytosine_Deaminase_fcy1__Saccharomyces_cerevisiae__AJV9 5584
  source 1..477: mol_type = other RNA

SEQ ID NO: 5512 - RNA, 477 nt, synthetic construct
  misc_feature 1..477: note = derived and/or modified sequence opt6 fromCytosine_Deaminase_fcy1__Saccharomyces_cerevisiae__AJV9 5584
  source 1..477: mol_type = other RNA
atggtaacaggaggaatggcaagtaaatgggatcaaaaaggaatggatatagcatatgaagaagcagcattaggatataaagaaggaggagtaccaatagggggatgtttaataaataataaagatggaagtgtattaggaaggggacataatatgagatttcaaaaaggaagtgcaacattacatggagaaataagtacattagaaaattgtggaagactagaaggaaaagtatataaagatacaacattatatacaacattaagtccatgtgatatgtgtacaggagcaataataatgtatggaataccaagatgtgtagtaggagaaaatgtaaattttaaaagtaaaggagaaaaatatctacaaacaaggggacatgaagtagtagtagtagatgatgaaagatgtaaaaaaataatgaaacaatttatagatgaaagaccacaagattggtttgaagatataggagaatag

SEQ ID NO: 5513 - protein, 158 aa, synthetic construct; identical to SEQ ID NO: 5385
  REGION 1..158: note Cytosine_Deaminase_fcy1__Saccharomyces_cerevisiae__A0A0D4XA 07

SEQ ID NO: 5514 - RNA, 477 nt, synthetic construct; identical to SEQ ID NO: 5386
  misc_feature 1..477: note Cytosine_Deaminase_fcy1__Saccharomyces_cerevisiae__AJV95852
  source 1..477: mol_type = other RNA

SEQ ID NO: 5515 - RNA, 477 nt, synthetic construct; identical to SEQ ID NO: 5387
  misc_feature 1..477: note = derived and/or modified sequence opt1 fromCytosine_Deaminase_fcy1__Saccharomyces_cerevisiae__AJV9 5852
  source 1..477: mol_type = other RNA

SEQ ID NO: 5516 - RNA, 477 nt, synthetic construct; identical to SEQ ID NO: 5388
  misc_feature 1..477: note = derived and/or modified sequence opt2 fromCytosine_Deaminase_fcy1__Saccharomyces_cerevisiae__AJV9 5852
  source 1..477: mol_type = other RNA

SEQ ID NO: 5517 - RNA, 477 nt, synthetic construct; identical to SEQ ID NO: 5389
  misc_feature 1..477: note = derived and/or modified sequence opt3 fromCytosine_Deaminase_fcy1__Saccharomyces_cerevisiae__AJV9 5852
  source 1..477: mol_type = other RNA

SEQ ID NO: 5518 - RNA, 477 nt, synthetic construct; identical to SEQ ID NO: 5390
  misc_feature 1..477: note = derived and/or modified sequence opt4 fromCytosine_Deaminase_fcy1__Saccharomyces_cerevisiae__AJV9 5852
  source 1..477: mol_type = other RNA

SEQ ID NO: 5519 - RNA, 477 nt, synthetic construct; identical to SEQ ID NO: 5391
  misc_feature 1..477: note = derived and/or modified sequence opt5 fromCytosine_Deaminase_fcy1__Saccharomyces_cerevisiae__AJV9 5852
  source 1..477: mol_type = other RNA

SEQ ID NO: 5520 - RNA, 477 nt, synthetic construct
  misc_feature 1..477: note = derived and/or modified sequence opt6 fromCytosine_Deaminase_fcy1__Saccharomyces_cerevisiae__AJV9 5852
  source 1..477: mol_type = other RNA
atggtaacaggaggaatggcaagtaaatgggatcaaaaaggaatggacatagcatatgaagaagcagcactaggatataaagaaggaggagtaccaataggaggatgcttaataaataataaagacggaagtgtattaggaagaggacataatatgagatttcaaaaaggaagtgcaacattacatggagaaataagtacattagaaaactgcggaagattagaaggaaaagtatataaagatacaacattatatacaacattaagtccatgtgacatgtgcacaggagcaataataatgtatggaataccaaggtgtgtagtaggagaaaatgtaaattttaaaagtaaaggagaaaaatatctacaaacaagaggacatgaagtagtagtagtagatgacgaaagatgtaaaaaaataatgaaacaatttatagatgaaagaccacaagattggtttgaagatataggagaataa

SEQ ID NO: 5521 - protein, 158 aa, synthetic construct; identical to SEQ ID NO: 5385
  REGION 1..158: note Cytosine_Deaminase_fcy1__Saccharomyces_cerevisiae__A0A0D4XA 25

SEQ ID NO: 5522 - RNA, 477 nt, synthetic construct; identical to SEQ ID NO: 5386
  misc_feature 1..477: note Cytosine_Deaminase_fcy1__Saccharomyces_cerevisiae__AJV96293
  source 1..477: mol_type = other RNA

SEQ ID NO: 5523 - RNA, 477 nt, synthetic construct; identical to SEQ ID NO: 5387
  misc_feature 1..477: note = derived and/or modified sequence opt1 fromCytosine_Deaminase_fcy1__Saccharomyces_cerevisiae__AJV9 6293
  source 1..477: mol_type = other RNA

SEQ ID NO: 5524 - RNA, 477 nt, synthetic construct; identical to SEQ ID NO: 5388
  misc_feature 1..477: note = derived and/or modified sequence opt2 fromCytosine_Deaminase_fcy1__Saccharomyces_cerevisiae__AJV9 6293
  source 1..477: mol_type = other RNA

SEQ ID NO: 5525 - RNA, 477 nt, synthetic construct; identical to SEQ ID NO: 5389
  misc_feature 1..477: note = derived and/or modified sequence opt3 fromCytosine_Deaminase_fcy1__Saccharomyces_cerevisiae__AJV9 6293
  source 1..477: mol_type = other RNA

SEQ ID NO: 5526 - RNA, 477 nt, synthetic construct; identical to SEQ ID NO: 5390
  misc_feature 1..477: note = derived and/or modified sequence opt4 fromCytosine_Deaminase_fcy1__Saccharomyces_cerevisiae__AJV9 6293
  source 1..477: mol_type = other RNA

SEQ ID NO: 5527 - RNA, 477 nt, synthetic construct; identical to SEQ ID NO: 5391
  misc_feature 1..477: note = derived and/or modified sequence opt5 fromCytosine_Deaminase_fcy1__Saccharomyces_cerevisiae__AJV9 6293
  source 1..477: mol_type = other RNA

SEQ ID NO: 5528 - RNA, 477 nt, synthetic construct
  misc_feature 1..477: note = derived and/or modified sequence opt6 fromCytosine_Deaminase_fcy1__Saccharomyces_cerevisiae__AJV9 6293
  source 1..477: mol_type = other RNA
atggtaacaggaggaatggcaagcaaatgggatcaaaaaggaatggacatagcatatgaagaagcagcattaggatataaagaaggaggagtaccaataggaggatgcttaataaataataaagacggaagtgtattaggaagaggacataatatgagatttcaaaaaggaagtgcaacattacacggagaaataagtacattagaaaactgtggaagattagaaggaaaagtatataaagatacaacattatatacaacattaagtccatgtgacatgtgcacaggagcaataataatgtatggaataccaagatgtgtagtaggagaaaatgtaaattttaaaagtaaaggagaaaaatatttacaaacaagaggacatgaagtagtagtggtagatgacgaaagatgtaaaaaaataatgaaacaatttatagatgaaagaccacaagattggtttgaagatataggagaataa

SEQ ID NO: 5529 - protein, 158 aa, synthetic construct
  REGION 1..158: note Cytosine_Deaminase_fcy1__Saccharomyces_cerevisiae__A0A0D4XA V6
MVTGGMASKWDQKGMDIAYEEAALGYKEGGVPIGGCLINNKDGSVLGRGHNMRFQKGSATLHGEISTLENCGRLEGKVYKDTTLYTTLSPCDMCTGAIIMYGIPRCVVGENVNFKSKGEKYLQTRGHEVVVVDDERCKKIMKQFINERPQDWFEDIGE

SEQ ID NO: 5530 - RNA, 477 nt, synthetic construct
  misc_feature 1..477: note Cytosine_Deaminase_fcy1__Saccharomyces_cerevisiae__AJV96709
  source 1..477: mol_type = other RNA
atggtgacagggggaatggcaagcaagtgggatcagaagggtatggacattgcctatgaggaggcggccttaggttacaaagagggtggtgttcctattggcggatgtcttatcaataacaaagacggaagtgttctcggtcgtggtcacaacatgagatttcaaaagggatccgccacactacatggtgagatctccactttggaaaactgtgggagattagagggcaaagtgtacaaagataccactttgtatacgacgctgtctccatgcgacatgtgtacaggtgccatcatcatgtatggtattccacgctgtgttgtcggtgagaacgttaatttcaaaagtaagggcgagaaatatttacaaactagaggtcacgaggttgttgttgttgacgatgagaggtgtaaaaagatcatgaaacaatttatcaatgaaagacctcaggattggtttgaagatattggtgagtag

SEQ ID NO: 5531 - RNA, 477 nt, synthetic construct
  misc_feature 1..477: note = derived and/or modified sequence opt1 fromCytosine_Deaminase_fcy1__Saccharomyces_cerevisiae__AJV9 6709
  source 1..477: mol_type = other RNA
atggtgaccggcgggatggccagcaagtgggaccagaagggcatggacatcgcctacgaggaggcggccctggggtacaaggagggcggggtccccatcggcggctgcctcatcaacaacaaggacgggtccgtgctgggccgcgggcacaacatgcggttccagaagggcagcgccaccctgcacggggagatctccacgctcgagaactgcggccgcctggagggcaaggtgtacaaggacaccaccctgtacaccacgctcagcccgtgcgacatgtgcaccggggccatcatcatgtacggcatcccccggtgcgtcgtgggggagaacgtgaacttcaagtccaagggcgagaagtacctgcagacccgcggccacgaggtcgtggtggtcgacgacgagcggtgcaagaagatcatgaagcagttcatcaacgagcgcccccaggactggttcgaggacatcggggagtga

SEQ ID NO: 5532 - RNA, 477 nt, synthetic construct
  misc_feature 1..477: note = derived and/or modified sequence opt2 fromCytosine_Deaminase_fcy1__Saccharomyces_cerevisiae__AJV9 6709
  source 1..477: mol_type = other RNA
atggtcaccggcggcatggcctccaagtgggaccagaagggcatggacatcgcctacgaggaggccgccctcggctacaaggagggcggcgtccccatcggcggctgcctcatcaacaacaaggacggctccgtcctcggccgcggccacaacatgcgcttccagaagggctccgccaccctccacggcgagatctccaccctcgagaactgcggccgcctcgagggcaaggtctacaaggacaccaccctctacaccaccctctccccctgcgacatgtgcaccggcgccatcatcatgtacggcatcccccgctgcgtcgtcggcgagaacgtcaacttcaagtccaagggcgagaagtacctccagacccgcggccacgaggtcgtcgtcgtcgacgacgagcgctgcaagaagatcatgaagcagttcatcaacgagcgcccccaggactggttcgaggacatcggcgagtga

SEQ ID NO: 5533 - RNA, 477 nt, synthetic construct
  misc_feature 1..477: note = derived and/or modified sequence opt3 fromCytosine_Deaminase_fcy1__Saccharomyces_cerevisiae__AJV9 6709
  source 1..477: mol_type = other RNA
atggtgaccggcgggatggccagcaagtgggaccagaaaggaatggatatcgcttacgaggaagcagccctgggttataaggagggcggggtccccattggaggctgcctcataaacaataaagacggttccgttcttgggagaggacacaacatgaggttccaaaagggctctgcgacactgcatggcgaaatctcaactttggagaattgtgggcggttagaaggaaaagtgtacaaggatacgaccctgtatacaactctaagtccttgcgacatgtgtaccggtgctattatcatgtacggcattccacgctgcgtagtgggggagaacgtcaattttaagagcaaaggagagaagtatctccagacacgaggccacgaagtggttgtggtcgatgacgagcgttgtaaaaagatcatgaaacagttcataaacgaaagaccgcaggattggtttgaggacatcggtgagtga

SEQ ID NO: 5534 - RNA, 477 nt, synthetic construct
  misc_feature 1..477: note = derived and/or modified sequence opt4 fromCytosine_Deaminase_fcy1__Saccharomyces_cerevisiae__AJV9 6709
  source 1..477: mol_type = other RNA
atggtgaccggcggcatggccagcaagtgggaccagaagggcatggacatcgcctacgaggaggccgccctgggctacaaggagggcggcgtgcccatcggcggctgcctgatcaacaacaaggacggcagcgtgctgggcagaggccacaacatgagattccagaagggcagcgccaccctgcacggcgagatcagcaccctggagaactgcggcagactggagggcaaggtgtacaaggacaccaccctgtacaccaccctgagcccctgcgacatgtgcaccggcgccatcatcatgtacggcatccccagatgcgtggtgggcgagaacgtgaacttcaagagcaagggcgagaagtacctgcagaccagaggccacgaggtggtggtggtggacgacgagagatgcaagaagatcatgaagcagttcatcaacgagagaccccaggactggttcgaggacatcggcgagtga

SEQ ID NO: 5535 - RNA, 477 nt, synthetic construct
  misc_feature 1..477: note = derived and/or modified sequence opt5 fromCytosine_Deaminase_fcy1__Saccharomyces_cerevisiae__AJV9 6709
  source 1..477: mol_type = other RNA
atggtgaccggcgggatggccagcaagtgggaccagaaaggaatggatatcgcttacgaggaagccgcgctgggctataaggaagggggagtccccattggcgggtgcctcatcaacaataaagacggatccgttctgggcagaggccacaacatgcggttccaaaaggggtctgctacacttcatggagagattagcacgctggagaattgtggccgcctcgaagggaaagtgtacaaggataccacactgtataccacactttccccttgcgacatgtgtaccggagccatcattatgtacggcatcccgagatgcgtggtcggggagaacgtgaattttaagtctaaaggagagaagtatctgcagacacggggccacgaagttgtggtcgtggatgacgagcgctgtaaaaagatcatgaaacagttcattaacgaaagaccccaggattggtttgaggacatcggcgagtga

SEQ ID NO: 5536 - RNA, 477 nt, synthetic construct
  misc_feature 1..477: note = derived and/or modified sequence opt6 fromCytosine_Deaminase_fcy1__Saccharomyces_cerevisiae__AJV9 6709
  source 1..477: mol_type = other RNA
atggtaacaggaggaatggcaagcaaatgggatcaaaaaggaatggacatagcatatgaagaagcagcgttaggatataaagaaggaggagtaccaataggaggatgcttaataaataacaaagacggaagcgtgttaggaagaggacataatatgagattccaaaaaggaagtgcaacattacacggagaaataagcacactagaaaactgtggaagactagaaggaaaagtatataaagacacaacattatatacaacactaagtccatgtgacatgtgcacaggagcaataataatgtatggaataccaagatgcgtagtaggagaaaatgtaaatttcaaaagtaaaggagaaaaatatctacaaacaagaggacatgaagtagtagtagtagatgacgaaagatgtaaaaaaataatgaaacaatttataaatgaaagaccacaagattggtttgaagatataggagaataa

SEQ ID NO: 5537 - protein, 158 aa, synthetic construct; identical to SEQ ID NO: 5385
  REGION 1..158: note Cytosine_Deaminase_fcy1__Saccharomyces_cerevisiae__A0A0D4XC J5

SEQ ID NO: 5538 - RNA, 477 nt, synthetic construct; identical to SEQ ID NO: 5386
  misc_feature 1..477: note Cytosine_Deaminase_fcy1__Saccharomyces_cerevisiae__AJV97145
  source 1..477: mol_type = other RNA

SEQ ID NO: 5539 - RNA, 477 nt, synthetic construct; identical to SEQ ID NO: 5387
  misc_feature 1..477: note = derived and/or modified sequence opt1 fromCytosine_Deaminase_fcy1__Saccharomyces_cerevisiae__AJV9 7145
  source 1..477: mol_type = other RNA

SEQ ID NO: 5540 - RNA, 477 nt, synthetic construct; identical to SEQ ID NO: 5388
  misc_feature 1..477: note = derived and/or modified sequence opt2 fromCytosine_Deaminase_fcy1__Saccharomyces_cerevisiae__AJV9 7145
  source 1..477: mol_type = other RNA

SEQ ID NO: 5541 - RNA, 477 nt, synthetic construct; identical to SEQ ID NO: 5389
  misc_feature 1..477: note = derived and/or modified sequence opt3 fromCytosine_Deaminase_fcy1__Saccharomyces_cerevisiae__AJV9 7145
  source 1..477: mol_type = other RNA

SEQ ID NO: 5542 - RNA, 477 nt, synthetic construct; identical to SEQ ID NO: 5390
  misc_feature 1..477: note = derived and/or modified sequence opt4 fromCytosine_Deaminase_fcy1__Saccharomyces_cerevisiae__AJV9 7145
  source 1..477: mol_type = other RNA

SEQ ID NO: 5543 - RNA, 477 nt, synthetic construct; identical to SEQ ID NO: 5391
  misc_feature 1..477: note = derived and/or modified sequence opt5 fromCytosine_Deaminase_fcy1__Saccharomyces_cerevisiae__AJV9 7145
  source 1..477: mol_type = other RNA

SEQ ID NO: 5544 - RNA, 477 nt, synthetic construct
  misc_feature 1..477: note = derived and/or modified sequence opt6 fromCytosine_Deaminase_fcy1__Saccharomyces_cerevisiae__AJV9 7145
  source 1..477: mol_type = other RNA
atggtaacaggaggaatggcaagtaaatgggatcaaaaaggaatggatatagcatatgaagaagcagcattaggatataaagaaggaggagtaccaataggaggatgtttaataaataataaagatggaagtgtattaggaagaggacataatatgagatttcaaaaaggaagcgcaacattacatggagaaataagtacattagaaaattgcggaagactagaaggaaaagtatataaagatacaacattatatacaacattaagtccatgtgatatgtgtacaggagcaataataatgtatggaataccaagatgtgtagtaggagaaaatgtaaattttaaaagcaaaggagaaaaatatttacaaacaagaggacatgaagtagtagtagtagatgatgaaagatgtaaaaaaataatgaaacaatttatagatgaaagaccacaagattggtttgaagatataggagaataa

SEQ ID NO: 5545 - protein, 158 aa, synthetic construct; identical to SEQ ID NO: 5385
  REGION 1..158: note Cytosine_Deaminase_fcy1__Saccharomyces_cerevisiae__A0A0D4XD L4

SEQ ID NO: 5546 - RNA, 477 nt, synthetic construct; identical to SEQ ID NO: 5386
  misc_feature 1..477: note Cytosine_Deaminase_fcy1__Saccharomyces_cerevisiae__AJV97588
  source 1..477: mol_type = other RNA

SEQ ID NO: 5547 - RNA, 477 nt, synthetic construct; identical to SEQ ID NO: 5387
  misc_feature 1..477: note = derived and/or modified sequence opt1 fromCytosine_Deaminase_fcy1__Saccharomyces_cerevisiae__AJV9 7588
  source 1..477: mol_type = other RNA

SEQ ID NO: 5548 - RNA, 477 nt, synthetic construct; identical to SEQ ID NO: 5388
  misc_feature 1..477: note = derived and/or modified sequence opt2 fromCytosine_Deaminase_fcy1__Saccharomyces_cerevisiae__AJV9 7588
  source 1..477: mol_type = other RNA

SEQ ID NO: 5549 - RNA, 477 nt, synthetic construct; identical to SEQ ID NO: 5389
  misc_feature 1..477: note = derived and/or modified sequence opt3 fromCytosine_Deaminase_fcy1__Saccharomyces_cerevisiae__AJV9 7588
  source 1..477: mol_type = other RNA

SEQ ID NO: 5550 - RNA, 477 nt, synthetic construct; identical to SEQ ID NO: 5390
  misc_feature 1..477: note = derived and/or modified sequence opt4 fromCytosine_Deaminase_fcy1__Saccharomyces_cerevisiae__AJV9 7588
  source 1..477: mol_type = other RNA

SEQ ID NO: 5551 - RNA, 477 nt, synthetic construct; identical to SEQ ID NO: 5391
  misc_feature 1..477: note = derived and/or modified sequence opt5 fromCytosine_Deaminase_fcy1__Saccharomyces_cerevisiae__AJV9 7588
  source 1..477: mol_type = other RNA

SEQ ID NO: 5552 - RNA, 477 nt, synthetic construct
  misc_feature 1..477: note = derived and/or modified sequence opt6 fromCytosine_Deaminase_fcy1__Saccharomyces_cerevisiae__AJV9 7588
  source 1..477: mol_type = other RNA
atggtaacaggaggaatggcaagcaaatgggatcaaaaaggaatggatatagcatatgaagaagcagcattaggatataaagaaggaggagtaccaataggaggatgtttaataaataataaagatggaagtgtattaggaagaggacataatatgagatttcaaaaagggagtgcaacattacatggagaaataagtacattagaaaattgtggaagactagaaggaaaagtatataaagatacgacattatatacaacattaagtccatgtgatatgtgtacaggagcaataataatgtatggaataccaaggtgtgtagtaggagaaaatgtaaattttaaaagtaaaggagaaaaatatttacaaacaagaggacatgaagtagtagtagtagatgatgaaagatgtaaaaaaataatgaaacaatttatagatgaaagaccacaagattggtttgaagatataggagaataa

SEQ ID NO: 5553 - protein, 158 aa, synthetic construct; identical to SEQ ID NO: 5385
  REGION 1..158: note Cytosine_Deaminase_fcy1__Saccharomyces_cerevisiae__A0A0D4XG 53

SEQ ID NO: 5554 - RNA, 477 nt, synthetic construct; identical to SEQ ID NO: 5386
  misc_feature 1..477: note Cytosine_Deaminase_fcy1__Saccharomyces_cerevisiae__AJV98027
  source 1..477: mol_type = other RNA

SEQ ID NO: 5555 - RNA, 477 nt, synthetic construct; identical to SEQ ID NO: 5387
  misc_feature 1..477: note = derived and/or modified sequence opt1 fromCytosine_Deaminase_fcy1__Saccharomyces_cerevisiae__AJV9 8027
  source 1..477: mol_type = other RNA

SEQ ID NO: 5556 - RNA, 477 nt, synthetic construct; identical to SEQ ID NO: 5388
  misc_feature 1..477: note = derived and/or modified sequence opt2 fromCytosine_Deaminase_fcy1__Saccharomyces_cerevisiae__AJV9 8027
  source 1..477: mol_type = other RNA

SEQ ID NO: 5557 - RNA, 477 nt, synthetic construct; identical to SEQ ID NO: 5389
  misc_feature 1..477: note = derived and/or modified sequence opt3 fromCytosine_Deaminase_fcy1__Saccharomyces_cerevisiae__AJV9 8027
  source 1..477: mol_type = other RNA

SEQ ID NO: 5558 - RNA, 477 nt, synthetic construct; identical to SEQ ID NO: 5390
  misc_feature 1..477: note = derived and/or modified sequence opt4 fromCytosine_Deaminase_fcy1__Saccharomyces_cerevisiae__AJV9 8027
  source 1..477: mol_type = other RNA

SEQ ID NO: 5559 - RNA, 477 nt, synthetic construct; identical to SEQ ID NO: 5391
  misc_feature 1..477: note = derived and/or modified sequence opt5 fromCytosine_Deaminase_fcy1__Saccharomyces_cerevisiae__AJV9 8027
  source 1..477: mol_type = other RNA

SEQ ID NO: 5560 - RNA, 477 nt, synthetic construct
  misc_feature 1..477: note = derived and/or modified sequence opt6 fromCytosine_Deaminase_fcy1__Saccharomyces_cerevisiae__AJV9 8027
  source 1..477: mol_type = other RNA
atggtaacaggaggaatggcgagtaaatgggatcaaaaaggaatggacatagcatatgaagaagcagcattaggatataaagaaggaggagtaccaataggaggatgcttaataaataataaagacggaagtgtattaggaagaggacataatatgagatttcaaaaaggaagtgcaacactacacggagaaataagcacattagaaaactgtggaagactagaaggaaaagtatataaagatacaacattatatacaacattaagtccatgtgacatgtgcacaggagcaataataatgtatggaataccaagatgtgtagtaggagaaaatgtaaattttaaaagtaaaggagaaaaatatttacaaacaagaggacatgaagtagtagtagtagatgacgaaagatgtaaaaaaataatgaaacaatttatagatgaaagaccacaagattggtttgaagatataggagaataa

SEQ ID NO: 5561 - protein, 158 aa, synthetic construct; identical to SEQ ID NO: 5385
  REGION 1..158: note Cytosine_Deaminase_fcy1__Saccharomyces_cerevisiae__A0A0D4XG H3

SEQ ID NO: 5562 - RNA, 477 nt, synthetic construct; identical to SEQ ID NO: 5386
  misc_feature 1..477: note Cytosine_Deaminase_fcy1__Saccharomyces_cerevisiae__AJV98465
  source 1..477: mol_type = other RNA

SEQ ID NO: 5563 - RNA, 477 nt, synthetic construct; identical to SEQ ID NO: 5387
  misc_feature 1..477: note = derived and/or modified sequence opt1 fromCytosine_Deaminase_fcy1__Saccharomyces_cerevisiae__AJV9 8465
  source 1..477: mol_type = other RNA

SEQ ID NO: 5564 - RNA, 477 nt, synthetic construct; identical to SEQ ID NO: 5388
  misc_feature 1..477: note = derived and/or modified sequence opt2 fromCytosine_Deaminase_fcy1__Saccharomyces_cerevisiae__AJV9 8465
  source 1..477: mol_type = other RNA

SEQ ID NO: 5565 - RNA, 477 nt, synthetic construct; identical to SEQ ID NO: 5389
  misc_feature 1..477: note = derived and/or modified sequence opt3 fromCytosine_Deaminase_fcy1__Saccharomyces_cerevisiae__AJV9 8465
  source 1..477: mol_type = other RNA

SEQ ID NO: 5566 - RNA, 477 nt, synthetic construct; identical to SEQ ID NO: 5390
  misc_feature 1..477: note = derived and/or modified sequence opt4 fromCytosine_Deaminase_fcy1__Saccharomyces_cerevisiae__AJV9 8465
  source 1..477: mol_type = other RNA

SEQ ID NO: 5567 - RNA, 477 nt, synthetic construct; identical to SEQ ID NO: 5391
  misc_feature 1..477: note = derived and/or modified sequence opt5 fromCytosine_Deaminase_fcy1__Saccharomyces_cerevisiae__AJV9 8465
  source 1..477: mol_type = other RNA

SEQ ID NO: 5568 - RNA, 477 nt, synthetic construct
  misc_feature 1..477: note = derived and/or modified sequence opt6 fromCytosine_Deaminase_fcy1__Saccharomyces_cerevisiae__AJV9 8465
  source 1..477: mol_type = other RNA
atggtaacaggagggatggcaagtaaatgggatcaaaaaggaatggacatagcatatgaagaagcagcgttaggatataaagaaggaggagtaccaataggaggatgtttaataaataataaagacggaagtgtactaggaagaggacataatatgagatttcaaaaaggaagtgcaacattacatggagaaataagtacattagaaaactgtggaagactagaaggaaaagtatataaagatacaacactatatacaacattaagtccatgtgacatgtgcacaggagcaataataatgtatggaataccaagatgtgtagtaggagaaaatgtaaattttaaaagtaaaggagaaaaatatctacaaacaagaggacatgaagtagtagtagtagatgacgaaagatgtaaaaaaataatgaaacaatttatagatgaaagaccacaagattggtttgaagatataggagaataa

SEQ ID NO: 5569 - protein, 158 aa, synthetic construct; identical to SEQ ID NO: 5385
  REGION 1..158: note Cytosine_Deaminase_fcy1__Saccharomyces_cerevisiae__A0A0D4XH D4

SEQ ID NO: 5570 - RNA, 477 nt, synthetic construct; identical to SEQ ID NO: 5386
  misc_feature 1..477: note Cytosine_Deaminase_fcy1__Saccharomyces_cerevisiae__AJV98898
  source 1..477: mol_type = other RNA

SEQ ID NO: 5571 - RNA, 477 nt, synthetic construct; identical to SEQ ID NO: 5387
  misc_feature 1..477: note = derived and/or modified sequence opt1 fromCytosine_Deaminase_fcy1__Saccharomyces_cerevisiae__AJV9 8898
  source 1..477: mol_type = other RNA

SEQ ID NO: 5572 - RNA, 477 nt, synthetic construct; identical to SEQ ID NO: 5388
  misc_feature 1..477: note = derived and/or modified sequence opt2 fromCytosine_Deaminase_fcy1__Saccharomyces_cerevisiae__AJV9 8898
  source 1..477: mol_type = other RNA

SEQ ID NO: 5573 - RNA, 477 nt, synthetic construct; identical to SEQ ID NO: 5389
  misc_feature 1..477: note = derived and/or modified sequence opt3 fromCytosine_Deaminase_fcy1__Saccharomyces_cerevisiae__AJV9 8898
  source 1..477: mol_type = other RNA

SEQ ID NO: 5574 - RNA, 477 nt, synthetic construct; identical to SEQ ID NO: 5390
  misc_feature 1..477: note = derived and/or modified sequence opt4 fromCytosine_Deaminase_fcy1__Saccharomyces_cerevisiae__AJV9 8898
  source 1..477: mol_type = other RNA

SEQ ID NO: 5575 - RNA, 477 nt, synthetic construct; identical to SEQ ID NO: 5391
  misc_feature 1..477: note = derived and/or modified sequence opt5 fromCytosine_Deaminase_fcy1__Saccharomyces_cerevisiae__AJV9 8898
  source 1..477: mol_type = other RNA

SEQ ID NO: 5576 - RNA, 477 nt, synthetic construct
  misc_feature 1..477: note = derived and/or modified sequence opt6 fromCytosine_Deaminase_fcy1__Saccharomyces_cerevisiae__AJV9 8898
  source 1..477: mol_type = other RNA
atggtaacaggaggaatggcaagtaaatgggatcaaaaaggaatggacatagcatatgaagaagcagcattaggatataaagaagggggagtaccaataggaggatgcttaataaataataaagacggaagtgtattaggaagaggacataatatgagatttcaaaaaggaagtgcaacactacacggagaaataagcacattagaaaactgtggaagattagaaggaaaagtatataaagatacaacattatatacaacattaagtccatgtgacatgtgcacaggagcaataataatgtatggaataccaagatgtgtagtaggagaaaatgtaaattttaaaagtaaaggagagaaatatctacaaacaagaggacatgaagtagtagtagtagatgacgaaagatgtaaaaaaataatgaaacaatttatagatgaaagaccacaagattggtttgaagatataggagaataa

SEQ ID NO: 5577 - protein, 158 aa, synthetic construct; identical to SEQ ID NO: 5385
  REGION 1..158: note Cytosine_Deaminase_fcy1__Saccharomyces_cerevisiae__A0A0D4XI K5

SEQ ID NO: 5578 - RNA, 477 nt, synthetic construct; identical to SEQ ID NO: 5418
  misc_feature 1..477: note Cytosine_Deaminase_fcy1__Saccharomyces_cerevisiae__AJV99338
  source 1..477: mol_type = other RNA

SEQ ID NO: 5579 - RNA, 477 nt, synthetic construct; identical to SEQ ID NO: 5387
  misc_feature 1..477: note = derived and/or modified sequence opt1 fromCytosine_Deaminase_fcy1__Saccharomyces_cerevisiae__AJV9 9338
  source 1..477: mol_type = other RNA

SEQ ID NO: 5580 - RNA, 477 nt, synthetic construct; identical to SEQ ID NO: 5388
  misc_feature 1..477: note = derived and/or modified sequence opt2 fromCytosine_Deaminase_fcy1__Saccharomyces_cerevisiae__AJV9 9338
  source 1..477: mol_type = other RNA

SEQ ID NO: 5581 - RNA, 477 nt, synthetic construct; identical to SEQ ID NO: 5389
  misc_feature 1..477: note = derived and/or modified sequence opt3 fromCytosine_Deaminase_fcy1__Saccharomyces_cerevisiae__AJV9 9338
  source 1..477: mol_type = other RNA

SEQ ID NO: 5582 - RNA, 477 nt, synthetic construct; identical to SEQ ID NO: 5390
  misc_feature 1..477: note = derived and/or modified sequence opt4 fromCytosine_Deaminase_fcy1__Saccharomyces_cerevisiae__AJV9 9338
  source 1..477: mol_type = other RNA

SEQ ID NO: 5583 - RNA, 477 nt, synthetic construct; identical to SEQ ID NO: 5391
  misc_feature 1..477: note = derived and/or modified sequence opt5 fromCytosine_Deaminase_fcy1__Saccharomyces_cerevisiae__AJV9 9338
  source 1..477: mol_type = other RNA

SEQ ID NO: 5584 - RNA, 477 nt, synthetic construct
  misc_feature 1..477: note = derived and/or modified sequence opt6 fromCytosine_Deaminase_fcy1__Saccharomyces_cerevisiae__AJV9 9338
  source 1..477: mol_type = other RNA
atggtaacaggaggaatggcaagtaaatgggatcaaaaaggaatggatatagcatatgaagaagcagcattaggatataaagaaggaggagtaccaataggaggatgtttaataaataataaagatggaagcgtattgggaaggggacataatatgagatttcaaaaaggaagtgcgacactacatggagaaataagtacactagaaaattgtggaagactagaaggaaaagtatataaagatacaacattatatacaacattaagtccatgtgatatgtgtacaggagcaataataatgtatggaataccaagatgtgtagtaggagaaaatgtaaattttaaaagtaaaggagaaaaatatttacaaacaagaggacatgaagtagtagtagtggatgatgaaagatgtaaaaaaataatgaaacaatttatagatgaaagaccacaagattggtttgaagatataggagaataa

SEQ ID NO: 5585 - protein, 158 aa, synthetic construct; identical to SEQ ID NO: 5385
  REGION 1..158: note Cytosine_Deaminase_fcy1__Saccharomyces_cerevisiae__A0A0D4XJ R4

SEQ ID NO: 5586 - RNA, 477 nt, synthetic construct; identical to SEQ ID NO: 5466
  misc_feature 1..477: note Cytosine_Deaminase_fcy1__Saccharomyces_cerevisiae__AJV99779
  source 1..477: mol_type = other RNA

SEQ ID NO: 5587 - RNA, 477 nt, synthetic construct; identical to SEQ ID NO: 5387
  misc_feature 1..477: note = derived and/or modified sequence opt1 fromCytosine_Deaminase_fcy1__Saccharomyces_cerevisiae__AJV9 9779
  source 1..477: mol_type = other RNA

SEQ ID NO: 5588 - RNA, 477 nt, synthetic construct; identical to SEQ ID NO: 5388
  misc_feature 1..477: note = derived and/or modified sequence opt2 fromCytosine_Deaminase_fcy1__Saccharomyces_cerevisiae__AJV9 9779
  source 1..477: mol_type = other RNA

SEQ ID NO: 5589 - RNA, 477 nt, synthetic construct; identical to SEQ ID NO: 5389
  misc_feature 1..477: note = derived and/or modified sequence opt3 fromCytosine_Deaminase_fcy1__Saccharomyces_cerevisiae__AJV9 9779
  source 1..477: mol_type = other RNA

SEQ ID NO: 5590 - RNA, 477 nt, synthetic construct; identical to SEQ ID NO: 5390
  misc_feature 1..477: note = derived and/or modified sequence opt4 fromCytosine_Deaminase_fcy1__Saccharomyces_cerevisiae__AJV9 9779
  source 1..477: mol_type = other RNA

SEQ ID NO: 5591 - RNA, 477 nt, synthetic construct; identical to SEQ ID NO: 5391
  misc_feature 1..477: note = derived and/or modified sequence opt5 fromCytosine_Deaminase_fcy1__Saccharomyces_cerevisiae__AJV9 9779
  source 1..477: mol_type = other RNA

SEQ ID NO: 5592 - RNA, 477 nt, synthetic construct
  misc_feature 1..477: note = derived and/or modified sequence opt6 fromCytosine_Deaminase_fcy1__Saccharomyces_cerevisiae__AJV9 9779
  source 1..477: mol_type = other RNA
atggtaacaggaggaatggcaagtaaatgggatcaaaaaggaatggacatagcatatgaagaagcagcattaggatataaagaaggaggagtaccaataggaggatgcttaataaataataaagacggaagtgtgttaggaagaggacataatatgagatttcaaaaaggaagcgcaacattacacggagaaataagtacattagaaaactgtggaagactagaaggaaaagtatataaagatacaacactatatacaacattaagtccatgtgacatgtgcacaggagcaataataatgtatggaataccaagatgtgtagtaggagaaaatgtaaattttaaaagtaaaggagaaaaatatttacaaacaagaggacatgaagtagtagtagtagatgacgaaagatgtaaaaaaataatgaaacaatttatagatgaaagaccacaagattggttcgaagatataggagaataa

SEQ ID NO: 5593 - protein, 158 aa, synthetic construct; identical to SEQ ID NO: 5385
  REGION 1..158: note Cytosine_Deaminase_fcy1__Saccharomyces_cerevisiae__A0A0D4XL 36

SEQ ID NO: 5594 - RNA, 477 nt, synthetic construct; identical to SEQ ID NO: 5386
  misc_feature 1..477: note Cytosine_Deaminase_fcy1__Saccharomyces_cerevisiae__AJW00204
  source 1..477: mol_type = other RNA

SEQ ID NO: 5595 - RNA, 477 nt, synthetic construct; identical to SEQ ID NO: 5387
  misc_feature 1..477: note = derived and/or modified sequence opt1 fromCytosine_Deaminase_fcy1__Saccharomyces_cerevisiae__AJW0 0204
  source 1..477: mol_type = other RNA

SEQ ID NO: 5596 - RNA, 477 nt, synthetic construct; identical to SEQ ID NO: 5388
  misc_feature 1..477: note = derived and/or modified sequence opt2 fromCytosine_Deaminase_fcy1__Saccharomyces_cerevisiae__AJW0 0204
  source 1..477: mol_type = other RNA

SEQ ID NO: 5597 - RNA, 477 nt, synthetic construct; identical to SEQ ID NO: 5389
  misc_feature 1..477: note = derived and/or modified sequence opt3 fromCytosine_Deaminase_fcy1__Saccharomyces_cerevisiae__AJW0 0204
  source 1..477: mol_type = other RNA

SEQ ID NO: 5598 - RNA, 477 nt, synthetic construct; identical to SEQ ID NO: 5390
  misc_feature 1..477: note = derived and/or modified sequence opt4 fromCytosine_Deaminase_fcy1__Saccharomyces_cerevisiae__AJW0 0204
  source 1..477: mol_type = other RNA

SEQ ID NO: 5599 - RNA, 477 nt, synthetic construct; identical to SEQ ID NO: 5391
  misc_feature 1..477: note = derived and/or modified sequence opt5 fromCytosine_Deaminase_fcy1__Saccharomyces_cerevisiae__AJW0 0204
  source 1..477: mol_type = other RNA

SEQ ID NO: 5600 - RNA, 477 nt, synthetic construct
  misc_feature 1..477: note = derived and/or modified sequence opt6 fromCytosine_Deaminase_fcy1__Saccharomyces_cerevisiae__AJW0 0204
  source 1..477: mol_type = other RNA
atggtaacaggaggaatggcaagtaaatgggatcaaaaaggaatggatatagcatatgaagaagcagcattaggatataaagaaggaggagtaccaataggaggatgtttaataaataataaagatggaagtgtattaggaagaggacataatatgagatttcaaaaaggaagtgcaacattacatggagaaataagcacattagaaaattgtggaagattagaaggaaaagtatataaagatacaacattatatacaacactaagtccatgtgatatgtgtacaggagcaataataatgtatggaataccaagatgtgtagtaggagaaaatgtaaattttaaaagtaaaggagaaaaatatttacaaacaagaggacatgaagtagtagtagtagatgatgaaagatgtaaaaaaataatgaaacaatttatagatgaaaggccacaagattggtttgaagatataggagaataa

SEQ ID NO: 5601 - protein, 158 aa, synthetic construct; identical to SEQ ID NO: 5385
  REGION 1..158: note Cytosine_Deaminase_fcy1__Saccharomyces_cerevisiae__A0A0D4XN H2

SEQ ID NO: 5602 - RNA, 477 nt, synthetic construct; identical to SEQ ID NO: 5386
  misc_feature 1..477: note Cytosine_Deaminase_fcy1__Saccharomyces_cerevisiae__AJW00633
  source 1..477: mol_type = other RNA

SEQ ID NO: 5603 - RNA, 477 nt, synthetic construct; identical to SEQ ID NO: 5387
  misc_feature 1..477: note = derived and/or modified sequence opt1 fromCytosine_Deaminase_fcy1__Saccharomyces_cerevisiae__AJW0 0633
  source 1..477: mol_type = other RNA

SEQ ID NO: 5604 - RNA, 477 nt, synthetic construct; identical to SEQ ID NO: 5388
  misc_feature 1..477: note = derived and/or modified sequence opt2 fromCytosine_Deaminase_fcy1__Saccharomyces_cerevisiae__AJW0 0633
  source 1..477: mol_type = other RNA

SEQ ID NO: 5605 - RNA, 477 nt, synthetic construct; identical to SEQ ID NO: 5389
  misc_feature 1..477: note = derived and/or modified sequence opt3 fromCytosine_Deaminase_fcy1__Saccharomyces_cerevisiae__AJW0 0633
  source 1..477: mol_type = other RNA

SEQ ID NO: 5606 - RNA, 477 nt, synthetic construct; identical to SEQ ID NO: 5390
  misc_feature 1..477: note = derived and/or modified sequence opt4 fromCytosine_Deaminase_fcy1__Saccharomyces_cerevisiae__AJW0 0633
  source 1..477: mol_type = other RNA

SEQ ID NO: 5607 - RNA, 477 nt, synthetic construct; identical to SEQ ID NO: 5391
  misc_feature 1..477: note = derived and/or modified sequence opt5 fromCytosine_Deaminase_fcy1__Saccharomyces_cerevisiae__AJW0 0633
  source 1..477: mol_type = other RNA

SEQ ID NO: 5608 - RNA, 477 nt, synthetic construct
  misc_feature 1..477: note = derived and/or modified sequence opt6 fromCytosine_Deaminase_fcy1__Saccharomyces_cerevisiae__AJW0 0633
  source 1..477: mol_type = other RNA
atggtaacaggaggaatggcaagtaaatgggatcaaaaaggaatggacatagcatatgaagaagcagcattaggatataaagaaggaggagtaccaataggaggatgcttaataaataataaagacggaagtgtattaggaagaggacataatatgagatttcaaaaaggaagtgcaacactacacggagaaataagtacactagaaaactgtggaagactagaaggaaaagtatataaagatacaacattatatacaacattaagtccatgtgatatgtgcacaggagcaataataatgtatggaataccaagatgtgtagtaggagaaaatgtaaattttaaaagtaaaggagaaaaatatttacaaacaagaggacatgaagtagtagtagtagatgacgaaagatgtaaaaaaataatgaaacaatttatagatgaaagaccacaagattggtttgaagatataggagaataa

SEQ ID NO: 5609 - protein, 158 aa, synthetic construct; identical to SEQ ID NO: 5385
  REGION 1..158: note Cytosine_Deaminase_fcy1__Saccharomyces_cerevisiae__A0A0D4XN S1

SEQ ID NO: 5610 - RNA, 477 nt, synthetic construct; identical to SEQ ID NO: 5386
  misc_feature 1..477: note Cytosine_Deaminase_fcy1__Saccharomyces_cerevisiae__AJW01072
  source 1..477: mol_type = other RNA

SEQ ID NO: 5611 - RNA, 477 nt, synthetic construct; identical to SEQ ID NO: 5387
  misc_feature 1..477: note = derived and/or modified sequence opt1 fromCytosine_Deaminase_fcy1__Saccharomyces_cerevisiae__AJW0 1072
  source 1..477: mol_type = other RNA

SEQ ID NO: 5612 - RNA, 477 nt, synthetic construct; identical to SEQ ID NO: 5388
  misc_feature 1..477: note = derived and/or modified sequence opt2 fromCytosine_Deaminase_fcy1__Saccharomyces_cerevisiae__AJW0 1072
  source 1..477: mol_type = other RNA

SEQ ID NO: 5613 - RNA, 477 nt, synthetic construct; identical to SEQ ID NO: 5389
  misc_feature 1..477: note = derived and/or modified sequence opt3 fromCytosine_Deaminase_fcy1__Saccharomyces_cerevisiae__AJW0 1072
  source 1..477: mol_type = other RNA

SEQ ID NO: 5614 - RNA, 477 nt, synthetic construct; identical to SEQ ID NO: 5390
  misc_feature 1..477: note = derived and/or modified sequence opt4 fromCytosine_Deaminase_fcy1__Saccharomyces_cerevisiae__AJW0 1072
  source 1..477: mol_type = other RNA

SEQ ID NO: 5615 - RNA, 477 nt, synthetic construct; identical to SEQ ID NO: 5391
  misc_feature 1..477: note = derived and/or modified sequence opt5 fromCytosine_Deaminase_fcy1__Saccharomyces_cerevisiae__AJW0 1072
  source 1..477: mol_type = other RNA

SEQ ID NO: 5616 - RNA, 477 nt, synthetic construct
  misc_feature 1..477: note = derived and/or modified sequence opt6 fromCytosine_Deaminase_fcy1__Saccharomyces_cerevisiae__AJW0 1072
  source 1..477: mol_type = other RNA
atggtaacaggaggaatggcaagcaaatgggatcaaaaaggaatggatatagcatatgaagaagcagcattaggatataaagaaggaggagtaccaataggaggatgtttaataaataataaagatggaagtgtattaggaagagggcataatatgagatttcaaaaaggaagtgcaacattacatggagaaataagtacattagaaaattgtggaaggttagaaggaaaagtatataaagatacaacattatatacaacattaagtccatgtgatatgtgtacaggagcaataataatgtatggaataccaagatgtgtagtaggagaaaatgtaaattttaaaagtaaaggagaaaaatatttacaaacaaggggacatgaagtagtagtagtagatgatgaaagatgtaaaaaaataatgaaacaatttatagatgaaagaccacaagattggtttgaagatataggagaataa

SEQ ID NO: 5617 - protein, 158 aa, synthetic construct; identical to SEQ ID NO: 5385
  REGION 1..158: note Cytosine_Deaminase_fcy1__Saccharomyces_cerevisiae__A0A0D4XQ Y5

SEQ ID NO: 5618 - RNA, 477 nt, synthetic construct; identical to SEQ ID NO: 5386
  misc_feature 1..477: note Cytosine_Deaminase_fcy1__Saccharomyces_cerevisiae__AJW01508
  source 1..477: mol_type = other RNA

SEQ ID NO: 5619 - RNA, 477 nt, synthetic construct; identical to SEQ ID NO: 5387
  misc_feature 1..477: note = derived and/or modified sequence opt1 fromCytosine_Deaminase_fcy1__Saccharomyces_cerevisiae__AJW0 1508
  source 1..477: mol_type = other RNA

SEQ ID NO: 5620 - RNA, 477 nt, synthetic construct; identical to SEQ ID NO: 5388
  misc_feature 1..477: note = derived and/or modified sequence opt2 fromCytosine_Deaminase_fcy1__Saccharomyces_cerevisiae__AJW0 1508
  source 1..477: mol_type = other RNA

SEQ ID NO: 5621 - RNA, 477 nt, synthetic construct; identical to SEQ ID NO: 5389
  misc_feature 1..477: note = derived and/or modified sequence opt3 fromCytosine_Deaminase_fcy1__Saccharomyces_cerevisiae__AJW0 1508
  source 1..477: mol_type = other RNA

SEQ ID NO: 5622 - RNA, 477 nt, synthetic construct; identical to SEQ ID NO: 5390
  misc_feature 1..477: note = derived and/or modified sequence opt4 fromCytosine_Deaminase_fcy1__Saccharomyces_cerevisiae__AJW0 1508
  source 1..477: mol_type = other RNA

SEQ ID NO: 5623 - RNA, 477 nt, synthetic construct; identical to SEQ ID NO: 5391
  misc_feature 1..477: note = derived and/or modified sequence opt5 fromCytosine_Deaminase_fcy1__Saccharomyces_cerevisiae__AJW0 1508
  source 1..477: mol_type = other RNA

SEQ ID NO: 5624 - RNA, 477 nt, synthetic construct
  misc_feature 1..477: note = derived and/or modified sequence opt6 fromCytosine_Deaminase_fcy1__Saccharomyces_cerevisiae__AJW0 1508
  source 1..477: mol_type = other RNA
atggtaacaggagggatggcaagtaaatgggatcaaaaaggaatggacatagcatatgaagaagcagcattaggatataaagaaggaggagtaccaataggaggatgcttaataaataataaagacgggagtgtattaggaagaggacataatatgagatttcaaaaaggaagtgcaacattacacggagaaataagtacattagaaaactgtggaagactagaaggaaaagtatataaagatacaacattatatacaacattaagtccatgtgacatgtgcacaggagcaataataatgtatggaataccaagatgtgtagtaggagaaaatgtaaattttaaaagtaaaggagaaaaatacttacaaacaagaggacatgaagtagtagtagtagatgacgaaagatgtaaaaaaataatgaaacagtttatagatgaaagaccacaagattggtttgaagatataggagaataa

SEQ ID NO: 5625 - protein, 158 aa, synthetic construct; identical to SEQ ID NO: 5385
  REGION 1..158: note Cytosine_Deaminase_fcy1__Saccharomyces_cerevisiae__A0A0D4XS 80

SEQ ID NO: 5626 - RNA, 477 nt, synthetic construct; identical to SEQ ID NO: 5386
  misc_feature 1..477: note Cytosine_Deaminase_fcy1__Saccharomyces_cerevisiae__AJW02360
  source 1..477: mol_type = other RNA

SEQ ID NO: 5627 - RNA, 477 nt, synthetic construct; identical to SEQ ID NO: 5387
  misc_feature 1..477: note = derived and/or modified sequence opt1 fromCytosine_Deaminase_fcy1__Saccharomyces_cerevisiae__AJW0 2360
  source 1..477: mol_type = other RNA

SEQ ID NO: 5628 - RNA, 477 nt, synthetic construct; identical to SEQ ID NO: 5388
  misc_feature 1..477: note = derived and/or modified sequence opt2 fromCytosine_Deaminase_fcy1__Saccharomyces_cerevisiae__AJW0 2360
  source 1..477: mol_type = other RNA

SEQ ID NO: 5629 - RNA, 477 nt, synthetic construct; identical to SEQ ID NO: 5389
  misc_feature 1..477: note = derived and/or modified sequence opt3 fromCytosine_Deaminase_fcy1__Saccharomyces_cerevisiae__AJW0 2360
  source 1..477: mol_type = other RNA

SEQ ID NO: 5630 - RNA, 477 nt, synthetic construct; identical to SEQ ID NO: 5390
  misc_feature 1..477: note = derived and/or modified sequence opt4 fromCytosine_Deaminase_fcy1__Saccharomyces_cerevisiae__AJW0 2360
  source 1..477: mol_type = other RNA

SEQ ID NO: 5631 - RNA, 477 nt, synthetic construct; identical to SEQ ID NO: 5391
  misc_feature 1..477: note = derived and/or modified sequence opt5 fromCytosine_Deaminase_fcy1__Saccharomyces_cerevisiae__AJW0 2360
  source 1..477: mol_type = other RNA

SEQ ID NO: 5632 - RNA, 477 nt, synthetic construct
  misc_feature 1..477: note = derived and/or modified sequence opt6 fromCytosine_Deaminase_fcy1__Saccharomyces_cerevisiae__AJW0 2360
  source 1..477: mol_type = other RNA
atggtaacaggaggaatggcaagtaaatgggatcaaaaaggaatggacatagcatatgaagaagcagcactaggatataaagaaggaggagtaccaataggaggatgcttaataaataacaaagacggaagtgtactaggaagaggacataatatgagatttcaaaaaggaagtgcaacattacacggagaaataagcacattagaaaactgtggaagactagaaggaaaagtatataaagatacaacattatatacaacattaagtccatgtgacatgtgcacaggagcaataataatgtatggaataccaagatgtgtagtaggagaaaatgtaaatttcaaaagcaaaggagaaaaatatttacaaacaagaggacatgaagtagtagtagtagatgacgaaagatgtaaaaaaataatgaaacaatttatagacgaaagaccacaagattggtttgaagatataggagaataa

SEQ ID NO: 5633 - protein, 158 aa, synthetic construct; identical to SEQ ID NO: 5385
  REGION 1..158: note Cytosine_Deaminase_fcy1__Saccharomyces_cerevisiae__A0A0D4XS 82

SEQ ID NO: 5634 - RNA, 477 nt, synthetic construct; identical to SEQ ID NO: 5386
  misc_feature 1..477: note Cytosine_Deaminase_fcy1__Saccharomyces_cerevisiae__AJW01943
  source 1..477: mol_type = other RNA

SEQ ID NO: 5635 - RNA, 477 nt, synthetic construct; identical to SEQ ID NO: 5387
  misc_feature 1..477: note = derived and/or modified sequence opt1 fromCytosine_Deaminase_fcy1__Saccharomyces_cerevisiae__AJW0 1943
  source 1..477: mol_type = other RNA

SEQ ID NO: 5636 - RNA, 477 nt, synthetic construct; identical to SEQ ID NO: 5388
  misc_feature 1..477: note = derived and/or modified sequence opt2 fromCytosine_Deaminase_fcy1__Saccharomyces_cerevisiae__AJW0 1943
  source 1..477: mol_type = other RNA

SEQ ID NO: 5637 - RNA, 477 nt, synthetic construct; identical to SEQ ID NO: 5389
  misc_feature 1..477: note = derived and/or modified sequence opt3 fromCytosine_Deaminase_fcy1__Saccharomyces_cerevisiae__AJW0 1943
  source 1..477: mol_type = other RNA

SEQ ID NO: 5638 - RNA, 477 nt, synthetic construct; identical to SEQ ID NO: 5390
  misc_feature 1..477: note = derived and/or modified sequence opt4 fromCytosine_Deaminase_fcy1__Saccharomyces_cerevisiae__AJW0 1943
  source 1..477: mol_type = other RNA

SEQ ID NO: 5639 - RNA, 477 nt, synthetic construct; identical to SEQ ID NO: 5391
  misc_feature 1..477: note = derived and/or modified sequence opt5 fromCytosine_Deaminase_fcy1__Saccharomyces_cerevisiae__AJW0 1943
  source 1..477: mol_type = other RNA

SEQ ID NO: 5640 - RNA, 477 nt, synthetic construct
  misc_feature 1..477: note = derived and/or modified sequence opt6 fromCytosine_Deaminase_fcy1__Saccharomyces_cerevisiae__AJW0 1943
  source 1..477: mol_type = other RNA
atggtaacaggaggaatggcaagtaaatgggatcaaaaaggaatggatatagcatatgaagaagcagcattaggatataaagaaggaggagtaccaataggaggatgtttaataaataataaagatggaagtgtgttgggaagaggacataatatgagatttcaaaaaggaagtgcaacattacatggagaaataagtacattagaaaattgtggaagattagaaggaaaagtatataaagatacaacattatatacaacattaagtccatgtgatatgtgtacaggagcaataataatgtatggaataccaagatgtgtagtaggagaaaatgtaaattttaaaagcaaaggagaaaaatatttacaaacaagaggacatgaagtagtagtagtagatgatgaaagatgtaaaaaaataatgaaacaatttatagatgaaagaccacaagattggtttgaagatataggagaataa

SEQ ID NO: 5641 - protein, 158 aa, synthetic construct; identical to SEQ ID NO: 5385
  REGION 1..158: note Cytosine_Deaminase_fcy1__Saccharomyces_cerevisiae__A0A0D4XT C2

SEQ ID NO: 5642 - RNA, 477 nt, synthetic construct; identical to SEQ ID NO: 5386
  misc_feature 1..477: note Cytosine_Deaminase_fcy1__Saccharomyces_cerevisiae__AJW02785
  source 1..477: mol_type = other RNA

SEQ ID NO: 5643 - RNA, 477 nt, synthetic construct; identical to SEQ ID NO: 5387
  misc_feature 1..477: note = derived and/or modified sequence opt1 fromCytosine_Deaminase_fcy1__Saccharomyces_cerevisiae__AJW0 2785
  source 1..477: mol_type = other RNA

SEQ ID NO: 5644 - RNA, 477 nt, synthetic construct; identical to SEQ ID NO: 5388
  misc_feature 1..477: note = derived and/or modified sequence opt2 fromCytosine_Deaminase_fcy1__Saccharomyces_cerevisiae__AJW0 2785
  source 1..477: mol_type = other RNA

SEQ ID NO: 5645 - RNA, 477 nt, synthetic construct; identical to SEQ ID NO: 5389
  misc_feature 1..477: note = derived and/or modified sequence opt3 fromCytosine_Deaminase_fcy1__Saccharomyces_cerevisiae__AJW0 2785
  source 1..477: mol_type = other RNA

SEQ ID NO: 5646 - RNA, 477 nt, synthetic construct; identical to SEQ ID NO: 5390
  misc_feature 1..477: note = derived and/or modified sequence opt4 fromCytosine_Deaminase_fcy1__Saccharomyces_cerevisiae__AJW0 2785
  source 1..477: mol_type = other RNA

SEQ ID NO: 5647 - RNA, 477 nt, synthetic construct; identical to SEQ ID NO: 5391
  misc_feature 1..477: note = derived and/or modified sequence opt5 fromCytosine_Deaminase_fcy1__Saccharomyces_cerevisiae__AJW0 2785
  source 1..477: mol_type = other RNA

SEQ ID NO: 5648 - RNA, 477 nt, synthetic construct
  misc_feature 1..477: note = derived and/or modified sequence opt6 fromCytosine_Deaminase_fcy1__Saccharomyces_cerevisiae__AJW0 2785
  source 1..477: mol_type = other RNA
atggtaacaggaggaatggcaagtaaatgggatcaaaaaggaatggatatagcatatgaagaagcagcattaggatataaagaaggaggagtaccaataggaggatgtttaataaataataaagatgggagtgtattaggaagaggacacaatatgagatttcaaaaaggaagtgcaacgttacatggagaaataagtacattagaaaattgtggaagattagaaggaaaagtatataaagatacaacattatatacaacattaagtccatgtgatatgtgtacaggagcaataataatgtatggaataccaagatgtgtagtaggagaaaatgtaaattttaaaagtaaaggagaaaaatatttacaaacaagaggacatgaagtagtagtagtagatgatgaaagatgtaaaaaaataatgaaacaatttatagatgaaagaccacaagattggtttgaagatataggagaataa

SEQ ID NO: 5649 - protein, 158 aa, synthetic construct; identical to SEQ ID NO: 5385
  REGION 1..158: note Cytosine_Deaminase_fcy1__Saccharomyces_cerevisiae__A0A0D4XU Z4

SEQ ID NO: 5650 - RNA, 477 nt, synthetic construct; identical to SEQ ID NO: 5418
  misc_feature 1..477: note Cytosine_Deaminase_fcy1__Saccharomyces_cerevisiae__AJW03227
  source 1..477: mol_type = other RNA

SEQ ID NO: 5651 - RNA, 477 nt, synthetic construct; identical to SEQ ID NO: 5387
  misc_feature 1..477: note = derived and/or modified sequence opt1 fromCytosine_Deaminase_fcy1__Saccharomyces_cerevisiae__AJW0 3227
  source 1..477: mol_type = other RNA

SEQ ID NO: 5652 - RNA, 477 nt, synthetic construct; identical to SEQ ID NO: 5388
  misc_feature 1..477: note = derived and/or modified sequence opt2 fromCytosine_Deaminase_fcy1__Saccharomyces_cerevisiae__AJW0 3227
  source 1..477: mol_type = other RNA

SEQ ID NO: 5653 - RNA, 477 nt, synthetic construct; identical to SEQ ID NO: 5389
  misc_feature 1..477: note = derived and/or modified sequence opt3 fromCytosine_Deaminase_fcy1__Saccharomyces_cerevisiae__AJW0 3227
  source 1..477: mol_type = other RNA

SEQ ID NO: 5654 - RNA, 477 nt, synthetic construct; identical to SEQ ID NO: 5390
  misc_feature 1..477: note = derived and/or modified sequence opt4 fromCytosine_Deaminase_fcy1__Saccharomyces_cerevisiae__AJW0 3227
  source 1..477: mol_type = other RNA

SEQ ID NO: 5655 - RNA, 477 nt, synthetic construct; identical to SEQ ID NO: 5391
  misc_feature 1..477: note = derived and/or modified sequence opt5 fromCytosine_Deaminase_fcy1__Saccharomyces_cerevisiae__AJW0 3227
  source 1..477: mol_type = other RNA

SEQ ID NO: 5656 - RNA, 477 nt, synthetic construct
  misc_feature 1..477: note = derived and/or modified sequence opt6 fromCytosine_Deaminase_fcy1__Saccharomyces_cerevisiae__AJW0 3227
  source 1..477: mol_type = other RNA
atggtaacaggaggaatggcaagtaaatgggatcaaaaaggaatggatatagcatatgaagaagcagcattaggatataaagaaggaggagtaccaataggaggatgtttaataaataataaagatggaagtgtattaggaaggggacataatatgagatttcaaaaaggaagtgcaacattgcatggagaaataagtacattagaaaattgtggaagattagaaggaaaagtatataaagatacaacattatatacaacattaagtccatgtgatatgtgcacaggagcaataataatgtatggaataccaagatgtgtagtaggagaaaatgtaaattttaaaagtaaaggagaaaaatatttacaaacaagaggacatgaagtagtagtggtagatgatgaaagatgtaaaaaaataatgaaacaatttatagatgaaagaccacaagattggtttgaagatataggagaataa

SEQ ID NO: 5657 - protein, 158 aa, synthetic construct; identical to SEQ ID NO: 5385
  REGION 1..158: note Cytosine_Deaminase_fcy1__Saccharomyces_cerevisiae__A0A0D4XW 26

SEQ ID NO: 5658 - RNA, 477 nt, synthetic construct; identical to SEQ ID NO: 5498
  misc_feature 1..477: note Cytosine_Deaminase_fcy1__Saccharomyces_cerevisiae__AJW03664
  source 1..477: mol_type = other RNA

SEQ ID NO: 5659 - RNA, 477 nt, synthetic construct; identical to SEQ ID NO: 5387
  misc_feature 1..477: note = derived and/or modified sequence opt1 fromCytosine_Deaminase_fcy1__Saccharomyces_cerevisiae__AJW0 3664
  source 1..477: mol_type = other RNA

SEQ ID NO: 5660 - RNA, 477 nt, synthetic construct; identical to SEQ ID NO: 5388
  misc_feature 1..477: note = derived and/or modified sequence opt2 fromCytosine_Deaminase_fcy1__Saccharomyces_cerevisiae__AJW0 3664
  source 1..477: mol_type = other RNA

SEQ ID NO: 5661 - RNA, 477 nt, synthetic construct; identical to SEQ ID NO: 5389
  misc_feature 1..477: note = derived and/or modified sequence opt3 fromCytosine_Deaminase_fcy1__Saccharomyces_cerevisiae__AJW0 3664
  source 1..477: mol_type = other RNA

SEQ ID NO: 5662 - RNA, 477 nt, synthetic construct; identical to SEQ ID NO: 5390
  misc_feature 1..477: note = derived and/or modified sequence opt4 fromCytosine_Deaminase_fcy1__Saccharomyces_cerevisiae__AJW0 3664
  source 1..477: mol_type = other RNA

SEQ ID NO: 5663 - RNA, 477 nt, synthetic construct; identical to SEQ ID NO: 5391
  misc_feature 1..477: note = derived and/or modified sequence opt5 fromCytosine_Deaminase_fcy1__Saccharomyces_cerevisiae__AJW0 3664
  source 1..477: mol_type = other RNA

SEQ ID NO: 5664 - RNA, 477 nt, synthetic construct
  misc_feature 1..477: note = derived and/or modified sequence opt6 fromCytosine_Deaminase_fcy1__Saccharomyces_cerevisiae__AJW0 3664
  source 1..477: mol_type = other RNA
atggtaacaggaggaatggcaagtaaatgggatcaaaaaggaatggacatagcatatgaagaagcagcactaggatataaagaaggaggagtaccaataggaggatgcttaataaataataaagacggaagtgtattaggaagaggacataatatgagatttcaaaaaggaagtgcaacactacatggagaaataagtacactagaaaactgtggaagactagaaggaaaagtatataaagatacaacattatatacaacattaagtccatgtgacatgtgcacaggagcaataataatgtatggaataccaagatgtgtagtaggagaaaatgtaaattttaaaagtaaaggagaaaaatatttacaaacaagaggacatgaagtagtagtagtagatgatgaaagatgtaaaaaaataatgaaacaatttatagatgaaagaccacaagattggtttgaagatataggagaataa

SEQ ID NO: 5665 - protein, 158 aa, synthetic construct; identical to SEQ ID NO: 5385
  REGION 1..158: note Cytosine_Deaminase_fcy1__Saccharomyces_cerevisiae__A0A0D4XX D1

SEQ ID NO: 5666 - RNA, 477 nt, synthetic construct
  misc_feature 1..477: note Cytosine_Deaminase_fcy1__Saccharomyces_cerevisiae__AJW04100
  source 1..477: mol_type = other RNA
atggtgacagggggaatggcaagcaagtgggatcagaagggtatggacattgcctatgaggaggcggccttaggttacaaagagggtggtgttcctattggcggatgtcttatcaataacaaagacggaagtgttctcggtcgtggtcacaacatgagatttcaaaagggatccgccacactacatggtgagatctccactttggaaaactgtgggagattagagggcaaagtgtacaaagataccactttgtatacgacgctgtctccatgcgacatgtgtacaggtgccatcatcatgtatggtattccacgctgtgttgtcggtgagaacgttaatttcaaaagtaagggcgagaaatatttacaaactagaggtcacgaggttgttgttgttgacgatgagaggtgtaaaaagatcatgaaacaatttatcgatgaaagaccccaggattggtttgaagatattggtgagtag

SEQ ID NO: 5667 - RNA, 477 nt, synthetic construct; identical to SEQ ID NO: 5387
  misc_feature 1..477: note = derived and/or modified sequence opt1 fromCytosine_Deaminase_fcy1__Saccharomyces_cerevisiae__AJW0 4100
  source 1..477: mol_type = other RNA

SEQ ID NO: 5668 - RNA, 477 nt, synthetic construct; identical to SEQ ID NO: 5388
  misc_feature 1..477: note = derived and/or modified sequence opt2 fromCytosine_Deaminase_fcy1__Saccharomyces_cerevisiae__AJW0 4100
  source 1..477: mol_type = other RNA

SEQ ID NO: 5669 - RNA, 477 nt, synthetic construct; identical to SEQ ID NO: 5389
  misc_feature 1..477: note = derived and/or modified sequence opt3 fromCytosine_Deaminase_fcy1__Saccharomyces_cerevisiae__AJW0 4100
  source 1..477: mol_type = other RNA

SEQ ID NO: 5670 - RNA, 477 nt, synthetic construct; identical to SEQ ID NO: 5390
  misc_feature 1..477: note = derived and/or modified sequence opt4 fromCytosine_Deaminase_fcy1__Saccharomyces_cerevisiae__AJW0 4100
  source 1..477: mol_type = other RNA

SEQ ID NO: 5671 - RNA, 477 nt, synthetic construct; identical to SEQ ID NO: 5391
  misc_feature 1..477: note = derived and/or modified sequence opt5 fromCytosine_Deaminase_fcy1__Saccharomyces_cerevisiae__AJW0 4100
  source 1..477: mol_type = other RNA

SEQ ID NO: 5672 - RNA, 477 nt, synthetic construct
  misc_feature 1..477: note = derived and/or modified sequence opt6 fromCytosine_Deaminase_fcy1__Saccharomyces_cerevisiae__AJW0 4100
  source 1..477: mol_type = other RNA
atggtaacaggaggaatggcaagtaaatgggatcaaaagggaatggacatagcatatgaagaagcagcattaggatataaagaaggaggagtaccaataggaggatgcttaataaataataaagacggaagcgtattaggaagaggacataatatgagatttcaaaaaggaagtgcaacattacatggagaaataagtacactagaaaactgtggaagattagaaggaaaagtatataaagatacaacattatatacaacattaagtccatgtgacatgtgcacaggagcaataataatgtatggaataccaagatgtgtagtaggagaaaatgtaaattttaaaagcaaaggagaaaaatatttacaaacaagaggacatgaagtagtagtagtagatgacgaaagatgtaaaaaaataatgaaacaatttatagatgaaagaccacaagattggttcgaagatataggagaataa

SEQ ID NO: 5673 - protein, 158 aa, synthetic construct; identical to SEQ ID NO: 5385
  REGION 1..158: note Cytosine_Deaminase_fcy1__Saccharomyces_cerevisiae__A0A0D4XY H3

SEQ ID NO: 5674 - RNA, 477 nt, synthetic construct; identical to SEQ ID NO: 5418
  misc_feature 1..477: note Cytosine_Deaminase_fcy1__Saccharomyces_cerevisiae__AJW04531
  source 1..477: mol_type = other RNA

SEQ ID NO: 5675 - RNA, 477 nt, synthetic construct; identical to SEQ ID NO: 5387
  misc_feature 1..477: note = derived and/or modified sequence opt1 fromCytosine_Deaminase_fcy1__Saccharomyces_cerevisiae__AJW0 4531
  source 1..477: mol_type = other RNA

SEQ ID NO: 5676 - RNA, 477 nt, synthetic construct; identical to SEQ ID NO: 5388
  misc_feature 1..477: note = derived and/or modified sequence opt2 fromCytosine_Deaminase_fcy1__Saccharomyces_cerevisiae__AJW0 4531
  source 1..477: mol_type = other RNA

SEQ ID NO: 5677 - RNA, 477 nt, synthetic construct; identical to SEQ ID NO: 5389
  misc_feature 1..477: note = derived and/or modified sequence opt3 fromCytosine_Deaminase_fcy1__Saccharomyces_cerevisiae__AJW0 4531
  source 1..477: mol_type = other RNA

SEQ ID NO: 5678 - RNA, 477 nt, synthetic construct; identical to SEQ ID NO: 5390
  misc_feature 1..477: note = derived and/or modified sequence opt4 fromCytosine_Deaminase_fcy1__Saccharomyces_cerevisiae__AJW0 4531
  source 1..477: mol_type = other RNA

SEQ ID NO: 5679 - RNA, 477 nt, synthetic construct; identical to SEQ ID NO: 5391
  misc_feature 1..477: note = derived and/or modified sequence opt5 fromCytosine_Deaminase_fcy1__Saccharomyces_cerevisiae__AJW0 4531
  source 1..477: mol_type = other RNA

SEQ ID NO: 5680 - RNA, 477 nt, synthetic construct
  misc_feature 1..477: note = derived and/or modified sequence opt6 fromCytosine_Deaminase_fcy1__Saccharomyces_cerevisiae__AJW0 4531
  source 1..477: mol_type = other RNA
atggtaacaggaggaatggcaagtaaatgggatcaaaaaggaatggatatagcatatgaagaagcagcattaggatataaagaaggaggagtaccaataggaggatgcttaataaataataaagacggaagtgtattaggaagaggacataatatgagatttcaaaaaggaagtgcaacattacacggagaaataagtacattagaaaattgtggaagattagaaggaaaagtatataaagatacaacattatatacaacattaagtccatgtgacatgtgcacaggagcaataataatgtatggaataccaagatgtgtagtaggagaaaatgtaaattttaaaagcaaaggagaaaaatatttacaaacaagaggacatgaagtagtagtagtagatgacgaaagatgtaaaaaaataatgaaacaatttatagatgaaagaccacaagattggtttgaagatataggagaataa

SEQ ID NO: 5681 - protein, 158 aa, synthetic construct; identical to SEQ ID NO: 5385
  REGION 1..158: note Cytosine_Deaminase_fcy1__Saccharomyces_cerevisiae__A0A0D4XZ T0

SEQ ID NO: 5682 - RNA, 477 nt, synthetic construct; identical to SEQ ID NO: 5418
  misc_feature 1..477: note Cytosine_Deaminase_fcy1__Saccharomyces_cerevisiae__AJW04966
  source 1..477: mol_type = other RNA

SEQ ID NO: 5683 - RNA, 477 nt, synthetic construct; identical to SEQ ID NO: 5387
  misc_feature 1..477: note = derived and/or modified sequence opt1 fromCytosine_Deaminase_fcy1__Saccharomyces_cerevisiae__AJW0 4966
  source 1..477: mol_type = other RNA

SEQ ID NO: 5684 - RNA, 477 nt, synthetic construct; identical to SEQ ID NO: 5388
  misc_feature 1..477: note = derived and/or modified sequence opt2 fromCytosine_Deaminase_fcy1__Saccharomyces_cerevisiae__AJW0 4966
  source 1..477: mol_type = other RNA

SEQ ID NO: 5685 - RNA, 477 nt, synthetic construct; identical to SEQ ID NO: 5389
  misc_feature 1..477: note = derived and/or modified sequence opt3 fromCytosine_Deaminase_fcy1__Saccharomyces_cerevisiae__AJW0 4966
  source 1..477: mol_type = other RNA

SEQ ID NO: 5686 - RNA, 477 nt, synthetic construct; identical to SEQ ID NO: 5390
  misc_feature 1..477: note = derived and/or modified sequence opt4 fromCytosine_Deaminase_fcy1__Saccharomyces_cerevisiae__AJW0 4966
  source 1..477: mol_type = other RNA

SEQ ID NO: 5687 - RNA, 477 nt, synthetic construct; identical to SEQ ID NO: 5391
  misc_feature 1..477: note = derived and/or modified sequence opt5 fromCytosine_Deaminase_fcy1__Saccharomyces_cerevisiae__AJW0 4966
  source 1..477: mol_type = other RNA

SEQ ID NO: 5688 - RNA, 477 nt, synthetic construct
  misc_feature 1..477: note = derived and/or modified sequence opt6 fromCytosine_Deaminase_fcy1__Saccharomyces_cerevisiae__AJW0 4966
  source 1..477: mol_type = other RNA
atggtaacaggaggaatggcaagtaaatgggatcaaaaaggaatggacatagcatatgaagaagcagcattaggatataaagaaggaggagtaccaataggaggatgtctaataaataataaagacggaagtgtattaggaagaggacataatatgagatttcaaaaaggaagtgcgacattacacggagaaataagtacactagaaaactgtggaagactagaaggaaaagtatataaagatacaacattatatacaacattaagtccatgtgacatgtgcacaggagcaataataatgtatggaataccaagatgtgtagtaggagaaaatgtaaattttaaaagcaaaggagaaaaatatctacaaacaagaggacatgaagtagtagtagtagatgacgaaagatgtaaaaaaataatgaaacaatttatagatgaaagaccacaagattggtttgaagatataggagaataa

SEQ ID NO: 5689 - protein, 158 aa, synthetic construct; identical to SEQ ID NO: 5385
  REGION 1..158: note Cytosine_Deaminase_fcy1__Saccharomyces_cerevisiae__A0A0D4Y1 64

SEQ ID NO: 5690 - RNA, 477 nt, synthetic construct; identical to SEQ ID NO: 5386
  misc_feature 1..477: note Cytosine_Deaminase_fcy1__Saccharomyces_cerevisiae__AJW05404
  source 1..477: mol_type = other RNA

SEQ ID NO: 5691 - RNA, 477 nt, synthetic construct; identical to SEQ ID NO: 5387
  misc_feature 1..477: note = derived and/or modified sequence opt1 fromCytosine_Deaminase_fcy1__Saccharomyces_cerevisiae__AJW0 5404
  source 1..477: mol_type = other RNA

SEQ ID NO: 5692 - RNA, 477 nt, synthetic construct; identical to SEQ ID NO: 5388
  misc_feature 1..477: note = derived and/or modified sequence opt2 fromCytosine_Deaminase_fcy1__Saccharomyces_cerevisiae__AJW0 5404
  source 1..477: mol_type = other RNA

SEQ ID NO: 5693 - RNA, 477 nt, synthetic construct; identical to SEQ ID NO: 5389
  misc_feature 1..477: note = derived and/or modified sequence opt3 fromCytosine_Deaminase_fcy1__Saccharomyces_cerevisiae__AJW0 5404
  source 1..477: mol_type = other RNA

SEQ ID NO: 5694 - RNA, 477 nt, synthetic construct; identical to SEQ ID NO: 5390
  misc_feature 1..477: note = derived and/or modified sequence opt4 fromCytosine_Deaminase_fcy1__Saccharomyces_cerevisiae__AJW0 5404
  source 1..477: mol_type = other RNA

SEQ ID NO: 5695 - RNA, 477 nt, synthetic construct; identical to SEQ ID NO: 5391
  misc_feature 1..477: note = derived and/or modified sequence opt5 fromCytosine_Deaminase_fcy1__Saccharomyces_cerevisiae__AJW0 5404
  source 1..477: mol_type = other RNA

SEQ ID NO: 5696 - RNA, 477 nt, synthetic construct
  misc_feature 1..477: note = derived and/or modified sequence opt6 fromCytosine_Deaminase_fcy1__Saccharomyces_cerevisiae__AJW0 5404
  source 1..477: mol_type = other RNA
atggtaacaggaggaatggcaagtaaatgggatcaaaaagggatggatatagcatatgaagaagcagcattaggatataaagaaggaggagtaccaataggaggatgtttaataaataataaagatggaagtgtattaggaagaggacataatatgagatttcaaaaaggaagtgcaacattacatggagaaataagtacattagaaaattgtggaagattagaaggaaaagtatataaagatacaacactatatacaacattaagtccatgtgatatgtgtacaggagcaataataatgtatggaataccaagatgtgtagtaggagaaaatgtaaattttaaaagtaaaggagaaaaatatttacaaacaaggggacatgaagtagtagtagtagatgatgaaagatgtaaaaaaataatgaaacaatttatagatgaaagaccacaagattggtttgaagatataggagaatga

SEQ ID NO: 5697 - protein, 158 aa, synthetic construct; identical to SEQ ID NO: 5385
  REGION 1..158: note Cytosine_Deaminase_fcy1__Saccharomyces_cerevisiae__A0A0D4Y2 A8

SEQ ID NO: 5698 - RNA, 477 nt, synthetic construct; identical to SEQ ID NO: 5386
  misc_feature 1..477: note Cytosine_Deaminase_fcy1__Saccharomyces_cerevisiae__AJW05846
  source 1..477: mol_type = other RNA

SEQ ID NO: 5699 - RNA, 477 nt, synthetic construct; identical to SEQ ID NO: 5387
  misc_feature 1..477: note = derived and/or modified sequence opt1 fromCytosine_Deaminase_fcy1__Saccharomyces_cerevisiae__AJW0 5846
  source 1..477: mol_type = other RNA

SEQ ID NO: 5700 - RNA, 477 nt, synthetic construct; identical to SEQ ID NO: 5388
  misc_feature 1..477: note = derived and/or modified sequence opt2 fromCytosine_Deaminase_fcy1__Saccharomyces_cerevisiae__AJW0 5846
  source 1..477: mol_type = other RNA

SEQ ID NO: 5701 - RNA, 477 nt, synthetic construct; identical to SEQ ID NO: 5389
  misc_feature 1..477: note = derived and/or modified sequence opt3 fromCytosine_Deaminase_fcy1__Saccharomyces_cerevisiae__AJW0 5846
  source 1..477: mol_type = other RNA

SEQ ID NO: 5702 - RNA, 477 nt, synthetic construct; identical to SEQ ID NO: 5390
  misc_feature 1..477: note = derived and/or modified sequence opt4 fromCytosine_Deaminase_fcy1__Saccharomyces_cerevisiae__AJW0 5846
  source 1..477: mol_type = other RNA

SEQ ID NO: 5703 - RNA, 477 nt, synthetic construct; identical to SEQ ID NO: 5391
  misc_feature 1..477: note = derived and/or modified sequence opt5 fromCytosine_Deaminase_fcy1__Saccharomyces_cerevisiae__AJW0 5846
  source 1..477: mol_type = other RNA

SEQ ID NO: 5704 - RNA, 477 nt, synthetic construct
  misc_feature 1..477: note = derived and/or modified sequence opt6 fromCytosine_Deaminase_fcy1__Saccharomyces_cerevisiae__AJW0 5846
  source 1..477: mol_type = other RNA
atggtaacaggaggaatggcaagtaaatgggatcaaaaaggaatggatatagcatatgaagaagcagcattaggatataaagaaggaggagtaccaataggaggatgcttaataaataataaagatggaagtgtattaggaagaggacataatatgagatttcaaaaaggaagtgcaacattgcacggagaaataagcacattagaaaactgtggaagactagaaggaaaagtatataaagatacaacattatatacaacattaagtccatgtgacatgtgtacaggagcaataataatgtatggaataccaagatgtgtagtaggagaaaatgtaaattttaaaagcaaaggagaaaaatatttacaaacaagaggacatgaagtagtagtagtagatgacgaaagatgtaaaaaaataatgaaacaatttatagatgaaagaccacaagattggtttgaagatataggagaataa

SEQ ID NO: 5705 - protein, 158 aa, synthetic construct; identical to SEQ ID NO: 5385
  REGION 1..158: note Cytosine_Deaminase_fcy1__Saccharomyces_cerevisiae__A0A0D4Y3 N1

SEQ ID NO: 5706 - RNA, 477 nt, synthetic construct; identical to SEQ ID NO: 5386
  misc_feature 1..477: note Cytosine_Deaminase_fcy1__Saccharomyces_cerevisiae__AJW06284
  source 1..477: mol_type = other RNA

SEQ ID NO: 5707 - RNA, 477 nt, synthetic construct; identical to SEQ ID NO: 5387
  misc_feature 1..477: note = derived and/or modified sequence opt1 fromCytosine_Deaminase_fcy1__Saccharomyces_cerevisiae__AJW0 6284
  source 1..477: mol_type = other RNA

SEQ ID NO: 5708 - RNA, 477 nt, synthetic construct; identical to SEQ ID NO: 5388
  misc_feature 1..477: note = derived and/or modified sequence opt2 fromCytosine_Deaminase_fcy1__Saccharomyces_cerevisiae__AJW0 6284
  source 1..477: mol_type = other RNA

SEQ ID NO: 5709 - RNA, 477 nt, synthetic construct; identical to SEQ ID NO: 5389
  misc_feature 1..477: note = derived and/or modified sequence opt3 fromCytosine_Deaminase_fcy1__Saccharomyces_cerevisiae__AJW0 6284
  source 1..477: mol_type = other RNA

SEQ ID NO: 5710 - RNA, 477 nt, synthetic construct; identical to SEQ ID NO: 5390
  misc_feature 1..477: note = derived and/or modified sequence opt4 fromCytosine_Deaminase_fcy1__Saccharomyces_cerevisiae__AJW0 6284
  source 1..477: mol_type = other RNA

SEQ ID NO: 5711 - RNA, 477 nt, synthetic construct; identical to SEQ ID NO: 5391
  misc_feature 1..477: note = derived and/or modified sequence opt5 fromCytosine_Deaminase_fcy1__Saccharomyces_cerevisiae__AJW0 6284
  source 1..477: mol_type = other RNA

SEQ ID NO: 5712 - RNA, 477 nt, synthetic construct
  misc_feature 1..477: note = derived and/or modified sequence opt6 fromCytosine_Deaminase_fcy1__Saccharomyces_cerevisiae__AJW0 6284
  source 1..477: mol_type = other RNA
atggtaacaggaggaatggcaagtaaatgggatcaaaaaggaatggacatagcatatgaagaagcagcattaggatataaagaaggaggagtaccaataggaggatgcttaataaataataaagacggaagtgtactaggaagaggacataatatgagatttcaaaaaggaagtgcaacactacacggagaaataagtacattagaaaactgtggaagattagaaggaaaagtatataaagatacaacattatatacaacactaagcccatgtgacatgtgcacaggagcaataataatgtatggaataccaagatgtgtagtaggagaaaacgtaaattttaaaagtaaaggagaaaaatatttacaaacaagaggacatgaagtagtagtagtagatgacgaaagatgtaaaaaaataatgaaacaatttatagatgaaagaccacaagattggtttgaagatataggagaataa

SEQ ID NO: 5713 - protein, 158 aa, synthetic construct; identical to SEQ ID NO: 5385
  REGION 1..158: note Cytosine_Deaminase_fcy1__Saccharomyces_cerevisiae__A0A0D4Y5 S3

SEQ ID NO: 5714 - RNA, 477 nt, synthetic construct
  misc_feature 1..477: note Cytosine_Deaminase_fcy1__Saccharomyces_cerevisiae__AJW06723
  source 1..477: mol_type = other RNA
atggtgacagggggaatggcaagcaagtgggatcagaagggtatggacattgcctatgaggaggcggccttaggttacaaagagggtggtgttcctattggcggatgtcttatcaataacaaagacggaagtgttctcggtcgtggtcacaacatgagatttcaaaagggatccgccacactacatggtgagatctccactttggaaaactgtgggagattagagggcaaagtgtacaaagataccactttgtatacgacgctgtctccatgcgacatgtgtacaggtgccatcatcatgtatggtattccacgctgtgttgtcggtgagaacgttaatttcaaaagtaagggcgagaaatatttacaaactagaggtcacgaggttgttgttgttgacgatgagaggtgtaaaaagatcatgaaacaattcatcgatgaaagacctcaggattggtttgaagatattggtgagtag

SEQ ID NO: 5715 - RNA, 477 nt, synthetic construct; identical to SEQ ID NO: 5387
  misc_feature 1..477: note = derived and/or modified sequence opt1 fromCytosine_Deaminase_fcy1__Saccharomyces_cerevisiae__AJW0 6723
  source 1..477: mol_type = other RNA

SEQ ID NO: 5716 - RNA, 477 nt, synthetic construct; identical to SEQ ID NO: 5388
  misc_feature 1..477: note = derived and/or modified sequence opt2 fromCytosine_Deaminase_fcy1__Saccharomyces_cerevisiae__AJW0 6723
  source 1..477: mol_type = other RNA

SEQ ID NO: 5717 - RNA, 477 nt, synthetic construct; identical to SEQ ID NO: 5389
  misc_feature 1..477: note = derived and/or modified sequence opt3 fromCytosine_Deaminase_fcy1__Saccharomyces_cerevisiae__AJW0 6723
  source 1..477: mol_type = other RNA

SEQ ID NO: 5718 - RNA, 477 nt, synthetic construct; identical to SEQ ID NO: 5390
  misc_feature 1..477: note = derived and/or modified sequence opt4 fromCytosine_Deaminase_fcy1__Saccharomyces_cerevisiae__AJW0 6723
  source 1..477: mol_type = other RNA

SEQ ID NO: 5719 - RNA, 477 nt, synthetic construct; identical to SEQ ID NO: 5391
  misc_feature 1..477: note = derived and/or modified sequence opt5 fromCytosine_Deaminase_fcy1__Saccharomyces_cerevisiae__AJW0 6723
  source 1..477: mol_type = other RNA

SEQ ID NO: 5720 - RNA, 477 nt, synthetic construct
  misc_feature 1..477: note = derived and/or modified sequence opt6 fromCytosine_Deaminase_fcy1__Saccharomyces_cerevisiae__AJW0 6723
  source 1..477: mol_type = other RNA
atggtaacaggaggaatggcaagcaaatgggatcaaaaaggaatggacatagcatatgaagaagcagcattaggatataaagaaggaggagtaccaataggaggatgcttaataaataataaagacggaagtgtattaggaagaggacataatatgagatttcaaaaaggaagtgcaacattacacggagaaataagtacattagaaaattgtggaagattagaaggaaaagtatataaagatacaacattatatacaacactaagtccatgtgacatgtgcacaggagcaataataatgtatggaataccaagatgtgtagtaggagaaaatgtaaattttaaaagtaaaggagaaaaatatttacaaacaagaggacatgaagtagtagtagtagatgacgaaagatgtaaaaaaataatgaaacaatttatagatgaaagaccacaagattggtttgaagatataggagaataa

SEQ ID NO: 5721 - protein, 158 aa, synthetic construct; identical to SEQ ID NO: 5385
  REGION 1..158: note Cytosine_Deaminase_fcy1__Saccharomyces_cerevisiae__A0A0D4Y5 Y1

SEQ ID NO: 5722 - RNA, 477 nt, synthetic construct; identical to SEQ ID NO: 5386
  misc_feature 1..477: note Cytosine_Deaminase_fcy1__Saccharomyces_cerevisiae__AJW07156
  source 1..477: mol_type = other RNA

SEQ ID NO: 5723 - RNA, 477 nt, synthetic construct; identical to SEQ ID NO: 5387
  misc_feature 1..477: note = derived and/or modified sequence opt1 fromCytosine_Deaminase_fcy1__Saccharomyces_cerevisiae__AJW0 7156
  source 1..477: mol_type = other RNA

SEQ ID NO: 5724 - RNA, 477 nt, synthetic construct; identical to SEQ ID NO: 5388
  misc_feature 1..477: note = derived and/or modified sequence opt2 fromCytosine_Deaminase_fcy1__Saccharomyces_cerevisiae__AJW0 7156
  source 1..477: mol_type = other RNA

SEQ ID NO: 5725 - RNA, 477 nt, synthetic construct; identical to SEQ ID NO: 5389
  misc_feature 1..477: note = derived and/or modified sequence opt3 fromCytosine_Deaminase_fcy1__Saccharomyces_cerevisiae__AJW0 7156
  source 1..477: mol_type = other RNA

SEQ ID NO: 5726 - RNA, 477 nt, synthetic construct; identical to SEQ ID NO: 5390
  misc_feature 1..477: note = derived and/or modified sequence opt4 fromCytosine_Deaminase_fcy1__Saccharomyces_cerevisiae__AJW0 7156
  source 1..477: mol_type = other RNA

SEQ ID NO: 5727 - RNA, 477 nt, synthetic construct; identical to SEQ ID NO: 5391
  misc_feature 1..477: note = derived and/or modified sequence opt5 fromCytosine_Deaminase_fcy1__Saccharomyces_cerevisiae__AJW0 7156
  source 1..477: mol_type = other RNA

SEQ ID NO: 5728 - RNA, 477 nt, synthetic construct
  misc_feature 1..477: note = derived and/or modified sequence opt6 fromCytosine_Deaminase_fcy1__Saccharomyces_cerevisiae__AJW0 7156
  source 1..477: mol_type = other RNA
atggtaacaggaggaatggcaagtaaatgggatcaaaaaggaatggacatagcatatgaagaagcagcattaggatataaagaaggaggagtaccaataggaggatgcttaataaataataaagacggaagtgtattaggaagaggacataatatgagattccaaaaaggaagtgcaacactacatggagaaataagtacattagaaaactgtggaagactagaaggaaaagtatataaagatacaacactatatacaacattaagtccatgtgacatgtgcacaggagcaataataatgtatggaataccaagatgtgtagtaggagaaaatgtaaattttaaaagtaaaggagaaaaatatctacaaacaagaggacatgaagtagtagtagtagatgacgaaagatgtaaaaaaataatgaaacaattcatagatgaaagaccacaagattggtttgaagatataggagaataa

SEQ ID NO: 5729 - protein, 158 aa, synthetic construct; identical to SEQ ID NO: 5385
  REGION 1..158: note Cytosine_Deaminase_fcy1__Saccharomyces_cerevisiae__A0A0D4Y7 I2

SEQ ID NO: 5730 - RNA, 477 nt, synthetic construct; identical to SEQ ID NO: 5714
  misc_feature 1..477: note Cytosine_Deaminase_fcy1__Saccharomyces_cerevisiae__AJW07594
  source 1..477: mol_type = other RNA

SEQ ID NO: 5731 - RNA, 477 nt, synthetic construct; identical to SEQ ID NO: 5387
  misc_feature 1..477: note = derived and/or modified sequence opt1 fromCytosine_Deaminase_fcy1__Saccharomyces_cerevisiae__AJW0 7594
  source 1..477: mol_type = other RNA

SEQ ID NO: 5732 - RNA, 477 nt, synthetic construct; identical to SEQ ID NO: 5388
  misc_feature 1..477: note = derived and/or modified sequence opt2 fromCytosine_Deaminase_fcy1__Saccharomyces_cerevisiae__AJW0 7594
  source 1..477: mol_type = other RNA

SEQ ID NO: 5733 - RNA, 477 nt, synthetic construct; identical to SEQ ID NO: 5389
  misc_feature 1..477: note = derived and/or modified sequence opt3 fromCytosine_Deaminase_fcy1__Saccharomyces_cerevisiae__AJW0 7594
  source 1..477: mol_type = other RNA

SEQ ID NO: 5734 - RNA, 477 nt, synthetic construct; identical to SEQ ID NO: 5390
  misc_feature 1..477: note = derived and/or modified sequence opt4 fromCytosine_Deaminase_fcy1__Saccharomyces_cerevisiae__AJW0 7594
  source 1..477: mol_type = other RNA

SEQ ID NO: 5735 - RNA, 477 nt, synthetic construct; identical to SEQ ID NO: 5391
  misc_feature 1..477: note = derived and/or modified sequence opt5 fromCytosine_Deaminase_fcy1__Saccharomyces_cerevisiae__AJW0 7594
  source 1..477: mol_type = other RNA

SEQ ID NO: 5736 - RNA, 477 nt, synthetic construct
  misc_feature 1..477: note = derived and/or modified sequence opt6 fromCytosine_Deaminase_fcy1__Saccharomyces_cerevisiae__AJW0 7594
  source 1..477: mol_type = other RNA
atggtaacaggaggaatggcaagtaaatgggatcaaaaaggaatggacatagcatatgaagaagcagcgttaggatataaagaagggggagtaccaataggaggatgtttaataaataataaagacggaagtgtattaggaagaggacataatatgagatttcaaaaaggaagtgcaacattacacggagaaataagtacattagaaaactgtggaagactagaaggaaaagtatataaagatacaacattatatacaacattaagtccatgtgacatgtgcacaggagcaataataatgtatggaataccaagatgtgtagtaggagaaaatgtaaatttcaaaagtaaaggagaaaaatatttacaaacaagaggacatgaagtagtagtagtagatgatgaaagatgtaaaaaaataatgaaacaatttatagatgaaagaccacaagattggtttgaagatataggagaataa

SEQ ID NO: 5737 - protein, 158 aa, synthetic construct; identical to SEQ ID NO: 5385
  REGION 1..158: note Cytosine_Deaminase_fcy1__Saccharomyces_cerevisiae__A0A0D4Y8 S5

SEQ ID NO: 5738 - RNA, 477 nt, synthetic construct; identical to SEQ ID NO: 5386
  misc_feature 1..477: note Cytosine_Deaminase_fcy1__Saccharomyces_cerevisiae__AJW08024
  source 1..477: mol_type = other RNA

SEQ ID NO: 5739 - RNA, 477 nt, synthetic construct; identical to SEQ ID NO: 5387
  misc_feature 1..477: note = derived and/or modified sequence opt1 fromCytosine_Deaminase_fcy1__Saccharomyces_cerevisiae__AJW0 8024
  source 1..477: mol_type = other RNA

SEQ ID NO: 5740 - RNA, 477 nt, synthetic construct; identical to SEQ ID NO: 5388
  misc_feature 1..477: note = derived and/or modified sequence opt2 fromCytosine_Deaminase_fcy1__Saccharomyces_cerevisiae__AJW0 8024
  source 1..477: mol_type = other RNA

SEQ ID NO: 5741 - RNA, 477 nt, synthetic construct; identical to SEQ ID NO: 5389
  misc_feature 1..477: note = derived and/or modified sequence opt3 fromCytosine_Deaminase_fcy1__Saccharomyces_cerevisiae__AJW0 8024
  source 1..477: mol_type = other RNA

SEQ ID NO: 5742 - RNA, 477 nt, synthetic construct; identical to SEQ ID NO: 5390
  misc_feature 1..477: note = derived and/or modified sequence opt4 fromCytosine_Deaminase_fcy1__Saccharomyces_cerevisiae__AJW0 8024
  source 1..477: mol_type = other RNA

SEQ ID NO: 5743 - RNA, 477 nt, synthetic construct; identical to SEQ ID NO: 5391
  misc_feature 1..477: note = derived and/or modified sequence opt5 fromCytosine_Deaminase_fcy1__Saccharomyces_cerevisiae__AJW0 8024
  source 1..477: mol_type = other RNA

SEQ ID NO: 5744 - RNA, 477 nt, synthetic construct
  misc_feature 1..477: note = derived and/or modified sequence opt6 fromCytosine_Deaminase_fcy1__Saccharomyces_cerevisiae__AJW0 8024
  source 1..477: mol_type = other RNA
atggtaacaggaggaatggcaagtaaatgggatcaaaaaggaatggatatagcatatgaagaagcagcattaggatataaagaaggaggagtaccaataggaggatgcttaataaataataaagatggaagtgtattaggaagaggacataatatgagatttcaaaaaggaagtgcaacactacatggggaaataagtacattagaaaattgtggaagattagaaggaaaagtatataaagatacaacattatatacaacattaagcccatgtgacatgtgtacaggagcaataataatgtatggaataccaagatgtgtagtaggagaaaatgtaaattttaaaagcaaaggagaaaaatatttacaaacaagaggacatgaagtagtagtagtagatgatgaaagatgtaaaaaaataatgaaacaatttatagatgaaagaccacaagattggtttgaagatataggagaataa

SEQ ID NO: 5745 - protein, 158 aa, synthetic construct; identical to SEQ ID NO: 5385
  REGION 1..158: note Cytosine_Deaminase_fcy1__Saccharomyces_cerevisiae__A0A0D4YA R2

SEQ ID NO: 5746 - RNA, 477 nt, synthetic construct
  misc_feature 1..477: note Cytosine_Deaminase_fcy1__Saccharomyces_cerevisiae__AJW08463
  source 1..477: mol_type = other RNA
atggtgacagggggaatggcaagcaagtgggatcagaagggtatggacattgcctatgaggaggcggccttaggttacaaagagggtggtgttcctattggcggatgtcttatcaataacaaggacggaagtgttctcggtcgtggtcacaacatgagatttcaaaagggatccgccacactacatggtgagatctccactttggaaaactgtgggagattagagggcaaagtgtacaaagataccactttgtatacgacgctgtctccatgcgacatgtgtacaggtgccatcatcatgtatggtattccacgctgtgttgtcggtgagaacgttaatttcaaaagtaagggcgagaaatatttacaaactagaggtcacgaggttgttgttgttgacgatgagaggtgtaaaaagatcatgaaacaatttatcgatgaaagacctcaggattggtttgaagatattggtgagtag

SEQ ID NO: 5747 - RNA, 477 nt, synthetic construct; identical to SEQ ID NO: 5387
  misc_feature 1..477: note = derived and/or modified sequence opt1 fromCytosine_Deaminase_fcy1__Saccharomyces_cerevisiae__AJW0 8463
  source 1..477: mol_type = other RNA

SEQ ID NO: 5748 - RNA, 477 nt, synthetic construct; identical to SEQ ID NO: 5388
  misc_feature 1..477: note = derived and/or modified sequence opt2 fromCytosine_Deaminase_fcy1__Saccharomyces_cerevisiae__AJW0 8463
  source 1..477: mol_type = other RNA

SEQ ID NO: 5749 - RNA, 477 nt, synthetic construct; identical to SEQ ID NO: 5389
  misc_feature 1..477: note = derived and/or modified sequence opt3 fromCytosine_Deaminase_fcy1__Saccharomyces_cerevisiae__AJW0 8463
  source 1..477: mol_type = other RNA

SEQ ID NO: 5750 - RNA, 477 nt, synthetic construct; identical to SEQ ID NO: 5390
  misc_feature 1..477: note = derived and/or modified sequence opt4 fromCytosine_Deaminase_fcy1__Saccharomyces_cerevisiae__AJW0 8463
  source 1..477: mol_type = other RNA

SEQ ID NO: 5751 - RNA, 477 nt, synthetic construct; identical to SEQ ID NO: 5391
  misc_feature 1..477: note = derived and/or modified sequence opt5 fromCytosine_Deaminase_fcy1__Saccharomyces_cerevisiae__AJW0 8463
  source 1..477: mol_type = other RNA

SEQ ID NO: 5752 - RNA, 477 nt, synthetic construct
  misc_feature 1..477: note = derived and/or modified sequence opt6 fromCytosine_Deaminase_fcy1__Saccharomyces_cerevisiae__AJW0 8463
  source 1..477: mol_type = other RNA
atggtaacaggaggaatggcaagtaaatgggatcaaaaaggaatggacatagcatatgaagaagcagcattaggatataaagaaggaggagtaccaataggaggatgtttaataaataataaagacggaagtgtattaggaagaggacataatatgagatttcaaaaaggaagtgcgacattacatggagaaataagtacattagaaaactgtggaagactagaaggaaaagtatataaagatacaacactatatacaacactaagtccatgtgatatgtgcacaggagcaataataatgtatggaataccaagatgtgtagtaggagaaaatgtaaattttaaaagtaaaggagaaaaatatttacaaacaagaggacatgaagtagtagtagtagatgacgaaagatgtaaaaaaataatgaaacaatttatagatgaaagaccgcaagattggtttgaagatataggagaataa

SEQ ID NO: 5753 - protein, 158 aa, synthetic construct; identical to SEQ ID NO: 5385
  REGION 1..158: note Cytosine_Deaminase_fcy1__Saccharomyces_cerevisiae__A0A0D4YB Y2

SEQ ID NO: 5754 - RNA, 477 nt, synthetic construct; identical to SEQ ID NO: 5386
  misc_feature 1..477: note Cytosine_Deaminase_fcy1__Saccharomyces_cerevisiae__AJW08888
  source 1..477: mol_type = other RNA

SEQ ID NO: 5755 - RNA, 477 nt, synthetic construct; identical to SEQ ID NO: 5387
  misc_feature 1..477: note = derived and/or modified sequence opt1 fromCytosine_Deaminase_fcy1__Saccharomyces_cerevisiae__AJW0 8888
  source 1..477: mol_type = other RNA

SEQ ID NO: 5756 - RNA, 477 nt, synthetic construct; identical to SEQ ID NO: 5388
  misc_feature 1..477: note = derived and/or modified sequence opt2 fromCytosine_Deaminase_fcy1__Saccharomyces_cerevisiae__AJW0 8888
  source 1..477: mol_type = other RNA

SEQ ID NO: 5757 - RNA, 477 nt, synthetic construct; identical to SEQ ID NO: 5389
  misc_feature 1..477: note = derived and/or modified sequence opt3 fromCytosine_Deaminase_fcy1__Saccharomyces_cerevisiae__AJW0 8888
  source 1..477: mol_type = other RNA

SEQ ID NO: 5758 - RNA, 477 nt, synthetic construct; identical to SEQ ID NO: 5390
  misc_feature 1..477: note = derived and/or modified sequence opt4 fromCytosine_Deaminase_fcy1__Saccharomyces_cerevisiae__AJW0 8888
  source 1..477: mol_type = other RNA

SEQ ID NO: 5759 - RNA, 477 nt, synthetic construct; identical to SEQ ID NO: 5391
  misc_feature 1..477: note = derived and/or modified sequence opt5 fromCytosine_Deaminase_fcy1__Saccharomyces_cerevisiae__AJW0 8888
  source 1..477: mol_type = other RNA

SEQ ID NO: 5760 - RNA, 477 nt, synthetic construct
  misc_feature 1..477: note = derived and/or modified sequence opt6 fromCytosine_Deaminase_fcy1__Saccharomyces_cerevisiae__AJW0 8888
  source 1..477: mol_type = other RNA
atggtaacaggaggaatggcaagtaaatgggatcaaaaaggaatggatatagcatatgaagaagcagcattaggatataaagaaggaggagtaccaataggaggatgtctaataaataataaagatggaagtgtattaggaagaggacataatatgagatttcaaaaaggaagcgcaacattacatggagaaataagtacattagaaaattgtggaagattagaaggaaaagtatataaagatacgacactatatacaacattaagtccatgtgatatgtgtacaggagcaataataatgtatggaataccaagatgtgtagtaggagaaaatgtaaattttaaaagtaaaggagaaaaatatctacaaacaagaggacatgaagtagtagtagtagatgatgaaagatgtaaaaaaataatgaaacaatttatagatgaaagaccacaagattggtttgaagatataggagaatag

SEQ ID NO: 5761 - protein, 158 aa, synthetic construct; identical to SEQ ID NO: 5385
  REGION 1..158: note Cytosine_Deaminase_fcy1__Saccharomyces_cerevisiae__A0A0D4YC B3

SEQ ID NO: 5762 - RNA, 477 nt, synthetic construct; identical to SEQ ID NO: 5386
  misc_feature 1..477: note Cytosine_Deaminase_fcy1__Saccharomyces_cerevisiae__AJW09327
  source 1..477: mol_type = other RNA

SEQ ID NO: 5763 - RNA, 477 nt, synthetic construct; identical to SEQ ID NO: 5387
  misc_feature 1..477: note = derived and/or modified sequence opt1 fromCytosine_Deaminase_fcy1__Saccharomyces_cerevisiae__AJW0 9327
  source 1..477: mol_type = other RNA

SEQ ID NO: 5764 - RNA, 477 nt, synthetic construct; identical to SEQ ID NO: 5388
  misc_feature 1..477: note = derived and/or modified sequence opt2 fromCytosine_Deaminase_fcy1__Saccharomyces_cerevisiae__AJW0 9327
  source 1..477: mol_type = other RNA

SEQ ID NO: 5765 - RNA, 477 nt, synthetic construct; identical to SEQ ID NO: 5389
  misc_feature 1..477: note = derived and/or modified sequence opt3 fromCytosine_Deaminase_fcy1__Saccharomyces_cerevisiae__AJW0 9327
  source 1..477: mol_type = other RNA

SEQ ID NO: 5766 - RNA, 477 nt, synthetic construct; identical to SEQ ID NO: 5390
  misc_feature 1..477: note = derived and/or modified sequence opt4 fromCytosine_Deaminase_fcy1__Saccharomyces_cerevisiae__AJW0 9327
  source 1..477: mol_type = other RNA

SEQ ID NO: 5767 - RNA, 477 nt, synthetic construct; identical to SEQ ID NO: 5391
  misc_feature 1..477: note = derived and/or modified sequence opt5 fromCytosine_Deaminase_fcy1__Saccharomyces_cerevisiae__AJW0 9327
  source 1..477: mol_type = other RNA

SEQ ID NO: 5768 - RNA, 477 nt, synthetic construct
  misc_feature 1..477: note = derived and/or modified sequence opt6 fromCytosine_Deaminase_fcy1__Saccharomyces_cerevisiae__AJW0 9327
  source 1..477: mol_type = other RNA
atggtaacaggaggaatggcaagcaaatgggatcaaaaaggaatggacatagcatatgaagaagcagcattaggatataaagaaggaggagtaccaataggaggatgcttaataaataataaagacggaagtgtattaggaagaggacacaatatgagatttcaaaaaggaagtgcaacattacacggagaaataagtacattagaaaactgtggaagactagaaggaaaagtatataaagatacaacattatatacaacactaagtccatgtgacatgtgcacaggagcaataataatgtatggaataccaagatgtgtagtaggggaaaatgtaaattttaaaagcaaaggagaaaaatatttacaaacaagaggacatgaagtagtagtagtagatgacgaaagatgtaaaaaaataatgaaacaatttatagatgaaagaccacaagattggtttgaagatataggagaataa

SEQ ID NO: 5769 - protein, 158 aa, synthetic construct; identical to SEQ ID NO: 5385
  REGION 1..158: note Cytosine_Deaminase_fcy1__Saccharomyces_cerevisiae__A0A0D4YE C2

SEQ ID NO: 5770 - RNA, 477 nt, synthetic construct
  misc_feature 1..477: note Cytosine_Deaminase_fcy1__Saccharomyces_cerevisiae__AJW09763
  source 1..477: mol_type = other RNA
atggtgacagggggaatggcaagcaagtgggatcagaagggtatggacattgcctatgaggaggcggccttaggttacaaagagggtggtgttccaattggcggatgtcttatcaataacaaagacggaagtgttctcggtcgtggtcacaacatgagatttcaaaagggatccgccacactacatggtgagatctccactttggaaaactgtgggagattagagggcaaagtgtacaaagataccactttgtatacgacgctgtctccatgcgacatgtgtacaggtgccatcatcatgtatggtattccacgctgtgttgtcggtgagaacgttaatttcaaaagtaagggcgagaaatatttacaaactagaggtcacgaggttgttgttgttgacgatgagaggtgtaaaaagatcatgaaacaatttatcgatgaaagacctcaggattggtttgaagatattggtgagtag

SEQ ID NO: 5771 - RNA, 477 nt, synthetic construct; identical to SEQ ID NO: 5387
  misc_feature 1..477: note = derived and/or modified sequence opt1 fromCytosine_Deaminase_fcy1__Saccharomyces_cerevisiae__AJW0 9763
  source 1..477: mol_type = other RNA

SEQ ID NO: 5772 - RNA, 477 nt, synthetic construct; identical to SEQ ID NO: 5388
  misc_feature 1..477: note = derived and/or modified sequence opt2 fromCytosine_Deaminase_fcy1__Saccharomyces_cerevisiae__AJW0 9763
  source 1..477: mol_type = other RNA

SEQ ID NO: 5773 - RNA, 477 nt, synthetic construct; identical to SEQ ID NO: 5389
  misc_feature 1..477: note = derived and/or modified sequence opt3 fromCytosine_Deaminase_fcy1__Saccharomyces_cerevisiae__AJW0 9763
  source 1..477: mol_type = other RNA

SEQ ID NO: 5774 - RNA, 477 nt, synthetic construct; identical to SEQ ID NO: 5390
  misc_feature 1..477: note = derived and/or modified sequence opt4 fromCytosine_Deaminase_fcy1__Saccharomyces_cerevisiae__AJW0 9763
  source 1..477: mol_type = other RNA

SEQ ID NO: 5775 - RNA, 477 nt, synthetic construct; identical to SEQ ID NO: 5391
  misc_feature 1..477: note = derived and/or modified sequence opt5 fromCytosine_Deaminase_fcy1__Saccharomyces_cerevisiae__AJW0 9763
  source 1..477: mol_type = other RNA

SEQ ID NO: 5776 - RNA, 477 nt, synthetic construct
  misc_feature 1..477: note = derived and/or modified sequence opt6 fromCytosine_Deaminase_fcy1__Saccharomyces_cerevisiae__AJW0 9763
  source 1..477: mol_type = other RNA
atggtaacaggaggaatggcaagcaaatgggatcaaaaaggaatggacatagcatatgaagaagcagcactaggatataaagaaggaggagtaccaataggaggatgcttaataaataacaaagacggaagtgtactaggaagaggacataatatgagattccaaaaaggaagtgcaacactacacggagaaataagcacattagaaaactgtggaagattagaaggaaaagtatataaagatacaacactatatacaacactatcaccatgtgacatgtgcacaggagcaataataatgtatggaataccaagatgtgtagtaggggaaaatgtaaatttcaaaagtaaaggagaaaaatatctacaaacaagaggacatgaagtagtagtagtagatgacgaaagatgtaaaaaaataatgaaacaatttatagacgaaagaccacaagattggtttgaagatataggagaataa

SEQ ID NO: 5777 - protein, 158 aa, synthetic construct; identical to SEQ ID NO: 5385
  REGION 1..158: note Cytosine_Deaminase_fcy1__Saccharomyces_cerevisiae__A0A0D4YF 30

SEQ ID NO: 5778 - RNA, 477 nt, synthetic construct; identical to SEQ ID NO: 5386
  misc_feature 1..477: note Cytosine_Deaminase_fcy1__Saccharomyces_cerevisiae__AJW10199
  source 1..477: mol_type = other RNA

SEQ ID NO: 5779 - RNA, 477 nt, synthetic construct; identical to SEQ ID NO: 5387
  misc_feature 1..477: note = derived and/or modified sequence opt1 fromCytosine_Deaminase_fcy1__Saccharomyces_cerevisiae__AJW1 0199
  source 1..477: mol_type = other RNA

SEQ ID NO: 5780 - RNA, 477 nt, synthetic construct; identical to SEQ ID NO: 5388
  misc_feature 1..477: note = derived and/or modified sequence opt2 fromCytosine_Deaminase_fcy1__Saccharomyces_cerevisiae__AJW1 0199
  source 1..477: mol_type = other RNA

SEQ ID NO: 5781 - RNA, 477 nt, synthetic construct; identical to SEQ ID NO: 5389
  misc_feature 1..477: note = derived and/or modified sequence opt3 fromCytosine_Deaminase_fcy1__Saccharomyces_cerevisiae__AJW1 0199
  source 1..477: mol_type = other RNA

SEQ ID NO: 5782 - RNA, 477 nt, synthetic construct; identical to SEQ ID NO: 5390
  misc_feature 1..477: note = derived and/or modified sequence opt4 fromCytosine_Deaminase_fcy1__Saccharomyces_cerevisiae__AJW1 0199
  source 1..477: mol_type = other RNA

SEQ ID NO: 5783 - RNA, 477 nt, synthetic construct; identical to SEQ ID NO: 5391
  misc_feature 1..477: note = derived and/or modified sequence opt5 fromCytosine_Deaminase_fcy1__Saccharomyces_cerevisiae__AJW1 0199
  source 1..477: mol_type = other RNA

SEQ ID NO: 5784 - RNA, 477 nt, synthetic construct
  misc_feature 1..477: note = derived and/or modified sequence opt6 fromCytosine_Deaminase_fcy1__Saccharomyces_cerevisiae__AJW1 0199
  source 1..477: mol_type = other RNA
atggtaacaggaggaatggcaagtaaatgggatcaaaaaggaatggacatagcatatgaagaagcagcactaggatataaagaaggaggagtaccaataggaggatgcttaataaataataaagacggaagtgtattaggaagaggacataatatgagatttcaaaaaggaagtgcaacattacacggagaaataagtacattagaaaactgtggaagactagaaggaaaagtatataaagatacaacactatatacaacattaagtccatgcgacatgtgcacaggagcaataataatgtatggaataccaagatgtgtagtaggagaaaatgtaaattttaaaagtaaaggagaaaaatatttacaaacaagaggacatgaagtagtagtagtagatgacgaaagatgtaaaaaaataatgaaacaatttatagatgaaagaccacaagattggtttgaagatataggagaataa

SEQ ID NO: 5785 - protein, 158 aa, synthetic construct; identical to SEQ ID NO: 5385
  REGION 1..158: note Cytosine_Deaminase_fcy1__Saccharomyces_cerevisiae__A0A0D4YG U2

SEQ ID NO: 5786 - RNA, 477 nt, synthetic construct; identical to SEQ ID NO: 5386
  misc_feature 1..477: note Cytosine_Deaminase_fcy1__Saccharomyces_cerevisiae__AJW10633
  source 1..477: mol_type = other RNA

SEQ ID NO: 5787 - RNA, 477 nt, synthetic construct; identical to SEQ ID NO: 5387
  misc_feature 1..477: note = derived and/or modified sequence opt1 fromCytosine_Deaminase_fcy1__Saccharomyces_cerevisiae__AJW1 0633
  source 1..477: mol_type = other RNA

SEQ ID NO: 5788 - RNA, 477 nt, synthetic construct; identical to SEQ ID NO: 5388
  misc_feature 1..477: note = derived and/or modified sequence opt2 fromCytosine_Deaminase_fcy1__Saccharomyces_cerevisiae__AJW1 0633
  source 1..477: mol_type = other RNA

SEQ ID NO: 5789 - RNA, 477 nt, synthetic construct; identical to SEQ ID NO: 5389
  misc_feature 1..477: note = derived and/or modified sequence opt3 fromCytosine_Deaminase_fcy1__Saccharomyces_cerevisiae__AJW1 0633
  source 1..477: mol_type = other RNA

SEQ ID NO: 5790 - RNA, 477 nt, synthetic construct; identical to SEQ ID NO: 5390
  misc_feature 1..477: note = derived and/or modified sequence opt4 fromCytosine_Deaminase_fcy1__Saccharomyces_cerevisiae__AJW1 0633
  source 1..477: mol_type = other RNA

SEQ ID NO: 5791 - RNA, 477 nt, synthetic construct; identical to SEQ ID NO: 5391
  misc_feature 1..477: note = derived and/or modified sequence opt5 fromCytosine_Deaminase_fcy1__Saccharomyces_cerevisiae__AJW1 0633
  source 1..477: mol_type = other RNA

SEQ ID NO: 5792 - RNA, 477 nt, synthetic construct
  misc_feature 1..477: note = derived and/or modified sequence opt6 fromCytosine_Deaminase_fcy1__Saccharomyces_cerevisiae__AJW1 0633
  source 1..477: mol_type = other RNA
atggtaacaggaggaatggcaagtaaatgggatcaaaaaggaatggacatagcatatgaagaagcagcattaggatataaagaaggaggagtaccaataggaggatgcttaataaataataaagacggaagtgtattaggaagaggacataatatgagatttcaaaaaggaagtgcaacattacacggagaaataagtacattagaaaactgtggaagactagaaggaaaagtatataaagatacaacattatacacaacattaagtccatgtgacatgtgcacgggagcaataataatgtatggaataccaagatgtgtagtaggagaaaatgtaaattttaaaagtaaaggagaaaaatatttacaaacaagaggacatgaagtagtagtagtagatgatgaaagatgtaaaaaaataatgaaacaatttatagatgaaagaccgcaagattggtttgaagatataggagaataa

SEQ ID NO: 5793 - protein, 158 aa, synthetic construct; identical to SEQ ID NO: 5385
  REGION 1..158: note Cytosine_Deaminase_fcy1__Saccharomyces_cerevisiae__A0A0D4YH N3

SEQ ID NO: 5794 - RNA, 477 nt, synthetic construct; identical to SEQ ID NO: 5386
  misc_feature 1..477: note Cytosine_Deaminase_fcy1__Saccharomyces_cerevisiae__AJW10903
  source 1..477: mol_type = other RNA

SEQ ID NO: 5795 - RNA, 477 nt, synthetic construct; identical to SEQ ID NO: 5387
  misc_feature 1..477: note = derived and/or modified sequence opt1 fromCytosine_Deaminase_fcy1__Saccharomyces_cerevisiae__AJW1 0903
  source 1..477: mol_type = other RNA

SEQ ID NO: 5796 - RNA, 477 nt, synthetic construct; identical to SEQ ID NO: 5388
  misc_feature 1..477: note = derived and/or modified sequence opt2 fromCytosine_Deaminase_fcy1__Saccharomyces_cerevisiae__AJW1 0903
  source 1..477: mol_type = other RNA

SEQ ID NO: 5797 - RNA, 477 nt, synthetic construct; identical to SEQ ID NO: 5389
  misc_feature 1..477: note = derived and/or modified sequence opt3 fromCytosine_Deaminase_fcy1__Saccharomyces_cerevisiae__AJW1 0903
  source 1..477: mol_type = other RNA

SEQ ID NO: 5798 - RNA, 477 nt, synthetic construct; identical to SEQ ID NO: 5390
  misc_feature 1..477: note = derived and/or modified sequence opt4 fromCytosine_Deaminase_fcy1__Saccharomyces_cerevisiae__AJW1 0903
  source 1..477: mol_type = other RNA

SEQ ID NO: 5799 - RNA, 477 nt, synthetic construct; identical to SEQ ID NO: 5391
  misc_feature 1..477: note = derived and/or modified sequence opt5 fromCytosine_Deaminase_fcy1__Saccharomyces_cerevisiae__AJW1 0903
  source 1..477: mol_type = other RNA

SEQ ID NO: 5800 - RNA, 477 nt, synthetic construct
  misc_feature 1..477: note = derived and/or modified sequence opt6 fromCytosine_Deaminase_fcy1__Saccharomyces_cerevisiae__AJW1 0903
  source 1..477: mol_type = other RNA
atggtaacaggaggaatggcaagtaaatgggatcaaaaaggaatggacatagcatatgaagaagcagcattaggatataaagaaggaggagtaccaataggaggatgtctaataaataataaagatggaagtgtattaggaagaggacataatatgagatttcaaaaaggaagtgcaacattacatggagaaataagtacattagaaaattgtggaagattagaaggaaaagtatataaagatacaacactatatacaacattaagtccatgtgatatgtgtacaggagcaataataatgtatggaataccaagatgtgtagtaggagaaaatgtaaattttaaaagtaaaggagaaaaatatttacaaacaagaggacatgaagtagtagtagtagatgatgaaagatgtaaaaaaataatgaaacaatttatagatgaaaggccacaagattggtttgaagatataggagaataa

SEQ ID NO: 5801 - protein, 158 aa, synthetic construct; identical to SEQ ID NO: 5385
  REGION 1..158: note Cytosine_Deaminase_fcy1__Saccharomyces_cerevisiae__A0A0D4YI U4

SEQ ID NO: 5802 - RNA, 477 nt, synthetic construct; identical to SEQ ID NO: 5386
  misc_feature 1..477: note Cytosine_Deaminase_fcy1__Saccharomyces_cerevisiae__AJW11343
  source 1..477: mol_type = other RNA

SEQ ID NO: 5803 - RNA, 477 nt, synthetic construct; identical to SEQ ID NO: 5387
  misc_feature 1..477: note = derived and/or modified sequence opt1 fromCytosine_Deaminase_fcy1__Saccharomyces_cerevisiae__AJW1 1343
  source 1..477: mol_type = other RNA

SEQ ID NO: 5804 - RNA, 477 nt, synthetic construct; identical to SEQ ID NO: 5388
  misc_feature 1..477: note = derived and/or modified sequence opt2 fromCytosine_Deaminase_fcy1__Saccharomyces_cerevisiae__AJW1 1343
  source 1..477: mol_type = other RNA

SEQ ID NO: 5805 - RNA, 477 nt, synthetic construct; identical to SEQ ID NO: 5389
  misc_feature 1..477: note = derived and/or modified sequence opt3 fromCytosine_Deaminase_fcy1__Saccharomyces_cerevisiae__AJW1 1343
  source 1..477: mol_type = other RNA

SEQ ID NO: 5806 - RNA, 477 nt, synthetic construct; identical to SEQ ID NO: 5390
  misc_feature 1..477: note = derived and/or modified sequence opt4 fromCytosine_Deaminase_fcy1__Saccharomyces_cerevisiae__AJW1 1343
  source 1..477: mol_type = other RNA

SEQ ID NO: 5807 - RNA, 477 nt, synthetic construct; identical to SEQ ID NO: 5391
  misc_feature 1..477: note = derived and/or modified sequence opt5 fromCytosine_Deaminase_fcy1__Saccharomyces_cerevisiae__AJW1 1343
  source 1..477: mol_type = other RNA

SEQ ID NO: 5808 - RNA, 477 nt, synthetic construct
  misc_feature 1..477: note = derived and/or modified sequence opt6 fromCytosine_Deaminase_fcy1__Saccharomyces_cerevisiae__AJW1 1343
  source 1..477: mol_type = other RNA
atggtaacaggaggaatggcaagtaaatgggatcaaaaaggaatggacatagcatatgaagaagcagcattaggatataaagaaggaggagtaccaataggaggatgtttaataaataataaagacggaagtgtattaggaagaggacataatatgagatttcaaaaaggaagtgcaacattacacggagaaataagtacattagaaaattgtggaagattagaaggaaaagtatacaaagatacaacattatatacaacattaagtccatgtgatatgtgtacaggagcaataataatgtatggaataccaagatgtgtagtaggagaaaatgtaaattttaaaagtaaaggagaaaaatatttacaaacgagaggacatgaagtagtagtagtagatgatgaaagatgtaaaaaaataatgaaacaatttatagatgaaagaccacaagattggtttgaagatataggagaataa

SEQ ID NO: 5809 - protein, 158 aa, synthetic construct; identical to SEQ ID NO: 5385
  REGION 1..158: note Cytosine_Deaminase_fcy1__Saccharomyces_cerevisiae__A0A0D4YJ 74

SEQ ID NO: 5810 - RNA, 477 nt, synthetic construct; identical to SEQ ID NO: 5386
  misc_feature 1..477: note Cytosine_Deaminase_fcy1__Saccharomyces_cerevisiae__AJW11786
  source 1..477: mol_type = other RNA

SEQ ID NO: 5811 - RNA, 477 nt, synthetic construct; identical to SEQ ID NO: 5387
  misc_feature 1..477: note = derived and/or modified sequence opt1 fromCytosine_Deaminase_fcy1__Saccharomyces_cerevisiae__AJW1 1786
  source 1..477: mol_type = other RNA

SEQ ID NO: 5812 - RNA, 477 nt, synthetic construct; identical to SEQ ID NO: 5388
  misc_feature 1..477: note = derived and/or modified sequence opt2 fromCytosine_Deaminase_fcy1__Saccharomyces_cerevisiae__AJW1 1786
  source 1..477: mol_type = other RNA

SEQ ID NO: 5813 - RNA, 477 nt, synthetic construct; identical to SEQ ID NO: 5389
  misc_feature 1..477: note = derived and/or modified sequence opt3 fromCytosine_Deaminase_fcy1__Saccharomyces_cerevisiae__AJW1 1786
  source 1..477: mol_type = other RNA

SEQ ID NO: 5814 - RNA, 477 nt, synthetic construct; identical to SEQ ID NO: 5390
  misc_feature 1..477: note = derived and/or modified sequence opt4 fromCytosine_Deaminase_fcy1__Saccharomyces_cerevisiae__AJW1 1786
  source 1..477: mol_type = other RNA

SEQ ID NO: 5815 - RNA, 477 nt, synthetic construct; identical to SEQ ID NO: 5391
  misc_feature 1..477: note = derived and/or modified sequence opt5 fromCytosine_Deaminase_fcy1__Saccharomyces_cerevisiae__AJW1 1786
  source 1..477: mol_type = other RNA

SEQ ID NO: 5816 - RNA, 477 nt, synthetic construct
  misc_feature 1..477: note = derived and/or modified sequence opt6 fromCytosine_Deaminase_fcy1__Saccharomyces_cerevisiae__AJW1 1786
  source 1..477: mol_type = other RNA
atggtaacaggaggaatggcaagtaaatgggatcaaaaaggaatggatatagcatatgaagaagcagcattaggatataaagaaggaggagtaccaataggaggatgcttaataaataataaagacggaagtgtattaggaagaggacataatatgagatttcaaaaaggaagtgcaacattacacggagaaataagtacattagaaaactgtggaagactagaaggaaaagtatataaagatacaacattatatacaacattaagtccatgtgacatgtgtacaggagcaataataatgtatggaataccaagatgtgtagtaggagaaaatgtaaattttaaaagcaaaggagaaaaatatttacaaacaagaggacatgaagtagtagtagtagatgacgaaagatgtaaaaaaataatgaaacaatttatagatgaaagaccacaagattggtttgaagatataggagaataa

SEQ ID NO: 5817 - protein, 158 aa, synthetic construct; identical to SEQ ID NO: 5385
  REGION 1..158: note Cytosine_Deaminase_fcy1__Saccharomyces_cerevisiae__A0A0D4YK C5

SEQ ID NO: 5818 - RNA, 477 nt, synthetic construct; identical to SEQ ID NO: 5386
  misc_feature 1..477: note Cytosine_Deaminase_fcy1__Saccharomyces_cerevisiae__AJW12225
  source 1..477: mol_type = other RNA

SEQ ID NO: 5819 - RNA, 477 nt, synthetic construct; identical to SEQ ID NO: 5387
  misc_feature 1..477: note = derived and/or modified sequence opt1 fromCytosine_Deaminase_fcy1__Saccharomyces_cerevisiae__AJW1 2225
  source 1..477: mol_type = other RNA

SEQ ID NO: 5820 - RNA, 477 nt, synthetic construct; identical to SEQ ID NO: 5388
  misc_feature 1..477: note = derived and/or modified sequence opt2 fromCytosine_Deaminase_fcy1__Saccharomyces_cerevisiae__AJW1 2225
  source 1..477: mol_type = other RNA

SEQ ID NO: 5821 - RNA, 477 nt, synthetic construct; identical to SEQ ID NO: 5389
  misc_feature 1..477: note = derived and/or modified sequence opt3 fromCytosine_Deaminase_fcy1__Saccharomyces_cerevisiae__AJW1 2225
  source 1..477: mol_type = other RNA

SEQ ID NO: 5822 - RNA, 477 nt, synthetic construct; identical to SEQ ID NO: 5390
  misc_feature 1..477: note = derived and/or modified sequence opt4 fromCytosine_Deaminase_fcy1__Saccharomyces_cerevisiae__AJW1 2225
  source 1..477: mol_type = other RNA

SEQ ID NO: 5823 - RNA, 477 nt, synthetic construct; identical to SEQ ID NO: 5391
  misc_feature 1..477: note = derived and/or modified sequence opt5 fromCytosine_Deaminase_fcy1__Saccharomyces_cerevisiae__AJW1 2225
  source 1..477: mol_type = other RNA

SEQ ID NO: 5824 - RNA, 477 nt, synthetic construct
  misc_feature 1..477: note = derived and/or modified sequence opt6 fromCytosine_Deaminase_fcy1__Saccharomyces_cerevisiae__AJW1 2225
  source 1..477: mol_type = other RNA
atggtaacaggaggaatggcaagtaaatgggatcaaaaaggaatggatatagcatatgaagaagcagcattaggatataaagaaggaggagtaccaataggaggatgtttaataaataataaagatggaagtgtattaggaagaggacataatatgagatttcaaaaaggaagtgcgacattacatggagaaataagtacattagaaaattgtggaagattagaaggaaaagtatataaagatacaacattatatacaacattaagtccatgtgacatgtgtacaggagcaataataatgtatggaataccaagatgtgtagtaggagaaaatgtaaattttaaaagtaaaggagaaaaatatttacaaacaagaggacatgaagtagtagtagtagatgatgaaagatgtaaaaaaataatgaaacaatttatagatgaaagaccacaagattggtttgaggatataggagaatag

SEQ ID NO: 5825 - protein, 158 aa, synthetic construct; identical to SEQ ID NO: 5385
  REGION 1..158: note Cytosine_Deaminase_fcy1__Saccharomyces_cerevisiae__A0A0D4YM N8

SEQ ID NO: 5826 - RNA, 477 nt, synthetic construct; identical to SEQ ID NO: 5386
  misc_feature 1..477: note Cytosine_Deaminase_fcy1__Saccharomyces_cerevisiae__AJW12668
  source 1..477: mol_type = other RNA

SEQ ID NO: 5827 - RNA, 477 nt, synthetic construct; identical to SEQ ID NO: 5387
  misc_feature 1..477: note = derived and/or modified sequence opt1 fromCytosine_Deaminase_fcy1__Saccharomyces_cerevisiae__AJW1 2668
  source 1..477: mol_type = other RNA

SEQ ID NO: 5828 - RNA, 477 nt, synthetic construct; identical to SEQ ID NO: 5388
  misc_feature 1..477: note = derived and/or modified sequence opt2 fromCytosine_Deaminase_fcy1__Saccharomyces_cerevisiae__AJW1 2668
  source 1..477: mol_type = other RNA

SEQ ID NO: 5829 - RNA, 477 nt, synthetic construct; identical to SEQ ID NO: 5389
  misc_feature 1..477: note = derived and/or modified sequence opt3 fromCytosine_Deaminase_fcy1__Saccharomyces_cerevisiae__AJW1 2668
  source 1..477: mol_type = other RNA

SEQ ID NO: 5830 - RNA, 477 nt, synthetic construct; identical to SEQ ID NO: 5390
  misc_feature 1..477: note = derived and/or modified sequence opt4 fromCytosine_Deaminase_fcy1__Saccharomyces_cerevisiae__AJW1 2668
  source 1..477: mol_type = other RNA

SEQ ID NO: 5831 - RNA, 477 nt, synthetic construct; identical to SEQ ID NO: 5391
  misc_feature 1..477: note = derived and/or modified sequence opt5 fromCytosine_Deaminase_fcy1__Saccharomyces_cerevisiae__AJW1 2668
  source 1..477: mol_type = other RNA

SEQ ID NO: 5832 - RNA, 477 nt, synthetic construct
  misc_feature 1..477: note = derived and/or modified sequence opt6 fromCytosine_Deaminase_fcy1__Saccharomyces_cerevisiae__AJW1 2668
  source 1..477: mol_type = other RNA
atggtaacaggaggaatggcaagtaaatgggatcaaaaaggaatggacatagcatatgaagaagcagcactaggatataaagaaggaggagtaccaataggaggatgcctaataaataataaagacggaagtgtattaggaagaggacataatatgagatttcaaaaaggaagtgcaacattacatggagaaataagtacattagaaaactgtggaagactagaaggaaaagtatataaagatacaacactatatacaacattaagtccatgtgacatgtgcacaggagcaataataatgtacggaataccaagatgtgtagtaggagaaaatgtaaattttaaaagtaaaggagaaaaatatttacaaacaagaggacatgaagtggtagtagtagatgacgaaagatgtaaaaaaataatgaaacaatttatagatgaaagaccacaagattggtttgaagatataggagaataa

SEQ ID NO: 5833 - protein, 158 aa, synthetic construct; identical to SEQ ID NO: 5385
  REGION 1..158: note Cytosine_Deaminase_fcy1__Saccharomyces_cerevisiae__A0A0D4YM V6

SEQ ID NO: 5834 - RNA, 477 nt, synthetic construct; identical to SEQ ID NO: 5386
  misc_feature 1..477: note Cytosine_Deaminase_fcy1__Saccharomyces_cerevisiae__AJW13105
  source 1..477: mol_type = other RNA

SEQ ID NO: 5835 - RNA, 477 nt, synthetic construct; identical to SEQ ID NO: 5387
  misc_feature 1..477: note = derived and/or modified sequence opt1 fromCytosine_Deaminase_fcy1__Saccharomyces_cerevisiae__AJW1 3105
  source 1..477: mol_type = other RNA

SEQ ID NO: 5836 - RNA, 477 nt, synthetic construct; identical to SEQ ID NO: 5388
  misc_feature 1..477: note = derived and/or modified sequence opt2 fromCytosine_Deaminase_fcy1__Saccharomyces_cerevisiae__AJW1 3105
  source 1..477: mol_type = other RNA

SEQ ID NO: 5837 - RNA, 477 nt, synthetic construct; identical to SEQ ID NO: 5389
  misc_feature 1..477: note = derived and/or modified sequence opt3 fromCytosine_Deaminase_fcy1__Saccharomyces_cerevisiae__AJW1 3105
  source 1..477: mol_type = other RNA

SEQ ID NO: 5838 - RNA, 477 nt, synthetic construct; identical to SEQ ID NO: 5390
  misc_feature 1..477: note = derived and/or modified sequence opt4 fromCytosine_Deaminase_fcy1__Saccharomyces_cerevisiae__AJW1 3105
  source 1..477: mol_type = other RNA

SEQ ID NO: 5839 - RNA, 477 nt, synthetic construct; identical to SEQ ID NO: 5391
  misc_feature 1..477: note = derived and/or modified sequence opt5 fromCytosine_Deaminase_fcy1__Saccharomyces_cerevisiae__AJW1 3105
  source 1..477: mol_type = other RNA

SEQ ID NO: 5840 - RNA, 477 nt, synthetic construct
  misc_feature 1..477: note = derived and/or modified sequence opt6 fromCytosine_Deaminase_fcy1__Saccharomyces_cerevisiae__AJW1 3105
  source 1..477: mol_type = other RNA
atggtaacaggaggaatggcaagcaaatgggatcaaaaaggaatggacatagcatatgaagaagcagcactaggatataaagaaggaggagtaccaataggaggatgcttaataaataataaagacggaagtgtattaggaagaggacataatatgagatttcaaaaaggaagtgcaacattacacggagaaataagcacattagaaaactgtggaagattagaaggaaaagtatataaagatacaacactatatacaacattaagtccatgtgacatgtgcacaggagcaataataatgtatggaataccaagatgtgtagtaggagaaaatgtaaattttaaaagtaaaggagaaaaatatttacaaacaagaggacatgaagtagtagtagtagatgacgaaagatgtaaaaaaataatgaaacaatttatagatgaaagaccacaagattggtttgaagatataggagaataa

SEQ ID NO: 5841 - protein, 158 aa, synthetic construct; identical to SEQ ID NO: 5385
  REGION 1..158: note Cytosine_Deaminase_fcy1__Saccharomyces_cerevisiae__A0A0D4YP P6

SEQ ID NO: 5842 - RNA, 477 nt, synthetic construct; identical to SEQ ID NO: 5386
  misc_feature 1..477: note Cytosine_Deaminase_fcy1__Saccharomyces_cerevisiae__AJW13529
  source 1..477: mol_type = other RNA

SEQ ID NO: 5843 - RNA, 477 nt, synthetic construct; identical to SEQ ID NO: 5387
  misc_feature 1..477: note = derived and/or modified sequence opt1 fromCytosine_Deaminase_fcy1__Saccharomyces_cerevisiae__AJW1 3529
  source 1..477: mol_type = other RNA

SEQ ID NO: 5844 - RNA, 477 nt, synthetic construct; identical to SEQ ID NO: 5388
  misc_feature 1..477: note = derived and/or modified sequence opt2 fromCytosine_Deaminase_fcy1__Saccharomyces_cerevisiae__AJW1 3529
  source 1..477: mol_type = other RNA

SEQ ID NO: 5845 - RNA, 477 nt, synthetic construct; identical to SEQ ID NO: 5389
  misc_feature 1..477: note = derived and/or modified sequence opt3 fromCytosine_Deaminase_fcy1__Saccharomyces_cerevisiae__AJW1 3529
  source 1..477: mol_type = other RNA

SEQ ID NO: 5846 - RNA, 477 nt, synthetic construct; identical to SEQ ID NO: 5390
  misc_feature 1..477: note = derived and/or modified sequence opt4 fromCytosine_Deaminase_fcy1__Saccharomyces_cerevisiae__AJW1 3529
  source 1..477: mol_type = other RNA

SEQ ID NO: 5847 - RNA, 477 nt, synthetic construct; identical to SEQ ID NO: 5391
  misc_feature 1..477: note = derived and/or modified sequence opt5 fromCytosine_Deaminase_fcy1__Saccharomyces_cerevisiae__AJW1 3529
  source 1..477: mol_type = other RNA

SEQ ID NO: 5848 - RNA, 477 nt, synthetic construct
  misc_feature 1..477: note = derived and/or modified sequence opt6 fromCytosine_Deaminase_fcy1__Saccharomyces_cerevisiae__AJW1 3529
  source 1..477: mol_type = other RNA
atggtaacaggagggatggcaagtaaatgggatcaaaaaggaatggacatagcatatgaagaagcagcattaggatataaagaaggaggagtaccaataggaggatgcttaataaataataaagacggaagtgtattaggaagaggacataatatgagatttcaaaaaggaagtgcaacattacacggagaaataagtacattagaaaactgtggaaggttagaaggaaaagtatataaagatacaacattatatacaacattaagtccatgtgacatgtgtacaggagcaataataatgtatggaataccaagatgtgtagtaggagaaaatgtaaattttaaaagtaaaggagaaaaatatttacaaacaagaggacatgaagtagtagtagtagatgacgaaagatgtaaaaaaataatgaaacaatttatagatgaaagaccacaagattggtttgaagatataggagaataa

SEQ ID NO: 5849 - protein, 158 aa, synthetic construct; identical to SEQ ID NO: 5385
  REGION 1..158: note Cytosine_Deaminase_fcy1__Saccharomyces_cerevisiae__A0A0D4YR D4

SEQ ID NO: 5850 - RNA, 477 nt, synthetic construct; identical to SEQ ID NO: 5386
  misc_feature 1..477: note Cytosine_Deaminase_fcy1__Saccharomyces_cerevisiae__AJW13968
  source 1..477: mol_type = other RNA

SEQ ID NO: 5851 - RNA, 477 nt, synthetic construct; identical to SEQ ID NO: 5387
  misc_feature 1..477: note = derived and/or modified sequence opt1 fromCytosine_Deaminase_fcy1__Saccharomyces_cerevisiae__AJW1 3968
  source 1..477: mol_type = other RNA

SEQ ID NO: 5852 - RNA, 477 nt, synthetic construct; identical to SEQ ID NO: 5388
  misc_feature 1..477: note = derived and/or modified sequence opt2 fromCytosine_Deaminase_fcy1__Saccharomyces_cerevisiae__AJW1 3968
  source 1..477: mol_type = other RNA

SEQ ID NO: 5853 - RNA, 477 nt, synthetic construct; identical to SEQ ID NO: 5389
  misc_feature 1..477: note = derived and/or modified sequence opt3 fromCytosine_Deaminase_fcy1__Saccharomyces_cerevisiae__AJW1 3968
  source 1..477: mol_type = other RNA

SEQ ID NO: 5854 - RNA, 477 nt, synthetic construct; identical to SEQ ID NO: 5390
  misc_feature 1..477: note = derived and/or modified sequence opt4 fromCytosine_Deaminase_fcy1__Saccharomyces_cerevisiae__AJW1 3968
  source 1..477: mol_type = other RNA

SEQ ID NO: 5855 - RNA, 477 nt, synthetic construct; identical to SEQ ID NO: 5391
  misc_feature 1..477: note = derived and/or modified sequence opt5 fromCytosine_Deaminase_fcy1__Saccharomyces_cerevisiae__AJW1 3968
  source 1..477: mol_type = other RNA

SEQ ID NO: 5856 - RNA, 477 nt, synthetic construct
  misc_feature 1..477: note = derived and/or modified sequence opt6 fromCytosine_Deaminase_fcy1__Saccharomyces_cerevisiae__AJW1 3968
  source 1..477: mol_type = other RNA
atggtaacaggaggaatggcaagtaaatgggatcaaaaaggaatggacatagcatatgaagaagcagcactaggatataaagaaggaggagtaccaataggaggatgcttaataaataataaagatggaagcgtattaggaagaggacataatatgagatttcaaaaaggaagtgcaacattacacggagaaataagtacattagaaaactgtggaagattagaaggaaaagtatataaagatacaacattatatacaacattaagtccatgtgacatgtgtacaggagcgataataatgtatggaataccaagatgtgtagtaggagaaaatgtaaattttaaaagtaaaggagaaaaatatttacaaacaagaggacatgaagtagtagtagtagatgacgaaagatgtaaaaaaataatgaaacaatttatagatgaaagaccacaagattggtttgaagatataggagaataa

SEQ ID NO: 5857 - protein, 158 aa, synthetic construct; identical to SEQ ID NO: 5385
  REGION 1..158: note Cytosine_Deaminase_fcy1__Saccharomyces_cerevisiae__A0A0D4YS 13

SEQ ID NO: 5858 - RNA, 477 nt, synthetic construct; identical to SEQ ID NO: 5746
  misc_feature 1..477: note Cytosine_Deaminase_fcy1__Saccharomyces_cerevisiae__AJW14407
  source 1..477: mol_type = other RNA

SEQ ID NO: 5859 - RNA, 477 nt, synthetic construct; identical to SEQ ID NO: 5387
  misc_feature 1..477: note = derived and/or modified sequence opt1 fromCytosine_Deaminase_fcy1__Saccharomyces_cerevisiae__AJW1 4407
  source 1..477: mol_type = other RNA

SEQ ID NO: 5860 - RNA, 477 nt, synthetic construct; identical to SEQ ID NO: 5388
  misc_feature 1..477: note = derived and/or modified sequence opt2 fromCytosine_Deaminase_fcy1__Saccharomyces_cerevisiae__AJW1 4407
  source 1..477: mol_type = other RNA

SEQ ID NO: 5861 - RNA, 477 nt, synthetic construct; identical to SEQ ID NO: 5389
  misc_feature 1..477: note = derived and/or modified sequence opt3 fromCytosine_Deaminase_fcy1__Saccharomyces_cerevisiae__AJW1 4407
  source 1..477: mol_type = other RNA

SEQ ID NO: 5862 - RNA, 477 nt, synthetic construct; identical to SEQ ID NO: 5390
  misc_feature 1..477: note = derived and/or modified sequence opt4 fromCytosine_Deaminase_fcy1__Saccharomyces_cerevisiae__AJW1 4407
  source 1..477: mol_type = other RNA

SEQ ID NO: 5863 - RNA, 477 nt, synthetic construct; identical to SEQ ID NO: 5391
  misc_feature 1..477: note = derived and/or modified sequence opt5 fromCytosine_Deaminase_fcy1__Saccharomyces_cerevisiae__AJW1 4407
  source 1..477: mol_type = other RNA

SEQ ID NO: 5864 - RNA, 477 nt, synthetic construct
  misc_feature 1..477: note = derived and/or modified sequence opt6 fromCytosine_Deaminase_fcy1__Saccharomyces_cerevisiae__AJW1 4407
  source 1..477: mol_type = other RNA
atggtaacaggaggaatggcaagtaaatgggatcaaaaaggaatggacatagcatatgaagaagcagcattaggatataaagaaggaggagtaccaataggaggatgcttaataaataataaagacggaagtgtattaggaagaggacataatatgagatttcaaaaaggaagtgcaacattacatggagaaataagtacattagaaaactgtggaagactagaaggaaaagtatataaagatacaacattatatacaacactaagtccatgtgacatgtgcacaggagcaataataatgtatggaataccaagatgtgtagtaggagaaaatgtaaactttaaaagtaaaggagaaaaatatttacaaacaaggggacatgaagtagtagtagtagatgacgaaagatgtaaaaaaataatgaaacaatttatagatgaaagaccacaagattggtttgaagatataggagaataa

SEQ ID NO: 5865 - protein, 158 aa, synthetic construct; identical to SEQ ID NO: 5385
  REGION 1..158: note Cytosine_Deaminase_fcy1__Saccharomyces_cerevisiae__A0A0D4YT J7

SEQ ID NO: 5866 - RNA, 477 nt, synthetic construct; identical to SEQ ID NO: 5386
  misc_feature 1..477: note Cytosine_Deaminase_fcy1__Saccharomyces_cerevisiae__AJW14829
  source 1..477: mol_type = other RNA

SEQ ID NO: 5867 - RNA, 477 nt, synthetic construct; identical to SEQ ID NO: 5387
  misc_feature 1..477: note = derived and/or modified sequence opt1 fromCytosine_Deaminase_fcy1__Saccharomyces_cerevisiae__AJW1 4829
  source 1..477: mol_type = other RNA

SEQ ID NO: 5868 - RNA, 477 nt, synthetic construct; identical to SEQ ID NO: 5388
  misc_feature 1..477: note = derived and/or modified sequence opt2 fromCytosine_Deaminase_fcy1__Saccharomyces_cerevisiae__AJW1 4829
  source 1..477: mol_type = other RNA

SEQ ID NO: 5869 - RNA, 477 nt, synthetic construct; identical to SEQ ID NO: 5389
  misc_feature 1..477: note = derived and/or modified sequence opt3 fromCytosine_Deaminase_fcy1__Saccharomyces_cerevisiae__AJW1 4829
  source 1..477: mol_type = other RNA

SEQ ID NO: 5870 - RNA, 477 nt, synthetic construct; identical to SEQ ID NO: 5390
  misc_feature 1..477: note = derived and/or modified sequence opt4 fromCytosine_Deaminase_fcy1__Saccharomyces_cerevisiae__AJW1 4829
  source 1..477: mol_type = other RNA

SEQ ID NO: 5871 - RNA, 477 nt, synthetic construct; identical to SEQ ID NO: 5391
  misc_feature 1..477: note = derived and/or modified sequence opt5 fromCytosine_Deaminase_fcy1__Saccharomyces_cerevisiae__AJW1 4829
  source 1..477: mol_type = other RNA

SEQ ID NO: 5872 - RNA, 477 nt, synthetic construct
  misc_feature 1..477: note = derived and/or modified sequence opt6 fromCytosine_Deaminase_fcy1__Saccharomyces_cerevisiae__AJW1 4829
  source 1..477: mol_type = other RNA
atggtaacaggaggaatggcaagtaaatgggatcaaaaaggaatggacatagcatatgaagaagcagcattaggatataaagaaggaggagtaccaataggaggatgcttaataaataataaagacggaagtgtattaggaagaggacataatatgagatttcaaaaaggaagtgcaacattacacggagaaataagtacattagaaaactgtggaagactagaaggaaaagtatataaagatacaacactatatacaacgttaagtccatgtgacatgtgcacaggagcaataataatgtatggaataccaagatgtgtagtaggagaaaatgtaaattttaaaagtaaaggagaaaaatatttacaaacaagaggacatgaagtagtagtagtagatgacgaaagatgtaaaaaaataatgaaacaatttatagatgaaagaccacaagattggttcgaagatataggagaataa

SEQ ID NO: 5873 - protein, 158 aa, synthetic construct; identical to SEQ ID NO: 5385
  REGION 1..158: note Cytosine_Deaminase_fcy1__Saccharomyces_cerevisiae__A0A0D4YU X9

SEQ ID NO: 5874 - RNA, 477 nt, synthetic construct; identical to SEQ ID NO: 5386
  misc_feature 1..477: note Cytosine_Deaminase_fcy1__Saccharomyces_cerevisiae__AJW15253
  source 1..477: mol_type = other RNA

SEQ ID NO: 5875 - RNA, 477 nt, synthetic construct; identical to SEQ ID NO: 5387
  misc_feature 1..477: note = derived and/or modified sequence opt1 fromCytosine_Deaminase_fcy1__Saccharomyces_cerevisiae__AJW1 5253
  source 1..477: mol_type = other RNA

SEQ ID NO: 5876 - RNA, 477 nt, synthetic construct; identical to SEQ ID NO: 5388
  misc_feature 1..477: note = derived and/or modified sequence opt2 fromCytosine_Deaminase_fcy1__Saccharomyces_cerevisiae__AJW1 5253
  source 1..477: mol_type = other RNA

SEQ ID NO: 5877 - RNA, 477 nt, synthetic construct; identical to SEQ ID NO: 5389
  misc_feature 1..477: note = derived and/or modified sequence opt3 fromCytosine_Deaminase_fcy1__Saccharomyces_cerevisiae__AJW1 5253
  source 1..477: mol_type = other RNA

SEQ ID NO: 5878 - RNA, 477 nt, synthetic construct; identical to SEQ ID NO: 5390
  misc_feature 1..477: note = derived and/or modified sequence opt4 fromCytosine_Deaminase_fcy1__Saccharomyces_cerevisiae__AJW1 5253
  source 1..477: mol_type = other RNA

SEQ ID NO: 5879 - RNA, 477 nt, synthetic construct; identical to SEQ ID NO: 5391
  misc_feature 1..477: note = derived and/or modified sequence opt5 fromCytosine_Deaminase_fcy1__Saccharomyces_cerevisiae__AJW1 5253
  source 1..477: mol_type = other RNA

SEQ ID NO: 5880 - RNA, 477 nt, synthetic construct
  misc_feature 1..477: note = derived and/or modified sequence opt6 fromCytosine_Deaminase_fcy1__Saccharomyces_cerevisiae__AJW1 5253
  source 1..477: mol_type = other RNA
atggtaacaggaggaatggcaagtaaatgggatcaaaaaggaatggacatagcatatgaagaagcagcactaggatataaagaaggaggagtaccaataggaggatgtttaataaataataaagacggaagtgtattaggaagaggacataatatgagatttcaaaaaggaagtgcaacattacacggagaaataagtacattagaaaactgtggaagattagaaggaaaagtatataaagatacaacattatatacaacattaagtccatgtgatatgtgtacaggagcaataataatgtatggaataccaagatgtgtagtaggagaaaatgtaaattttaaaagtaaaggagaaaaatatttacaaacaagaggacatgaagtagtagtagtagatgacgaaagatgtaaaaaaataatgaaacaatttatagatgaaagaccacaagattggtttgaagatataggagaataa

SEQ ID NO: 5881 - protein, 158 aa, synthetic construct; identical to SEQ ID NO: 5385
  REGION 1..158: note Cytosine_Deaminase_fcy1__Saccharomyces_cerevisiae__A0A0D4YV 34

SEQ ID NO: 5882 - RNA, 477 nt, synthetic construct; identical to SEQ ID NO: 5386
  misc_feature 1..477: note Cytosine_Deaminase_fcy1__Saccharomyces_cerevisiae__AJW15690
  source 1..477: mol_type = other RNA

SEQ ID NO: 5883 - RNA, 477 nt, synthetic construct; identical to SEQ ID NO: 5387
  misc_feature 1..477: note = derived and/or modified sequence opt1 fromCytosine_Deaminase_fcy1__Saccharomyces_cerevisiae__AJW1 5690
  source 1..477: mol_type = other RNA

SEQ ID NO: 5884 - RNA, 477 nt, synthetic construct; identical to SEQ ID NO: 5388
  misc_feature 1..477: note = derived and/or modified sequence opt2 fromCytosine_Deaminase_fcy1__Saccharomyces_cerevisiae__AJW1 5690
  source 1..477: mol_type = other RNA

SEQ ID NO: 5885 - RNA, 477 nt, synthetic construct; identical to SEQ ID NO: 5389
  misc_feature 1..477: note = derived and/or modified sequence opt3 fromCytosine_Deaminase_fcy1__Saccharomyces_cerevisiae__AJW1 5690
  source 1..477: mol_type = other RNA

SEQ ID NO: 5886 - RNA, 477 nt, synthetic construct; identical to SEQ ID NO: 5390
  misc_feature 1..477: note = derived and/or modified sequence opt4 fromCytosine_Deaminase_fcy1__Saccharomyces_cerevisiae__AJW1 5690
  source 1..477: mol_type = other RNA

SEQ ID NO: 5887 - RNA, 477 nt, synthetic construct; identical to SEQ ID NO: 5391
  misc_feature 1..477: note = derived and/or modified sequence opt5 fromCytosine_Deaminase_fcy1__Saccharomyces_cerevisiae__AJW1 5690
  source 1..477: mol_type = other RNA

SEQ ID NO: 5888 - RNA, 477 nt, synthetic construct
  misc_feature 1..477: note = derived and/or modified sequence opt6 fromCytosine_Deaminase_fcy1__Saccharomyces_cerevisiae__AJW1 5690
  source 1..477: mol_type = other RNA
atggtaacaggaggaatggcaagtaaatgggatcaaaaaggaatggatatagcatatgaagaagcagcattaggatataaagaaggaggagtaccaataggaggatgtttaataaataataaagatggaagcgtattaggaagagggcataatatgagatttcaaaaaggaagtgcaacactacacggagaaataagtacattagaaaattgtggaagactagaaggaaaagtatataaagatacaacattatatacgacattaagtccatgtgatatgtgtacaggagcaataataatgtatggaataccaagatgtgtagtaggagaaaatgtaaattttaaaagtaaaggagaaaaatatttacaaacaagaggacatgaagtagtagtagtagatgatgaaagatgtaaaaaaataatgaaacaatttatagatgaaagaccacaagattggtttgaagatataggagaataa

SEQ ID NO: 5889 - protein, 158 aa, synthetic construct; identical to SEQ ID NO: 5385
  REGION 1..158: note Cytosine_Deaminase_fcy1__Saccharomyces_cerevisiae__A0A0D4YX E1

SEQ ID NO: 5890 - RNA, 477 nt, synthetic construct; identical to SEQ ID NO: 5386
  misc_feature 1..477: note Cytosine_Deaminase_fcy1__Saccharomyces_cerevisiae__AJW16133
  source 1..477: mol_type = other RNA

SEQ ID NO: 5891 - RNA, 477 nt, synthetic construct; identical to SEQ ID NO: 5387
  misc_feature 1..477: note = derived and/or modified sequence opt1 fromCytosine_Deaminase_fcy1__Saccharomyces_cerevisiae__AJW1 6133
  source 1..477: mol_type = other RNA

SEQ ID NO: 5892 - RNA, 477 nt, synthetic construct; identical to SEQ ID NO: 5388
  misc_feature 1..477: note = derived and/or modified sequence opt2 fromCytosine_Deaminase_fcy1__Saccharomyces_cerevisiae__AJW1 6133
  source 1..477: mol_type = other RNA

SEQ ID NO: 5893 - RNA, 477 nt, synthetic construct; identical to SEQ ID NO: 5389
  misc_feature 1..477: note = derived and/or modified sequence opt3 fromCytosine_Deaminase_fcy1__Saccharomyces_cerevisiae__AJW1 6133
  source 1..477: mol_type = other RNA

SEQ ID NO: 5894 - RNA, 477 nt, synthetic construct; identical to SEQ ID NO: 5390
  misc_feature 1..477: note = derived and/or modified sequence opt4 fromCytosine_Deaminase_fcy1__Saccharomyces_cerevisiae__AJW1 6133
  source 1..477: mol_type = other RNA

SEQ ID NO: 5895 - RNA, 477 nt, synthetic construct; identical to SEQ ID NO: 5391
  misc_feature 1..477: note = derived and/or modified sequence opt5 fromCytosine_Deaminase_fcy1__Saccharomyces_cerevisiae__AJW1 6133
  source 1..477: mol_type = other RNA

SEQ ID NO: 5896 - RNA, 477 nt, synthetic construct
  misc_feature 1..477: note = derived and/or modified sequence opt6 fromCytosine_Deaminase_fcy1__Saccharomyces_cerevisiae__AJW1 6133
  source 1..477: mol_type = other RNA
atggtaacaggaggaatggcaagtaaatgggatcaaaaaggaatggatatagcatatgaagaggcagcattaggatataaagaaggaggagtaccaataggaggatgtttaataaataataaagatggaagtgtattaggaagaggacataatatgagatttcaaaaaggaagtgcaacattacatggagaaataagcacgttagaaaattgtggaagattagaaggaaaagtatataaagatacaacattatatacaacattaagtccatgtgatatgtgtacaggagcaataataatgtatggaataccaagatgtgtagtaggagaaaatgtgaattttaaaagtaaaggagaaaaatatttacaaacaagaggacatgaagtagtagtagtagatgatgaaagatgtaaaaaaataatgaaacaatttatagatgaaagaccacaagattggtttgaagatataggagaataa

SEQ ID NO: 5897 - protein, 158 aa, synthetic construct; identical to SEQ ID NO: 5385
  REGION 1..158: note Cytosine_Deaminase_fcy1__Saccharomyces_cerevisiae__A0A0D4YY M6

SEQ ID NO: 5898 - RNA, 477 nt, synthetic construct; identical to SEQ ID NO: 5386
  misc_feature 1..477: note Cytosine_Deaminase_fcy1__Saccharomyces_cerevisiae__AJW16568
  source 1..477: mol_type = other RNA

SEQ ID NO: 5899 - RNA, 477 nt, synthetic construct; identical to SEQ ID NO: 5387
  misc_feature 1..477: note = derived and/or modified sequence opt1 fromCytosine_Deaminase_fcy1__Saccharomyces_cerevisiae__AJW1 6568
  source 1..477: mol_type = other RNA

SEQ ID NO: 5900 - RNA, 477 nt, synthetic construct; identical to SEQ ID NO: 5388
  misc_feature 1..477: note = derived and/or modified sequence opt2 fromCytosine_Deaminase_fcy1__Saccharomyces_cerevisiae__AJW1 6568
  source 1..477: mol_type = other RNA

SEQ ID NO: 5901 - RNA, 477 nt, synthetic construct; identical to SEQ ID NO: 5389
  misc_feature 1..477: note = derived and/or modified sequence opt3 fromCytosine_Deaminase_fcy1__Saccharomyces_cerevisiae__AJW1 6568
  source 1..477: mol_type = other RNA

SEQ ID NO: 5902 - RNA, 477 nt, synthetic construct; identical to SEQ ID NO: 5390
  misc_feature 1..477: note = derived and/or modified sequence opt4 fromCytosine_Deaminase_fcy1__Saccharomyces_cerevisiae__AJW1 6568
  source 1..477: mol_type = other RNA

SEQ ID NO: 5903 - RNA, 477 nt, synthetic construct; identical to SEQ ID NO: 5391
  misc_feature 1..477: note = derived and/or modified sequence opt5 fromCytosine_Deaminase_fcy1__Saccharomyces_cerevisiae__AJW1 6568
  source 1..477: mol_type = other RNA

SEQ ID NO: 5904 - RNA, 477 nt, synthetic construct
  misc_feature 1..477: note = derived and/or modified sequence opt6 fromCytosine_Deaminase_fcy1__Saccharomyces_cerevisiae__AJW1 6568
  source 1..477: mol_type = other RNA
atggtaacaggaggaatggcaagtaaatgggatcaaaaaggaatggacatagcatatgaagaagcagcattaggatataaagaaggaggagtaccaataggaggatgcctaataaataataaagacggaagtgtattaggaagaggacataatatgagatttcaaaaaggaagcgcaacattacacggagaaataagtacattagaaaactgtggaagactagaaggaaaagtatataaagatacaacattatatacaacattaagtccatgtgacatgtgcacaggagcaataataatgtatggaataccaagatgtgtagtaggagaaaatgtaaatttcaaaagcaaaggagaaaaatatttacaaacaagaggacatgaagtagtagtagtagatgacgaaagatgtaaaaaaataatgaaacaatttatagatgaaagaccacaagattggtttgaagatataggagaataa

SEQ ID NO: 5905 - protein, 158 aa, synthetic construct; identical to SEQ ID NO: 5385
  REGION 1..158: note Cytosine_Deaminase_fcy1__Saccharomyces_cerevisiae__A0A0D4YZ B7

SEQ ID NO: 5906 - RNA, 477 nt, synthetic construct; identical to SEQ ID NO: 5386
  misc_feature 1..477: note Cytosine_Deaminase_fcy1__Saccharomyces_cerevisiae__AJW17006
  source 1..477: mol_type = other RNA

SEQ ID NO: 5907 - RNA, 477 nt, synthetic construct; identical to SEQ ID NO: 5387
  misc_feature 1..477: note = derived and/or modified sequence opt1 fromCytosine_Deaminase_fcy1__Saccharomyces_cerevisiae__AJW1 7006
  source 1..477: mol_type = other RNA

SEQ ID NO: 5908 - RNA, 477 nt, synthetic construct; identical to SEQ ID NO: 5388
  misc_feature 1..477: note = derived and/or modified sequence opt2 fromCytosine_Deaminase_fcy1__Saccharomyces_cerevisiae__AJW1 7006
  source 1..477: mol_type = other RNA

SEQ ID NO: 5909 - RNA, 477 nt, synthetic construct; identical to SEQ ID NO: 5389
  misc_feature 1..477: note = derived and/or modified sequence opt3 fromCytosine_Deaminase_fcy1__Saccharomyces_cerevisiae__AJW1 7006
  source 1..477: mol_type = other RNA

SEQ ID NO: 5910 - RNA, 477 nt, synthetic construct; identical to SEQ ID NO: 5390
  misc_feature 1..477: note = derived and/or modified sequence opt4 fromCytosine_Deaminase_fcy1__Saccharomyces_cerevisiae__AJW1 7006
  source 1..477: mol_type = other RNA

SEQ ID NO: 5911 - RNA, 477 nt, synthetic construct; identical to SEQ ID NO: 5391
  misc_feature 1..477: note = derived and/or modified sequence opt5 fromCytosine_Deaminase_fcy1__Saccharomyces_cerevisiae__AJW1 7006
  source 1..477: mol_type = other RNA

SEQ ID NO: 5912 - RNA, 477 nt, synthetic construct
  misc_feature 1..477: note = derived and/or modified sequence opt6 fromCytosine_Deaminase_fcy1__Saccharomyces_cerevisiae__AJW1 7006
  source 1..477: mol_type = other RNA
atggtaacaggaggaatggcaagtaaatgggatcaaaaaggaatggatatagcatatgaagaagcagcattaggatataaagaaggaggagtaccaataggaggatgtttaataaataataaagatggaagtgtattaggaagaggacataatatgagatttcaaaaaggaagtgcaacgttacacggagaaataagtacattagaaaattgtggaagattagaaggaaaagtatataaagatacaacattatatacaacattaagtccatgtgatatgtgtacaggagcaataataatgtatggaataccaagatgtgtagtgggagaaaatgtaaattttaaaagtaaaggagaaaaatatctacaaacaagaggacatgaagtagtagtagtagatgatgaaagatgtaaaaaaataatgaaacaatttatagatgaaagaccacaagattggtttgaagatataggagaataa

SEQ ID NO: 5913 - protein, 158 aa, synthetic construct; identical to SEQ ID NO: 5385
  REGION 1..158: note Cytosine_Deaminase_fcy1__Saccharomyces_cerevisiae__A0A0D4Z0 60

SEQ ID NO: 5914 - RNA, 477 nt, synthetic construct; identical to SEQ ID NO: 5418
  misc_feature 1..477: note Cytosine_Deaminase_fcy1__Saccharomyces_cerevisiae__AJW17430
  source 1..477: mol_type = other RNA

SEQ ID NO: 5915 - RNA, 477 nt, synthetic construct; identical to SEQ ID NO: 5387
  misc_feature 1..477: note = derived and/or modified sequence opt1 fromCytosine_Deaminase_fcy1__Saccharomyces_cerevisiae__AJW1 7430
  source 1..477: mol_type = other RNA

SEQ ID NO: 5916 - RNA, 477 nt, synthetic construct; identical to SEQ ID NO: 5388
  misc_feature 1..477: note = derived and/or modified sequence opt2 fromCytosine_Deaminase_fcy1__Saccharomyces_cerevisiae__AJW1 7430
  source 1..477: mol_type = other RNA

SEQ ID NO: 5917 - RNA, 477 nt, synthetic construct; identical to SEQ ID NO: 5389
  misc_feature 1..477: note = derived and/or modified sequence opt3 fromCytosine_Deaminase_fcy1__Saccharomyces_cerevisiae__AJW1 7430
  source 1..477: mol_type = other RNA

SEQ ID NO: 5918 - RNA, 477 nt, synthetic construct; identical to SEQ ID NO: 5390
  misc_feature 1..477: note = derived and/or modified sequence opt4 fromCytosine_Deaminase_fcy1__Saccharomyces_cerevisiae__AJW1 7430
  source 1..477: mol_type = other RNA

SEQ ID NO: 5919 - RNA, 477 nt, synthetic construct; identical to SEQ ID NO: 5391
  misc_feature 1..477: note = derived and/or modified sequence opt5 fromCytosine_Deaminase_fcy1__Saccharomyces_cerevisiae__AJW1 7430
  source 1..477: mol_type = other RNA

SEQ ID NO: 5920 - RNA, 477 nt, synthetic construct
  misc_feature 1..477: note = derived and/or modified sequence opt6 fromCytosine_Deaminase_fcy1__Saccharomyces_cerevisiae__AJW1 7430
  source 1..477: mol_type = other RNA
atggtaacaggaggaatggcaagtaaatgggatcaaaaaggaatggatatagcatatgaagaagcagcattaggatataaagaaggaggagtaccaataggaggatgtttaataaataataaagatggaagtgtactaggaagaggacataatatgagatttcaaaaaggaagtgcaacattacatggagaaataagtacattagaaaattgtggaagattagaaggaaaagtatataaagatacaacattatatacaacattaagtccgtgtgatatgtgtacaggagcaataataatgtatggaataccaagatgtgtagtaggagaaaatgtaaattttaaaagtaaaggagaaaaatatttacaaacaagaggacatgaagtagtagtagtagatgatgaaagatgtaaaaaaataatgaaacaatttatagatgaaagaccacaagattggtttgaagatataggagaataa

SEQ ID NO: 5921 - protein, 158 aa, synthetic construct; identical to SEQ ID NO: 5385
  REGION 1..158: note Cytosine_Deaminase_fcy1__Saccharomyces_cerevisiae__A0A0D4Z1 S2

SEQ ID NO: 5922 - RNA, 477 nt, synthetic construct; identical to SEQ ID NO: 5386
  misc_feature 1..477: note Cytosine_Deaminase_fcy1__Saccharomyces_cerevisiae__AJW17876
  source 1..477: mol_type = other RNA

SEQ ID NO: 5923 - RNA, 477 nt, synthetic construct; identical to SEQ ID NO: 5387
  misc_feature 1..477: note = derived and/or modified sequence opt1 fromCytosine_Deaminase_fcy1__Saccharomyces_cerevisiae__AJW1 7876
  source 1..477: mol_type = other RNA

SEQ ID NO: 5924 - RNA, 477 nt, synthetic construct; identical to SEQ ID NO: 5388
  misc_feature 1..477: note = derived and/or modified sequence opt2 fromCytosine_Deaminase_fcy1__Saccharomyces_cerevisiae__AJW1 7876
  source 1..477: mol_type = other RNA

SEQ ID NO: 5925 - RNA, 477 nt, synthetic construct; identical to SEQ ID NO: 5389
  misc_feature 1..477: note = derived and/or modified sequence opt3 fromCytosine_Deaminase_fcy1__Saccharomyces_cerevisiae__AJW1 7876
  source 1..477: mol_type = other RNA

SEQ ID NO: 5926 - RNA, 477 nt, synthetic construct; identical to SEQ ID NO: 5390
  misc_feature 1..477: note = derived and/or modified sequence opt4 fromCytosine_Deaminase_fcy1__Saccharomyces_cerevisiae__AJW1 7876
  source 1..477: mol_type = other RNA

SEQ ID NO: 5927 - RNA, 477 nt, synthetic construct; identical to SEQ ID NO: 5391
  misc_feature 1..477: note = derived and/or modified sequence opt5 fromCytosine_Deaminase_fcy1__Saccharomyces_cerevisiae__AJW1 7876
  source 1..477: mol_type = other RNA

SEQ ID NO: 5928 - RNA, 477 nt, synthetic construct
  misc_feature 1..477: note = derived and/or modified sequence opt6 fromCytosine_Deaminase_fcy1__Saccharomyces_cerevisiae__AJW1 7876
  source 1..477: mol_type = other RNA
atggtaacaggaggaatggcaagtaaatgggatcaaaaaggaatggacatagcatatgaagaagcagcattaggatataaagaaggaggagtaccaataggaggatgcttaataaataataaagacggaagtgtattaggaagaggacacaatatgagatttcaaaaaggaagcgcaacattacacggagaaataagcacactagaaaattgtggaaggttagaaggaaaagtatataaagatacaacattatatacaacattaagtccatgcgacatgtgcacaggagcaataataatgtatggaataccaagatgtgtagtaggagaaaatgtaaattttaaaagtaaaggagaaaaatatctacaaacaagaggacatgaagtagtagtagtagacgacgaaagatgtaaaaaaataatgaaacaatttatagatgaaagaccacaagattggtttgaagatataggagaataa

SEQ ID NO: 5929 - protein, 158 aa, synthetic construct; identical to SEQ ID NO: 5385
  REGION 1..158: note Cytosine_Deaminase_fcy1__Saccharomyces_cerevisiae__A0A0D4Z2 L6

SEQ ID NO: 5930 - RNA, 477 nt, synthetic construct; identical to SEQ ID NO: 5386
  misc_feature 1..477: note Cytosine_Deaminase_fcy1__Saccharomyces_cerevisiae__AJW18315
  source 1..477: mol_type = other RNA

SEQ ID NO: 5931 - RNA, 477 nt, synthetic construct; identical to SEQ ID NO: 5387
  misc_feature 1..477: note = derived and/or modified sequence opt1 fromCytosine_Deaminase_fcy1__Saccharomyces_cerevisiae__AJW1 8315
  source 1..477: mol_type = other RNA

SEQ ID NO: 5932 - RNA, 477 nt, synthetic construct; identical to SEQ ID NO: 5388
  misc_feature 1..477: note = derived and/or modified sequence opt2 fromCytosine_Deaminase_fcy1__Saccharomyces_cerevisiae__AJW1 8315
  source 1..477: mol_type = other RNA

SEQ ID NO: 5933 - RNA, 477 nt, synthetic construct; identical to SEQ ID NO: 5389
  misc_feature 1..477: note = derived and/or modified sequence opt3 fromCytosine_Deaminase_fcy1__Saccharomyces_cerevisiae__AJW1 8315
  source 1..477: mol_type = other RNA

SEQ ID NO: 5934 - RNA, 477 nt, synthetic construct; identical to SEQ ID NO: 5390
  misc_feature 1..477: note = derived and/or modified sequence opt4 fromCytosine_Deaminase_fcy1__Saccharomyces_cerevisiae__AJW1 8315
  source 1..477: mol_type = other RNA

SEQ ID NO: 5935 - RNA, 477 nt, synthetic construct; identical to SEQ ID NO: 5391
  misc_feature 1..477: note = derived and/or modified sequence opt5 fromCytosine_Deaminase_fcy1__Saccharomyces_cerevisiae__AJW1 8315
  source 1..477: mol_type = other RNA

SEQ ID NO: 5936 - RNA, 477 nt, synthetic construct
  misc_feature 1..477: note = derived and/or modified sequence opt6 fromCytosine_Deaminase_fcy1__Saccharomyces_cerevisiae__AJW1 8315
  source 1..477: mol_type = other RNA
atggtaacaggaggaatggcaagtaaatgggatcaaaaaggaatggacatagcatatgaagaagcagcattagggtataaagaaggaggagtaccaataggaggatgtttaataaataataaagatggaagtgtactaggaagaggacataatatgagatttcaaaaaggaagtgcaacattacacggagaaatatcaacattagaaaattgtggaagattagaaggaaaagtatataaagatacaacattatatacaacattaagtccatgtgatatgtgtacaggagcaataataatgtatggaataccaagatgtgtagtaggagaaaatgtaaattttaaaagtaaaggagaaaaatatttacaaacaagaggacatgaagtagtagtagtagatgacgaaagatgtaaaaaaataatgaaacaatttatagatgaaagaccacaagattggtttgaagatataggagaataa

SEQ ID NO: 5937 - protein, 158 aa, synthetic construct; identical to SEQ ID NO: 5385
  REGION 1..158: note Cytosine_Deaminase_fcy1__Saccharomyces_cerevisiae__A0A0D4Z4 A1

SEQ ID NO: 5938 - RNA, 477 nt, synthetic construct; identical to SEQ ID NO: 5466
  misc_feature 1..477: note Cytosine_Deaminase_fcy1__Saccharomyces_cerevisiae__AJW18752
  source 1..477: mol_type = other RNA

SEQ ID NO: 5939 - RNA, 477 nt, synthetic construct; identical to SEQ ID NO: 5387
  misc_feature 1..477: note = derived and/or modified sequence opt1 fromCytosine_Deaminase_fcy1__Saccharomyces_cerevisiae__AJW1 8752
  source 1..477: mol_type = other RNA

SEQ ID NO: 5940 - RNA, 477 nt, synthetic construct; identical to SEQ ID NO: 5388
  misc_feature 1..477: note = derived and/or modified sequence opt2 fromCytosine_Deaminase_fcy1__Saccharomyces_cerevisiae__AJW1 8752
  source 1..477: mol_type = other RNA

SEQ ID NO: 5941 - RNA, 477 nt, synthetic construct; identical to SEQ ID NO: 5389
  misc_feature 1..477: note = derived and/or modified sequence opt3 fromCytosine_Deaminase_fcy1__Saccharomyces_cerevisiae__AJW1 8752
  source 1..477: mol_type = other RNA

SEQ ID NO: 5942 - RNA, 477 nt, synthetic construct; identical to SEQ ID NO: 5390
  misc_feature 1..477: note = derived and/or modified sequence opt4 fromCytosine_Deaminase_fcy1__Saccharomyces_cerevisiae__AJW1 8752
  source 1..477: mol_type = other RNA

SEQ ID NO: 5943 - RNA, 477 nt, synthetic construct; identical to SEQ ID NO: 5391
  misc_feature 1..477: note = derived and/or modified sequence opt5 fromCytosine_Deaminase_fcy1__Saccharomyces_cerevisiae__AJW1 8752
  source 1..477: mol_type = other RNA

SEQ ID NO: 5944 - RNA, 477 nt, synthetic construct
  misc_feature 1..477: note = derived and/or modified sequence opt6 fromCytosine_Deaminase_fcy1__Saccharomyces_cerevisiae__AJW1 8752
  source 1..477: mol_type = other RNA
atggtaacaggaggaatggcaagtaaatgggatcaaaaaggaatggacatagcatatgaagaagcagcactaggatataaagaaggaggagtaccaataggaggatgcttaataaataataaagacggaagtgtattaggaagaggacacaatatgagattccaaaaaggaagtgcaacattacacggagaaataagtacattagaaaattgtggaagactagaaggaaaagtatataaagatacaacattatatacaacactaagtccatgtgacatgtgcacaggagcaataataatgtatggaataccaagatgtgtagtaggagaaaatgtaaattttaaaagcaaaggagaaaaatatttacaaacaagaggacatgaagtagtagtagtagatgacgaaagatgtaaaaaaataatgaaacaatttatagatgaaagaccacaagattggtttgaagatataggagaatag

SEQ ID NO: 5945 - protein, 158 aa, synthetic construct; identical to SEQ ID NO: 5385
  REGION 1..158: note Cytosine_Deaminase_fcy1__Saccharomyces_cerevisiae__A0A0D4Z5 52

SEQ ID NO: 5946 - RNA, 477 nt, synthetic construct; identical to SEQ ID NO: 5386
  misc_feature 1..477: note Cytosine_Deaminase_fcy1__Saccharomyces_cerevisiae__AJW19190
  source 1..477: mol_type = other RNA

SEQ ID NO: 5947 - RNA, 477 nt, synthetic construct; identical to SEQ ID NO: 5387
  misc_feature 1..477: note = derived and/or modified sequence opt1 fromCytosine_Deaminase_fcy1__Saccharomyces_cerevisiae__AJW1 9190
  source 1..477: mol_type = other RNA

SEQ ID NO: 5948 - RNA, 477 nt, synthetic construct; identical to SEQ ID NO: 5388
  misc_feature 1..477: note = derived and/or modified sequence opt2 fromCytosine_Deaminase_fcy1__Saccharomyces_cerevisiae__AJW1 9190
  source 1..477: mol_type = other RNA

SEQ ID NO: 5949 - RNA, 477 nt, synthetic construct; identical to SEQ ID NO: 5389
  misc_feature 1..477: note = derived and/or modified sequence opt3 fromCytosine_Deaminase_fcy1__Saccharomyces_cerevisiae__AJW1 9190
  source 1..477: mol_type = other RNA

SEQ ID NO: 5950 - RNA, 477 nt, synthetic construct; identical to SEQ ID NO: 5390
  misc_feature 1..477: note = derived and/or modified sequence opt4 fromCytosine_Deaminase_fcy1__Saccharomyces_cerevisiae__AJW1 9190
  source 1..477: mol_type = other RNA

SEQ ID NO: 5951 - RNA, 477 nt, synthetic construct; identical to SEQ ID NO: 5391
  misc_feature 1..477: note = derived and/or modified sequence opt5 fromCytosine_Deaminase_fcy1__Saccharomyces_cerevisiae__AJW1 9190
  source 1..477: mol_type = other RNA

SEQ ID NO: 5952 - RNA, 477 nt, synthetic construct
  misc_feature 1..477: note = derived and/or modified sequence opt6 fromCytosine_Deaminase_fcy1__Saccharomyces_cerevisiae__AJW1 9190
  source 1..477: mol_type = other RNA
atggtaacaggaggaatggcaagtaaatgggatcaaaaaggaatggatatagcatatgaagaagcagcattaggatataaagaaggaggagtaccaataggaggatgtttaataaataataaggacggaagcgtattaggaagaggacataatatgagatttcaaaaaggaagtgcaacattacacggagaaataagtacattagaaaattgtggaagattagaaggaaaagtatataaagatacaacattatatacaacattaagtccatgtgacatgtgtacaggagcaataataatgtatggaataccaagatgtgtggtaggagaaaatgtaaattttaaaagtaaaggagaaaaatatttacaaacaagaggacatgaagtagtagtagtagatgacgaaagatgtaaaaaaataatgaaacaatttatagatgaaagaccacaagattggtttgaagatataggagaataa

SEQ ID NO: 5953 - protein, 158 aa, synthetic construct; identical to SEQ ID NO: 5385
  REGION 1..158: note Cytosine_Deaminase_fcy1__Saccharomyces_cerevisiae__A0A0D4Z6 N6

SEQ ID NO: 5954 - RNA, 477 nt, synthetic construct; identical to SEQ ID NO: 5386
  misc_feature 1..477: note Cytosine_Deaminase_fcy1__Saccharomyces_cerevisiae__AJW19616
  source 1..477: mol_type = other RNA

SEQ ID NO: 5955 - RNA, 477 nt, synthetic construct; identical to SEQ ID NO: 5387
  misc_feature 1..477: note = derived and/or modified sequence opt1 fromCytosine_Deaminase_fcy1__Saccharomyces_cerevisiae__AJW1 9616
  source 1..477: mol_type = other RNA

SEQ ID NO: 5956 - RNA, 477 nt, synthetic construct; identical to SEQ ID NO: 5388
  misc_feature 1..477: note = derived and/or modified sequence opt2 fromCytosine_Deaminase_fcy1__Saccharomyces_cerevisiae__AJW1 9616
  source 1..477: mol_type = other RNA

SEQ ID NO: 5957 - RNA, 477 nt, synthetic construct; identical to SEQ ID NO: 5389
  misc_feature 1..477: note = derived and/or modified sequence opt3 fromCytosine_Deaminase_fcy1__Saccharomyces_cerevisiae__AJW1 9616
  source 1..477: mol_type = other RNA

SEQ ID NO: 5958 - RNA, 477 nt, synthetic construct; identical to SEQ ID NO: 5390
  misc_feature 1..477: note = derived and/or modified sequence opt4 fromCytosine_Deaminase_fcy1__Saccharomyces_cerevisiae__AJW1 9616
  source 1..477: mol_type = other RNA

SEQ ID NO: 5959 - RNA, 477 nt, synthetic construct; identical to SEQ ID NO: 5391
  misc_feature 1..477: note = derived and/or modified sequence opt5 fromCytosine_Deaminase_fcy1__Saccharomyces_cerevisiae__AJW1 9616
  source 1..477: mol_type = other RNA

SEQ ID NO: 5960 - RNA, 477 nt, synthetic construct
  misc_feature 1..477: note = derived and/or modified sequence opt6 fromCytosine_Deaminase_fcy1__Saccharomyces_cerevisiae__AJW1 9616
  source 1..477: mol_type = other RNA
atggtaacaggaggaatggcaagtaaatgggatcaaaaaggaatggatatagcatatgaagaagcagcattaggatataaagaaggaggagtaccaataggaggatgtttaataaataataaagatggaagcgtattaggaagaggacataatatgagatttcaaaaaggaagcgcaacattacatggagaaataagtacactagaaaattgtggaagattagaaggaaaagtatataaagatacaacattatatacaacattaagtccatgtgatatgtgtacaggagcaataataatgtatggaataccaaggtgtgtagtaggagaaaatgtaaattttaaaagtaaaggagaaaaatatttacaaacaagaggacatgaagtggtagtggtagatgatgaaaggtgtaaaaaaataatgaaacaatttatagatgaaagaccacaagattggtttgaagatataggagaataa

SEQ ID NO: 5961 - protein, 158 aa, synthetic construct; identical to SEQ ID NO: 5385
  REGION 1..158: note Cytosine_Deaminase_fcy1__Saccharomyces_cerevisiae__A0A0D4Z8 00

SEQ ID NO: 5962 - RNA, 477 nt, synthetic construct; identical to SEQ ID NO: 5386
  misc_feature 1..477: note Cytosine_Deaminase_fcy1__Saccharomyces_cerevisiae__AJW20032
  source 1..477: mol_type = other RNA

SEQ ID NO: 5963 - RNA, 477 nt, synthetic construct; identical to SEQ ID NO: 5387
  misc_feature 1..477: note = derived and/or modified sequence opt1 fromCytosine_Deaminase_fcy1__Saccharomyces_cerevisiae__AJW2 0032
  source 1..477: mol_type = other RNA

SEQ ID NO: 5964 - RNA, 477 nt, synthetic construct; identical to SEQ ID NO: 5388
  misc_feature 1..477: note = derived and/or modified sequence opt2 fromCytosine_Deaminase_fcy1__Saccharomyces_cerevisiae__AJW2 0032
  source 1..477: mol_type = other RNA

SEQ ID NO: 5965 - RNA, 477 nt, synthetic construct; identical to SEQ ID NO: 5389
  misc_feature 1..477: note = derived and/or modified sequence opt3 fromCytosine_Deaminase_fcy1__Saccharomyces_cerevisiae__AJW2 0032
  source 1..477: mol_type = other RNA

SEQ ID NO: 5966 - RNA, 477 nt, synthetic construct; identical to SEQ ID NO: 5390
  misc_feature 1..477: note = derived and/or modified sequence opt4 fromCytosine_Deaminase_fcy1__Saccharomyces_cerevisiae__AJW2 0032
  source 1..477: mol_type = other RNA

SEQ ID NO: 5967 - RNA, 477 nt, synthetic construct; identical to SEQ ID NO: 5391
  misc_feature 1..477: note = derived and/or modified sequence opt5 fromCytosine_Deaminase_fcy1__Saccharomyces_cerevisiae__AJW2 0032
  source 1..477: mol_type = other RNA

SEQ ID NO: 5968 - RNA, 477 nt, synthetic construct
  misc_feature 1..477: note = derived and/or modified sequence opt6 fromCytosine_Deaminase_fcy1__Saccharomyces_cerevisiae__AJW2 0032
  source 1..477: mol_type = other RNA
atggtaacaggaggaatggcaagtaaatgggatcaaaaaggaatggacatagcatatgaagaagcagcattaggatataaagaaggaggagtaccaataggaggatgcttaataaataataaagatggaagtgtactaggaagaggacataatatgagatttcaaaaaggaagtgcaacactacatggagaaataagcacattagaaaactgtggaagactagaaggaaaagtatataaagatacaacattatatacaacattaagcccatgtgacatgtgtacaggagcaataataatgtatggaataccaagatgtgtagtaggagaaaatgtaaattttaaaagtaaaggagaaaaatatttacaaacaagaggacacgaagtagtagtagtagatgacgaaagatgtaaaaaaataatgaaacaatttatagatgaaagaccacaagattggtttgaagatataggagaataa

SEQ ID NO: 5969 - protein, 158 aa, synthetic construct; identical to SEQ ID NO: 5385
  REGION 1..158: note Cytosine_Deaminase_fcy1__Saccharomyces_cerevisiae__A0A0D4Z9 V2

SEQ ID NO: 5970 - RNA, 477 nt, synthetic construct; identical to SEQ ID NO: 5418
  misc_feature 1..477: note Cytosine_Deaminase_fcy1__Saccharomyces_cerevisiae__AJW20469
  source 1..477: mol_type = other RNA

SEQ ID NO: 5971 - RNA, 477 nt, synthetic construct; identical to SEQ ID NO: 5387
  misc_feature 1..477: note = derived and/or modified sequence opt1 fromCytosine_Deaminase_fcy1__Saccharomyces_cerevisiae__AJW2 0469
  source 1..477: mol_type = other RNA

SEQ ID NO: 5972 - RNA, 477 nt, synthetic construct; identical to SEQ ID NO: 5388
  misc_feature 1..477: note = derived and/or modified sequence opt2 fromCytosine_Deaminase_fcy1__Saccharomyces_cerevisiae__AJW2 0469
  source 1..477: mol_type = other RNA

SEQ ID NO: 5973 - RNA, 477 nt, synthetic construct; identical to SEQ ID NO: 5389
  misc_feature 1..477: note = derived and/or modified sequence opt3 fromCytosine_Deaminase_fcy1__Saccharomyces_cerevisiae__AJW2 0469
  source 1..477: mol_type = other RNA

SEQ ID NO: 5974 - RNA, 477 nt, synthetic construct; identical to SEQ ID NO: 5390
  misc_feature 1..477: note = derived and/or modified sequence opt4 fromCytosine_Deaminase_fcy1__Saccharomyces_cerevisiae__AJW2 0469
  source 1..477: mol_type = other RNA

SEQ ID NO: 5975 - RNA, 477 nt, synthetic construct; identical to SEQ ID NO: 5391
  misc_feature 1..477: note = derived and/or modified sequence opt5 fromCytosine_Deaminase_fcy1__Saccharomyces_cerevisiae__AJW2 0469
  source 1..477: mol_type = other RNA

SEQ ID NO: 5976 - RNA, 477 nt, synthetic construct
  misc_feature 1..477: note = derived and/or modified sequence opt6 fromCytosine_Deaminase_fcy1__Saccharomyces_cerevisiae__AJW2 0469
  source 1..477: mol_type = other RNA
atggtaacaggaggaatggcaagcaaatgggatcaaaaaggaatggatatagcatatgaagaagcagcattaggatataaagaaggaggagtaccaataggaggatgtctaataaataataaagatggaagcgtattaggaagaggacataatatgagatttcaaaaaggaagtgcaacattacatggagaaataagtacattagaaaattgtggaagattagaaggaaaagtatataaagatacaacattatatacaacattaagtccatgtgatatgtgtacaggagcaataataatgtatggaataccaagatgtgtagtaggagaaaatgtaaattttaaaagtaaaggggaaaaatatttacagacaagaggacatgaagtagtagtagtagatgatgaaagatgtaaaaaaataatgaaacaatttatagatgaaagaccacaagattggtttgaagatataggagaataa

SEQ ID NO: 5977 - protein, 158 aa, synthetic construct; identical to SEQ ID NO: 5385
  REGION 1..158: note Cytosine_Deaminase_fcy1__Saccharomyces_cerevisiae__A0A0D4ZB 52

SEQ ID NO: 5978 - RNA, 477 nt, synthetic construct; identical to SEQ ID NO: 5386
  misc_feature 1..477: note Cytosine_Deaminase_fcy1__Saccharomyces_cerevisiae__AJW20914
  source 1..477: mol_type = other RNA

SEQ ID NO: 5979 - RNA, 477 nt, synthetic construct; identical to SEQ ID NO: 5387
  misc_feature 1..477: note = derived and/or modified sequence opt1 fromCytosine_Deaminase_fcy1__Saccharomyces_cerevisiae__AJW2 0914
  source 1..477: mol_type = other RNA

SEQ ID NO: 5980 - RNA, 477 nt, synthetic construct; identical to SEQ ID NO: 5388
  misc_feature 1..477: note = derived and/or modified sequence opt2 fromCytosine_Deaminase_fcy1__Saccharomyces_cerevisiae__AJW2 0914
  source 1..477: mol_type = other RNA

SEQ ID NO: 5981 - RNA, 477 nt, synthetic construct; identical to SEQ ID NO: 5389
  misc_feature 1..477: note = derived and/or modified sequence opt3 fromCytosine_Deaminase_fcy1__Saccharomyces_cerevisiae__AJW2 0914
  source 1..477: mol_type = other RNA

SEQ ID NO: 5982 - RNA, 477 nt, synthetic construct; identical to SEQ ID NO: 5390
  misc_feature 1..477: note = derived and/or modified sequence opt4 fromCytosine_Deaminase_fcy1__Saccharomyces_cerevisiae__AJW2 0914
  source 1..477: mol_type = other RNA

SEQ ID NO: 5983 - RNA, 477 nt, synthetic construct; identical to SEQ ID NO: 5391
  misc_feature 1..477: note = derived and/or modified sequence opt5 fromCytosine_Deaminase_fcy1__Saccharomyces_cerevisiae__AJW2 0914
  source 1..477: mol_type = other RNA

SEQ ID NO: 5984 - RNA, 477 nt, synthetic construct
  misc_feature 1..477: note = derived and/or modified sequence opt6 fromCytosine_Deaminase_fcy1__Saccharomyces_cerevisiae__AJW2 0914
  source 1..477: mol_type = other RNA
atggtaacaggaggaatggcaagcaaatgggatcaaaaaggaatggacatagcatatgaagaagcagcattaggatataaagaaggaggagtaccaataggaggatgcttaataaataataaagacggaagcgtattaggaagaggacataatatgagatttcaaaaaggaagtgcaacactacacggagaaataagcacattagaaaactgtggaaggctagaaggaaaagtatataaagatacaacattatatacaacattaagtccatgtgacatgtgcacaggagcaataataatgtatggaataccaagatgtgtagtaggagaaaatgtaaattttaaaagtaaaggagaaaaatatttacaaacaagaggacatgaagtagtagtagtagatgatgaaagatgtaaaaaaataatgaaacaatttatagatgaaagaccacaagattggtttgaagatataggagaataa

SEQ ID NO: 5985 - protein, 158 aa, synthetic construct; identical to SEQ ID NO: 5385
  REGION 1..158: note Cytosine_Deaminase_fcy1__Saccharomyces_cerevisiae__A0A0D4ZC A2

SEQ ID NO: 5986 - RNA, 477 nt, synthetic construct; identical to SEQ ID NO: 5418
  misc_feature 1..477: note Cytosine_Deaminase_fcy1__Saccharomyces_cerevisiae__AJW21349
  source 1..477: mol_type = other RNA

SEQ ID NO: 5987 - RNA, 477 nt, synthetic construct; identical to SEQ ID NO: 5387
  misc_feature 1..477: note = derived and/or modified sequence opt1 fromCytosine_Deaminase_fcy1__Saccharomyces_cerevisiae__AJW2 1349
  source 1..477: mol_type = other RNA

SEQ ID NO: 5988 - RNA, 477 nt, synthetic construct; identical to SEQ ID NO: 5388
  misc_feature 1..477: note = derived and/or modified sequence opt2 fromCytosine_Deaminase_fcy1__Saccharomyces_cerevisiae__AJW2 1349
  source 1..477: mol_type = other RNA

SEQ ID NO: 5989 - RNA, 477 nt, synthetic construct; identical to SEQ ID NO: 5389
  misc_feature 1..477: note = derived and/or modified sequence opt3 fromCytosine_Deaminase_fcy1__Saccharomyces_cerevisiae__AJW2 1349
  source 1..477: mol_type = other RNA

SEQ ID NO: 5990 - RNA, 477 nt, synthetic construct; identical to SEQ ID NO: 5390
  misc_feature 1..477: note = derived and/or modified sequence opt4 fromCytosine_Deaminase_fcy1__Saccharomyces_cerevisiae__AJW2 1349
  source 1..477: mol_type = other RNA

SEQ ID NO: 5991 - RNA, 477 nt, synthetic construct; identical to SEQ ID NO: 5391
  misc_feature 1..477: note = derived and/or modified sequence opt5 fromCytosine_Deaminase_fcy1__Saccharomyces_cerevisiae__AJW2 1349
  source 1..477: mol_type = other RNA

SEQ ID NO: 5992 - RNA, 477 nt, synthetic construct
  misc_feature 1..477: note = derived and/or modified sequence opt6 fromCytosine_Deaminase_fcy1__Saccharomyces_cerevisiae__AJW2 1349
  source 1..477: mol_type = other RNA
atggtaacaggaggaatggcaagtaaatgggatcaaaaaggaatggacatagcatatgaagaagcagcattagggtataaagaaggaggagtaccaataggaggatgtttaataaataataaagacggaagcgtattaggaagaggacataatatgagatttcaaaaaggaagtgcaacattacacggagaaataagtacattagaaaactgtggaagactagaaggaaaagtatataaagatacaacattatatacaacattaagtccatgtgacatgtgcacaggagcaataataatgtatggaataccaagatgtgtagtaggagaaaatgtaaattttaaaagtaaaggagaaaaatatttacaaacaagaggacatgaagtagtagtagtagatgacgaaagatgtaaaaaaataatgaaacaatttatagatgaaagaccacaagattggtttgaagatataggagaataa

SEQ ID NO: 5993 - protein, 158 aa, synthetic construct; identical to SEQ ID NO: 5385
  REGION 1..158: note Cytosine_Deaminase_fcy1__Saccharomyces_cerevisiae__A0A0D4ZC G3

SEQ ID NO: 5994 - RNA, 477 nt, synthetic construct; identical to SEQ ID NO: 5714
  misc_feature 1..477: note Cytosine_Deaminase_fcy1__Saccharomyces_cerevisiae__AJW21790
  source 1..477: mol_type = other RNA

SEQ ID NO: 5995 - RNA, 477 nt, synthetic construct; identical to SEQ ID NO: 5387
  misc_feature 1..477: note = derived and/or modified sequence opt1 fromCytosine_Deaminase_fcy1__Saccharomyces_cerevisiae__AJW2 1790
  source 1..477: mol_type = other RNA

SEQ ID NO: 5996 - RNA, 477 nt, synthetic construct; identical to SEQ ID NO: 5388
  misc_feature 1..477: note = derived and/or modified sequence opt2 fromCytosine_Deaminase_fcy1__Saccharomyces_cerevisiae__AJW2 1790
  source 1..477: mol_type = other RNA

SEQ ID NO: 5997 - RNA, 477 nt, synthetic construct; identical to SEQ ID NO: 5389
  misc_feature 1..477: note = derived and/or modified sequence opt3 fromCytosine_Deaminase_fcy1__Saccharomyces_cerevisiae__AJW2 1790
  source 1..477: mol_type = other RNA

SEQ ID NO: 5998 - RNA, 477 nt, synthetic construct; identical to SEQ ID NO: 5390
  misc_feature 1..477: note = derived and/or modified sequence opt4 fromCytosine_Deaminase_fcy1__Saccharomyces_cerevisiae__AJW2 1790
  source 1..477: mol_type = other RNA

SEQ ID NO: 5999 - RNA, 477 nt, synthetic construct; identical to SEQ ID NO: 5391
  misc_feature 1..477: note = derived and/or modified sequence opt5 fromCytosine_Deaminase_fcy1__Saccharomyces_cerevisiae__AJW2 1790
  source 1..477: mol_type = other RNA

SEQ ID NO: 6000 - RNA, 477 nt, synthetic construct
  misc_feature 1..477: note = derived and/or modified sequence opt6 fromCytosine_Deaminase_fcy1__Saccharomyces_cerevisiae__AJW2 1790
  source 1..477: mol_type = other RNA
atggtaacaggaggaatggcaagtaaatgggatcaaaaaggaatggacatagcatatgaagaagcagcattaggatataaagaaggaggagtaccaataggaggatgcttaataaataataaagacggaagtgtattaggaagaggacataatatgagatttcaaaaaggaagtgcaacattacacggagaaataagtacattagaaaactgtggaagattagaaggaaaagtatataaagatacaacattatatacaacactaagtccatgtgacatgtgcacaggagcaataataatgtatggaataccaagatgtgtagtaggagaaaatgtaaattttaaaagtaaaggagaaaaatatttacaaacaagaggacatgaagtagtagtagtagatgacgaaagatgtaaaaaaataatgaaacaatttatagatgaaagaccacaagattggtttgaagatataggagaataa

SEQ ID NO: 6001 - protein, 158 aa, synthetic construct; identical to SEQ ID NO: 5385
  REGION 1..158: note Cytosine_Deaminase_fcy1__Saccharomyces_cerevisiae__A0A0D4ZE M2

SEQ ID NO: 6002 - RNA, 477 nt, synthetic construct; identical to SEQ ID NO: 5386
  misc_feature 1..477: note Cytosine_Deaminase_fcy1__Saccharomyces_cerevisiae__AJW22218
  source 1..477: mol_type = other RNA

SEQ ID NO: 6003 - RNA, 477 nt, synthetic construct; identical to SEQ ID NO: 5387
  misc_feature 1..477: note = derived and/or modified sequence opt1 fromCytosine_Deaminase_fcy1__Saccharomyces_cerevisiae__AJW2 2218
  source 1..477: mol_type = other RNA

SEQ ID NO: 6004 - RNA, 477 nt, synthetic construct; identical to SEQ ID NO: 5388
  misc_feature 1..477: note = derived and/or modified sequence opt2 fromCytosine_Deaminase_fcy1__Saccharomyces_cerevisiae__AJW2 2218
  source 1..477: mol_type = other RNA

SEQ ID NO: 6005 - RNA, 477 nt, synthetic construct; identical to SEQ ID NO: 5389
  misc_feature 1..477: note = derived and/or modified sequence opt3 fromCytosine_Deaminase_fcy1__Saccharomyces_cerevisiae__AJW2 2218
  source 1..477: mol_type = other RNA

SEQ ID NO: 6006 - RNA, 477 nt, synthetic construct; identical to SEQ ID NO: 5390
  misc_feature 1..477: note = derived and/or modified sequence opt4 fromCytosine_Deaminase_fcy1__Saccharomyces_cerevisiae__AJW2 2218
  source 1..477: mol_type = other RNA

SEQ ID NO: 6007 - RNA, 477 nt, synthetic construct; identical to SEQ ID NO: 5391
  misc_feature 1..477: note = derived and/or modified sequence opt5 fromCytosine_Deaminase_fcy1__Saccharomyces_cerevisiae__AJW2 2218
  source 1..477: mol_type = other RNA

SEQ ID NO: 6008 - RNA, 477 nt, synthetic construct
  misc_feature 1..477: note = derived and/or modified sequence opt6 fromCytosine_Deaminase_fcy1__Saccharomyces_cerevisiae__AJW2 2218
  source 1..477: mol_type = other RNA
atggtaacaggaggaatggcaagtaaatgggatcaaaaaggaatggacatagcatacgaagaagcagcattaggatataaagaaggaggagtaccaataggaggatgtctaataaataataaagatggaagtgtattaggaagaggacataatatgagattccaaaaaggaagtgcaacattacatggagaaataagtacactagaaaactgtggaagactagaaggaaaagtatataaagatacaacattatatacaacattaagtccatgtgacatgtgcacaggagcaataataatgtatggaataccaagatgtgtagtaggagaaaatgtaaattttaaaagcaaaggagaaaaatatttacaaacaagaggacatgaagtagtagtggtagatgacgaaagatgtaaaaaaataatgaaacaatttatagatgaaagaccacaagattggtttgaagatataggagaataa

SEQ ID NO: 6009 - protein, 158 aa, synthetic construct; identical to SEQ ID NO: 5385
  REGION 1..158: note Cytosine_Deaminase_fcy1__Saccharomyces_cerevisiae__A0A0D4ZF D0

SEQ ID NO: 6010 - RNA, 477 nt, synthetic construct; identical to SEQ ID NO: 5386
  misc_feature 1..477: note Cytosine_Deaminase_fcy1__Saccharomyces_cerevisiae__AJW22656
  source 1..477: mol_type = other RNA

SEQ ID NO: 6011 - RNA, 477 nt, synthetic construct; identical to SEQ ID NO: 5387
  misc_feature 1..477: note = derived and/or modified sequence opt1 fromCytosine_Deaminase_fcy1__Saccharomyces_cerevisiae__AJW2 2656
  source 1..477: mol_type = other RNA

SEQ ID NO: 6012 - RNA, 477 nt, synthetic construct; identical to SEQ ID NO: 5388
  misc_feature 1..477: note = derived and/or modified sequence opt2 fromCytosine_Deaminase_fcy1__Saccharomyces_cerevisiae__AJW2 2656
  source 1..477: mol_type = other RNA

SEQ ID NO: 6013 - RNA, 477 nt, synthetic construct; identical to SEQ ID NO: 5389
  misc_feature 1..477: note = derived and/or modified sequence opt3 fromCytosine_Deaminase_fcy1__Saccharomyces_cerevisiae__AJW2 2656
  source 1..477: mol_type = other RNA

SEQ ID NO: 6014 - RNA, 477 nt, synthetic construct; identical to SEQ ID NO: 5390
  misc_feature 1..477: note = derived and/or modified sequence opt4 fromCytosine_Deaminase_fcy1__Saccharomyces_cerevisiae__AJW2 2656
  source 1..477: mol_type = other RNA

SEQ ID NO: 6015 - RNA, 477 nt, synthetic construct; identical to SEQ ID NO: 5391
  misc_feature 1..477: note = derived and/or modified sequence opt5 fromCytosine_Deaminase_fcy1__Saccharomyces_cerevisiae__AJW2 2656
  source 1..477: mol_type = other RNA

SEQ ID NO: 6016 - RNA, 477 nt, synthetic construct
  misc_feature 1..477: note = derived and/or modified sequence opt6 fromCytosine_Deaminase_fcy1__Saccharomyces_cerevisiae__AJW2 2656
  source 1..477: mol_type = other RNA
atggtaacaggaggaatggcaagtaaatgggatcaaaaaggaatggacatagcatatgaagaagcagcattaggatataaagaaggaggagtaccaataggaggatgcctaataaataataaagacggaagtgtactaggaagaggacataatatgagatttcaaaaaggaagtgcaacattacacggagaaataagtacattagaaaattgtggaagactagaaggaaaagtatataaagatacaacattatatacaacattaagtccatgtgatatgtgcacaggagcaataataatgtatggaataccaagatgtgtagtaggagaaaatgtaaactttaaaagtaaaggagaaaaatatttacaaacaagaggacatgaagtagtagtagtagatgacgaaagatgtaaaaaaataatgaaacaatttatagatgaaagaccacaagattggtttgaagatataggagaataa

SEQ ID NO: 6017 - protein, 158 aa, synthetic construct
  REGION 1..158: note Cytosine_Deaminase_fcy1__Saccharomyces_cerevisiae__A0A0D4ZG R1
MVTGGMASKWDQKGMDIAYEEAALGYKEGGVPIGGCLINNKDGSVLGRGHNMRFQKGSATLHGEITTLENCGRLEGKVYKDTTLYTTLSPCDMCTGAIIMYGIPRCVVGENVNFKSKGEKYLQTRGHEVVVVDDERCKKIMKQFIDERPQDWFEDIGE

SEQ ID NO: 6018 - RNA, 477 nt, synthetic construct
  misc_feature 1..477: note Cytosine_Deaminase_fcy1__Saccharomyces_cerevisiae__AJW23097
  source 1..477: mol_type = other RNA
atggtgacagggggaatggcaagcaagtgggatcagaagggtatggacattgcctatgaggaggcggccttaggttacaaagagggtggtgttccaattggcggatgtcttatcaataacaaagacggaagtgttctcggtcgtggtcacaacatgagatttcaaaagggatccgccacactacatggtgagatcaccactttggaaaactgtgggagattagagggcaaagtgtacaaagataccactttgtatacgacgctgtctccatgcgacatgtgtacaggtgccatcatcatgtatggtattccacgctgtgttgtcggtgagaacgttaatttcaaaagtaagggcgagaaatatttacaaactagaggtcacgaggttgttgttgttgacgatgagaggtgtaaaaagatcatgaaacaattcatcgatgaaagacctcaggattggtttgaagatattggtgagtag

SEQ ID NO: 6019 - RNA, 477 nt, synthetic construct
  misc_feature 1..477: note = derived and/or modified sequence opt1 fromCytosine_Deaminase_fcy1__Saccharomyces_cerevisiae__AJW2 3097
  source 1..477: mol_type = other RNA
atggtgaccggcgggatggccagcaagtgggaccagaagggcatggacatcgcctacgaggaggcggccctggggtacaaggagggcggggtccccatcggcggctgcctcatcaacaacaaggacgggtccgtgctgggccgcgggcacaacatgcggttccagaagggcagcgccaccctgcacggggagatcacgaccctcgagaactgcggccgcctggagggcaaggtgtacaaggacaccaccctgtacacgaccctctccccgtgcgacatgtgcaccggggccatcatcatgtacggcatcccccggtgcgtcgtgggggagaacgtgaacttcaagagcaagggcgagaagtacctgcagacccgcggccacgaggtcgtggtggtcgacgacgagcggtgcaagaagatcatgaagcagttcatcgacgagcgcccccaggactggttcgaggacatcggggagtga

SEQ ID NO: 6020 - RNA, 477 nt, synthetic construct
  misc_feature 1..477: note = derived and/or modified sequence opt2 fromCytosine_Deaminase_fcy1__Saccharomyces_cerevisiae__AJW2 3097
  source 1..477: mol_type = other RNA
atggtcaccggcggcatggcctccaagtgggaccagaagggcatggacatcgcctacgaggaggccgccctcggctacaaggagggcggcgtccccatcggcggctgcctcatcaacaacaaggacggctccgtcctcggccgcggccacaacatgcgcttccagaagggctccgccaccctccacggcgagatcaccaccctcgagaactgcggccgcctcgagggcaaggtctacaaggacaccaccctctacaccaccctctccccctgcgacatgtgcaccggcgccatcatcatgtacggcatcccccgctgcgtcgtcggcgagaacgtcaacttcaagtccaagggcgagaagtacctccagacccgcggccacgaggtcgtcgtcgtcgacgacgagcgctgcaagaagatcatgaagcagttcatcgacgagcgcccccaggactggttcgaggacatcggcgagtga

SEQ ID NO: 6021 - RNA, 477 nt, synthetic construct
  misc_feature 1..477: note = derived and/or modified sequence opt3 fromCytosine_Deaminase_fcy1__Saccharomyces_cerevisiae__AJW2 3097
  source 1..477: mol_type = other RNA
atggtgaccggcgggatggccagcaagtgggaccagaaaggaatggatatcgcttacgaggaagcagccctgggttataaggagggcggggtccccattggaggctgcctcataaacaataaagacggttccgttcttgggagaggacacaacatgaggttccaaaagggctctgcgacactgcatggcgaaatcactacgttggagaattgtgggcggttagaaggaaaagtgtacaaggataccacactgtatactaccctatcaccttgcgacatgtgtacaggtgctattatcatgtacggcattccacgctgcgtagtgggggagaacgtcaattttaagagtaaaggagagaagtatctccagacccgaggccacgaagtggttgtggtcgatgacgagcgttgtaaaaagatcatgaaacagttcatagatgaaagaccgcaggactggtttgaggatatcggtgagtga

SEQ ID NO: 6022 - RNA, 477 nt, synthetic construct
  misc_feature 1..477: note = derived and/or modified sequence opt4 fromCytosine_Deaminase_fcy1__Saccharomyces_cerevisiae__AJW2 3097
  source 1..477: mol_type = other RNA
atggtgaccggcggcatggccagcaagtgggaccagaagggcatggacatcgcctacgaggaggccgccctgggctacaaggagggcggcgtgcccatcggcggctgcctgatcaacaacaaggacggcagcgtgctgggcagaggccacaacatgagattccagaagggcagcgccaccctgcacggcgagatcaccaccctggagaactgcggcagactggagggcaaggtgtacaaggacaccaccctgtacaccaccctgagcccctgcgacatgtgcaccggcgccatcatcatgtacggcatccccagatgcgtggtgggcgagaacgtgaacttcaagagcaagggcgagaagtacctgcagaccagaggccacgaggtggtggtggtggacgacgagagatgcaagaagatcatgaagcagttcatcgacgagagaccccaggactggttcgaggacatcggcgagtga

SEQ ID NO: 6023 - RNA, 477 nt, synthetic construct
  misc_feature 1..477: note = derived and/or modified sequence opt5 fromCytosine_Deaminase_fcy1__Saccharomyces_cerevisiae__AJW2 3097
  source 1..477: mol_type = other RNA
atggtgaccggcgggatggccagcaagtgggaccagaaaggaatggatatcgcttacgaggaagccgcgctgggctataaggaagggggagtccccattggcgggtgcctcatcaacaataaagacggatccgttctgggcagaggccacaacatgcggttccaaaaggggtctgctacacttcatggagagattacgaccctggagaattgtggccgcctcgaagggaaagtgtacaaggatacaaccctgtatacaacccttagcccttgcgacatgtgtacaggagccatcattatgtacggcatcccgagatgcgtggtcggggagaacgtgaattttaagtccaaaggagagaagtatctgcagacccggggccacgaagttgtggtcgtggatgacgagcgctgtaaaaagatcatgaaacagttcattgatgaaagaccccaggactggtttgaggatatcggcgagtga

SEQ ID NO: 6024 - RNA, 477 nt, synthetic construct
  misc_feature 1..477: note = derived and/or modified sequence opt6 fromCytosine_Deaminase_fcy1__Saccharomyces_cerevisiae__AJW2 3097
  source 1..477: mol_type = other RNA
atggtaacaggaggaatggcaagtaaatgggatcaaaaaggaatggacatagcatatgaagaagcagcactaggatataaagaaggaggagtaccaataggaggatgtttaataaataataaagatggaagcgtattaggaagaggacataatatgagatttcaaaaaggaagtgcaacattacacggagaaataacaacattagaaaactgtggaagattagaaggaaaagtatataaagatacaacattatatacaacattaagtccatgtgatatgtgtacaggagcaataataatgtatggaataccaagatgtgtagtaggagaaaatgtaaattttaaaagtaaaggagaaaaatatctacaaacaagaggacatgaagtagtagtagtagatgatgaaagatgtaaaaaaataatgaaacaatttatagatgaaaggccacaagattggtttgaagatataggagaataa

SEQ ID NO: 6025 - protein, 158 aa, synthetic construct; identical to SEQ ID NO: 5385
  REGION 1..158: note Cytosine_Deaminase_fcy1__Saccharomyces_cerevisiae__A0A0D4ZI M2

SEQ ID NO: 6026 - RNA, 477 nt, synthetic construct; identical to SEQ ID NO: 5386
  misc_feature 1..477: note Cytosine_Deaminase_fcy1__Saccharomyces_cerevisiae__AJW23539
  source 1..477: mol_type = other RNA

SEQ ID NO: 6027 - RNA, 477 nt, synthetic construct; identical to SEQ ID NO: 5387
  misc_feature 1..477: note = derived and/or modified sequence opt1 fromCytosine_Deaminase_fcy1__Saccharomyces_cerevisiae__AJW2 3539
  source 1..477: mol_type = other RNA

SEQ ID NO: 6028 - RNA, 477 nt, synthetic construct; identical to SEQ ID NO: 5388
  misc_feature 1..477: note = derived and/or modified sequence opt2 fromCytosine_Deaminase_fcy1__Saccharomyces_cerevisiae__AJW2 3539
  source 1..477: mol_type = other RNA

SEQ ID NO: 6029 - RNA, 477 nt, synthetic construct; identical to SEQ ID NO: 5389
  misc_feature 1..477: note = derived and/or modified sequence opt3 fromCytosine_Deaminase_fcy1__Saccharomyces_cerevisiae__AJW2 3539
  source 1..477: mol_type = other RNA

SEQ ID NO: 6030 - RNA, 477 nt, synthetic construct; identical to SEQ ID NO: 5390
  misc_feature 1..477: note = derived and/or modified sequence opt4 fromCytosine_Deaminase_fcy1__Saccharomyces_cerevisiae__AJW2 3539
  source 1..477: mol_type = other RNA

SEQ ID NO: 6031 - RNA, 477 nt, synthetic construct; identical to SEQ ID NO: 5391
  misc_feature 1..477: note = derived and/or modified sequence opt5 fromCytosine_Deaminase_fcy1__Saccharomyces_cerevisiae__AJW2 3539
  source 1..477: mol_type = other RNA

SEQ ID NO: 6032 - RNA, 477 nt, synthetic construct
  misc_feature 1..477: note = derived and/or modified sequence opt6 fromCytosine_Deaminase_fcy1__Saccharomyces_cerevisiae__AJW2 3539
  source 1..477: mol_type = other RNA
atggtaacaggaggaatggcaagtaaatgggatcaaaaaggaatggatatagcatatgaagaagcagcactaggatataaagaaggaggagtaccaataggaggatgcttaataaataataaagacggaagtgtattaggaagaggacataatatgagatttcaaaaaggaagtgcaacactacacggagaaataagtacattagaaaactgtggaagactagaaggaaaagtatataaagatacaacattatatacaacattaagtccatgtgatatgtgcacaggagcaataataatgtatggaataccaagatgtgtagtaggagaaaatgtaaattttaaaagtaaaggagaaaaatatttacaaacaagaggacatgaagtagtagtagtagatgacgaaagatgtaaaaaaataatgaaacaatttatagatgaaagaccacaagattggtttgaagatataggagaataa

SEQ ID NO: 6033 - protein, 158 aa, synthetic construct; identical to SEQ ID NO: 5385
  REGION 1..158: note Cytosine_Deaminase_fcy1__Saccharomyces_cerevisiae__A0A0D4ZJ C0

SEQ ID NO: 6034 - RNA, 477 nt, synthetic construct; identical to SEQ ID NO: 5418
  misc_feature 1..477: note Cytosine_Deaminase_fcy1__Saccharomyces_cerevisiae__AJW23972
  source 1..477: mol_type = other RNA

SEQ ID NO: 6035 - RNA, 477 nt, synthetic construct; identical to SEQ ID NO: 5387
  misc_feature 1..477: note = derived and/or modified sequence opt1 fromCytosine_Deaminase_fcy1__Saccharomyces_cerevisiae__AJW2 3972
  source 1..477: mol_type = other RNA

SEQ ID NO: 6036 - RNA, 477 nt, synthetic construct; identical to SEQ ID NO: 5388
  misc_feature 1..477: note = derived and/or modified sequence opt2 fromCytosine_Deaminase_fcy1__Saccharomyces_cerevisiae__AJW2 3972
  source 1..477: mol_type = other RNA

SEQ ID NO: 6037 - RNA, 477 nt, synthetic construct; identical to SEQ ID NO: 5389
  misc_feature 1..477: note = derived and/or modified sequence opt3 fromCytosine_Deaminase_fcy1__Saccharomyces_cerevisiae__AJW2 3972
  source 1..477: mol_type = other RNA

SEQ ID NO: 6038 - RNA, 477 nt, synthetic construct; identical to SEQ ID NO: 5390
  misc_feature 1..477: note = derived and/or modified sequence opt4 fromCytosine_Deaminase_fcy1__Saccharomyces_cerevisiae__AJW2 3972
  source 1..477: mol_type = other RNA

SEQ ID NO: 6039 - RNA, 477 nt, synthetic construct; identical to SEQ ID NO: 5391
  misc_feature 1..477: note = derived and/or modified sequence opt5 fromCytosine_Deaminase_fcy1__Saccharomyces_cerevisiae__AJW2 3972
  source 1..477: mol_type = other RNA

SEQ ID NO: 6040 - RNA, 477 nt, synthetic construct
  misc_feature 1..477: note = derived and/or modified sequence opt6 fromCytosine_Deaminase_fcy1__Saccharomyces_cerevisiae__AJW2 3972
  source 1..477: mol_type = other RNA
atggtaacaggaggaatggcgagtaaatgggatcaaaaaggaatggacatagcatatgaagaagcagcattaggatataaagaaggaggagtaccaataggaggatgcttaataaataataaagacggaagtgtattaggaagaggacataatatgagatttcaaaaagggagtgcaacattacacggagaaataagtacattagaaaactgcggaagactagaaggaaaagtatataaagatacaacattatatacaacattaagtccatgtgacatgtgcacaggagcaataataatgtatggaataccaagatgtgtagtaggagaaaatgtaaattttaaaagtaaaggagaaaaatatctacaaacaagaggacatgaagtagtagtagtagatgacgaaagatgtaaaaaaataatgaaacaatttatagatgaaagaccacaagattggtttgaagatataggagaataa

SEQ ID NO: 6041 - protein, 158 aa, synthetic construct; identical to SEQ ID NO: 5385
  REGION 1..158: note Cytosine_Deaminase_fcy1__Saccharomyces_cerevisiae__A0A0D4ZK 17

SEQ ID NO: 6042 - RNA, 477 nt, synthetic construct; identical to SEQ ID NO: 5386
  misc_feature 1..477: note Cytosine_Deaminase_fcy1__Saccharomyces_cerevisiae__AJW24410
  source 1..477: mol_type = other RNA

SEQ ID NO: 6043 - RNA, 477 nt, synthetic construct; identical to SEQ ID NO: 5387
  misc_feature 1..477: note = derived and/or modified sequence opt1 fromCytosine_Deaminase_fcy1__Saccharomyces_cerevisiae__AJW2 4410
  source 1..477: mol_type = other RNA

SEQ ID NO: 6044 - RNA, 477 nt, synthetic construct; identical to SEQ ID NO: 5388
  misc_feature 1..477: note = derived and/or modified sequence opt2 fromCytosine_Deaminase_fcy1__Saccharomyces_cerevisiae__AJW2 4410
  source 1..477: mol_type = other RNA

SEQ ID NO: 6045 - RNA, 477 nt, synthetic construct; identical to SEQ ID NO: 5389
  misc_feature 1..477: note = derived and/or modified sequence opt3 fromCytosine_Deaminase_fcy1__Saccharomyces_cerevisiae__AJW2 4410
  source 1..477: mol_type = other RNA

SEQ ID NO: 6046 - RNA, 477 nt, synthetic construct; identical to SEQ ID NO: 5390
  misc_feature 1..477: note = derived and/or modified sequence opt4 fromCytosine_Deaminase_fcy1__Saccharomyces_cerevisiae__AJW2 4410
  source 1..477: mol_type = other RNA

SEQ ID NO: 6047 - RNA, 477 nt, synthetic construct; identical to SEQ ID NO: 5391
  misc_feature 1..477: note = derived and/or modified sequence opt5 fromCytosine_Deaminase_fcy1__Saccharomyces_cerevisiae__AJW2 4410
  source 1..477: mol_type = other RNA

SEQ ID NO: 6048 - RNA, 477 nt, synthetic construct
  misc_feature 1..477: note = derived and/or modified sequence opt6 fromCytosine_Deaminase_fcy1__Saccharomyces_cerevisiae__AJW2 4410
  source 1..477: mol_type = other RNA
atggtaacaggaggaatggcaagtaaatgggatcaaaaaggaatggacatagcatatgaagaagcagcattaggatataaagaaggaggagtaccaataggaggatgcttaataaataacaaagacggaagcgtattaggaagaggacataatatgagatttcaaaaaggaagtgcaacattacacggagaaataagcacattagaaaactgtggaagactagaaggaaaagtatataaagatacaacattatatacaacattaagtccatgcgacatgtgcacaggagcaataataatgtatggaataccaagatgtgtagtaggagaaaatgtaaattttaaaagtaaaggagaaaaatatttacaaacaagaggacatgaagtagtagtagtagatgacgaaagatgtaaaaaaataatgaaacaatttatagatgaaagaccacaagattggtttgaagatataggagaataa

SEQ ID NO: 6049 - protein, 158 aa, synthetic construct; identical to SEQ ID NO: 5385
  REGION 1..158: note Cytosine_Deaminase_fcy1__Saccharomyces_cerevisiae__A0A0D4ZM C8

SEQ ID NO: 6050 - RNA, 477 nt, synthetic construct; identical to SEQ ID NO: 5386
  misc_feature 1..477: note Cytosine_Deaminase_fcy1__Saccharomyces_cerevisiae__AJW24849
  source 1..477: mol_type = other RNA

SEQ ID NO: 6051 - RNA, 477 nt, synthetic construct; identical to SEQ ID NO: 5387
  misc_feature 1..477: note = derived and/or modified sequence opt1 fromCytosine_Deaminase_fcy1__Saccharomyces_cerevisiae__AJW2 4849
  source 1..477: mol_type = other RNA

SEQ ID NO: 6052 - RNA, 477 nt, synthetic construct; identical to SEQ ID NO: 5388
  misc_feature 1..477: note = derived and/or modified sequence opt2 fromCytosine_Deaminase_fcy1__Saccharomyces_cerevisiae__AJW2 4849
  source 1..477: mol_type = other RNA

SEQ ID NO: 6053 - RNA, 477 nt, synthetic construct; identical to SEQ ID NO: 5389
  misc_feature 1..477: note = derived and/or modified sequence opt3 fromCytosine_Deaminase_fcy1__Saccharomyces_cerevisiae__AJW2 4849
  source 1..477: mol_type = other RNA

SEQ ID NO: 6054 - RNA, 477 nt, synthetic construct; identical to SEQ ID NO: 5390
  misc_feature 1..477: note = derived and/or modified sequence opt4 fromCytosine_Deaminase_fcy1__Saccharomyces_cerevisiae__AJW2 4849
  source 1..477: mol_type = other RNA

SEQ ID NO: 6055 - RNA, 477 nt, synthetic construct; identical to SEQ ID NO: 5391
  misc_feature 1..477: note = derived and/or modified sequence opt5 fromCytosine_Deaminase_fcy1__Saccharomyces_cerevisiae__AJW2 4849
  source 1..477: mol_type = other RNA

SEQ ID NO: 6056 - RNA, 477 nt, synthetic construct
  misc_feature 1..477: note = derived and/or modified sequence opt6 fromCytosine_Deaminase_fcy1__Saccharomyces_cerevisiae__AJW2 4849
  source 1..477: mol_type = other RNA
atggtaacaggaggaatggcaagtaaatgggatcaaaaaggaatggacatagcatatgaagaagcagcactaggatataaagaaggaggagtaccaataggaggatgcctaataaataataaagacggaagtgtattaggaagaggacataatatgagatttcaaaaaggaagtgcaacattacacggagaaataagtacattagaaaactgtggaagactagaaggaaaagtatataaagatacaacattatatacaacattaagtccatgtgatatgtgcacaggagcaataataatgtatggaataccaagatgtgtagtaggagaaaatgtaaattttaaaagcaaaggagaaaaatatctacaaacaagaggacatgaagtagtagtagtagatgacgaaagatgtaaaaaaataatgaaacaatttatagatgaaagaccacaagattggtttgaagatataggagaataa

SEQ ID NO: 6057 - protein, 158 aa, synthetic construct; identical to SEQ ID NO: 5385
  REGION 1..158: note Cytosine_Deaminase_fcy1__Saccharomyces_cerevisiae__A0A0D4ZM X9

SEQ ID NO: 6058 - RNA, 477 nt, synthetic construct; identical to SEQ ID NO: 5386
  misc_feature 1..477: note Cytosine_Deaminase_fcy1__Saccharomyces_cerevisiae__AJW25291
  source 1..477: mol_type = other RNA

SEQ ID NO: 6059 - RNA, 477 nt, synthetic construct; identical to SEQ ID NO: 5387
  misc_feature 1..477: note = derived and/or modified sequence opt1 fromCytosine_Deaminase_fcy1__Saccharomyces_cerevisiae__AJW2 5291
  source 1..477: mol_type = other RNA

SEQ ID NO: 6060 - RNA, 477 nt, synthetic construct; identical to SEQ ID NO: 5388
  misc_feature 1..477: note = derived and/or modified sequence opt2 fromCytosine_Deaminase_fcy1__Saccharomyces_cerevisiae__AJW2 5291
  source 1..477: mol_type = other RNA

SEQ ID NO: 6061 - RNA, 477 nt, synthetic construct; identical to SEQ ID NO: 5389
  misc_feature 1..477: note = derived and/or modified sequence opt3 fromCytosine_Deaminase_fcy1__Saccharomyces_cerevisiae__AJW2 5291
  source 1..477: mol_type = other RNA

SEQ ID NO: 6062 - RNA, 477 nt, synthetic construct; identical to SEQ ID NO: 5390
  misc_feature 1..477: note = derived and/or modified sequence opt4 fromCytosine_Deaminase_fcy1__Saccharomyces_cerevisiae__AJW2 5291
  source 1..477: mol_type = other RNA

SEQ ID NO: 6063 - RNA, 477 nt, synthetic construct; identical to SEQ ID NO: 5391
  misc_feature 1..477: note = derived and/or modified sequence opt5 fromCytosine_Deaminase_fcy1__Saccharomyces_cerevisiae__AJW2 5291
  source 1..477: mol_type = other RNA

SEQ ID NO: 6064 - RNA, 477 nt, synthetic construct
  misc_feature 1..477: note = derived and/or modified sequence opt6 fromCytosine_Deaminase_fcy1__Saccharomyces_cerevisiae__AJW2 5291
  source 1..477: mol_type = other RNA
atggtaacaggagggatggcaagtaaatgggaccaaaaaggaatggatatagcatatgaagaagcagcattaggatataaagaaggaggagtaccaataggaggatgtttaataaataataaagatggaagtgtattaggaagaggacataatatgagatttcaaaaaggaagtgcgacattacatggagaaataagtacattagaaaattgtggaagactagaaggaaaagtatataaagatacaacactatatacaacattaagtccatgtgacatgtgcacaggagcaataataatgtatggaataccaaggtgtgtagtaggagaaaatgtaaattttaaaagtaaaggagaaaaatatttacaaacaagaggacatgaagtagtagtagtagatgatgaaagatgtaaaaaaataatgaaacaatttatagatgaaagaccacaagattggtttgaagatataggagaataa

SEQ ID NO: 6065 - protein, 158 aa, synthetic construct; identical to SEQ ID NO: 5385
  REGION 1..158: note Cytosine_Deaminase_fcy1__Saccharomyces_cerevisiae__A0A0D4ZP 21

SEQ ID NO: 6066 - RNA, 477 nt, synthetic construct; identical to SEQ ID NO: 5418
  misc_feature 1..477: note Cytosine_Deaminase_fcy1__Saccharomyces_cerevisiae__AJW25697
  source 1..477: mol_type = other RNA

SEQ ID NO: 6067 - RNA, 477 nt, synthetic construct; identical to SEQ ID NO: 5387
  misc_feature 1..477: note = derived and/or modified sequence opt1 fromCytosine_Deaminase_fcy1__Saccharomyces_cerevisiae__AJW2 5697
  source 1..477: mol_type = other RNA

SEQ ID NO: 6068 - RNA, 477 nt, synthetic construct; identical to SEQ ID NO: 5388
  misc_feature 1..477: note = derived and/or modified sequence opt2 fromCytosine_Deaminase_fcy1__Saccharomyces_cerevisiae__AJW2 5697
  source 1..477: mol_type = other RNA

SEQ ID NO: 6069 - RNA, 477 nt, synthetic construct; identical to SEQ ID NO: 5389
  misc_feature 1..477: note = derived and/or modified sequence opt3 fromCytosine_Deaminase_fcy1__Saccharomyces_cerevisiae__AJW2 5697
  source 1..477: mol_type = other RNA

SEQ ID NO: 6070 - RNA, 477 nt, synthetic construct; identical to SEQ ID NO: 5390
  misc_feature 1..477: note = derived and/or modified sequence opt4 fromCytosine_Deaminase_fcy1__Saccharomyces_cerevisiae__AJW2 5697
  source 1..477: mol_type = other RNA

SEQ ID NO: 6071 - RNA, 477 nt, synthetic construct; identical to SEQ ID NO: 5391
  misc_feature 1..477: note = derived and/or modified sequence opt5 fromCytosine_Deaminase_fcy1__Saccharomyces_cerevisiae__AJW2 5697
  source 1..477: mol_type = other RNA

SEQ ID NO: 6072 - RNA, 477 nt, synthetic construct
  misc_feature 1..477: note = derived and/or modified sequence opt6 fromCytosine_Deaminase_fcy1__Saccharomyces_cerevisiae__AJW2 5697
  source 1..477: mol_type = other RNA
atggtaacaggaggaatggcaagtaaatgggatcaaaaaggaatggatatagcatatgaagaagcagcattaggatataaagaaggaggagtaccgataggaggatgtttaataaataataaagatggaagtgtattaggaagagggcacaatatgaggtttcaaaaaggaagtgcaacattacatggagaaataagtacactagaaaattgtgggagactagaaggaaaagtatataaagatacaacattatatacaacattaagtccatgtgatatgtgtacaggagcaataataatgtatggaataccaagatgtgtagtaggagaaaatgtaaattttaaaagtaaaggagaaaaatatttacaaacaagaggacatgaagtagtagtagtagatgatgaaagatgtaaaaaaataatgaaacaatttatagatgaaagaccacaagattggtttgaagatataggagaataa

SEQ ID NO: 6073 - protein, 158 aa, synthetic construct; identical to SEQ ID NO: 5385
  REGION 1..158: note Cytosine_Deaminase_fcy1__Saccharomyces_cerevisiae__A0A0D4ZQ 62

SEQ ID NO: 6074 - RNA, 477 nt, synthetic construct; identical to SEQ ID NO: 5386
  misc_feature 1..477: note Cytosine_Deaminase_fcy1__Saccharomyces_cerevisiae__AJW26215
  source 1..477: mol_type = other RNA

SEQ ID NO: 6075 - RNA, 477 nt, synthetic construct; identical to SEQ ID NO: 5387
  misc_feature 1..477: note = derived and/or modified sequence opt1 fromCytosine_Deaminase_fcy1__Saccharomyces_cerevisiae__AJW2 6215
  source 1..477: mol_type = other RNA

SEQ ID NO: 6076 - RNA, 477 nt, synthetic construct; identical to SEQ ID NO: 5388
  misc_feature 1..477: note = derived and/or modified sequence opt2 fromCytosine_Deaminase_fcy1__Saccharomyces_cerevisiae__AJW2 6215
  source 1..477: mol_type = other RNA

SEQ ID NO: 6077 - RNA, 477 nt, synthetic construct; identical to SEQ ID NO: 5389
  misc_feature 1..477: note = derived and/or modified sequence opt3 fromCytosine_Deaminase_fcy1__Saccharomyces_cerevisiae__AJW2 6215
  source 1..477: mol_type = other RNA

SEQ ID NO: 6078 - RNA, 477 nt, synthetic construct; identical to SEQ ID NO: 5390
  misc_feature 1..477: note = derived and/or modified sequence opt4 fromCytosine_Deaminase_fcy1__Saccharomyces_cerevisiae__AJW2 6215
  source 1..477: mol_type = other RNA

SEQ ID NO: 6079 - RNA, 477 nt, synthetic construct; identical to SEQ ID NO: 5391
  misc_feature 1..477: note = derived and/or modified sequence opt5 fromCytosine_Deaminase_fcy1__Saccharomyces_cerevisiae__AJW2 6215
  source 1..477: mol_type = other RNA

SEQ ID NO: 6080 - RNA, 477 nt, synthetic construct
  misc_feature 1..477: note = derived and/or modified sequence opt6 fromCytosine_Deaminase_fcy1__Saccharomyces_cerevisiae__AJW2 6215
  source 1..477: mol_type = other RNA
atggtaacaggaggaatggcaagtaaatgggatcaaaaaggaatggatatagcatatgaagaagcagcattaggatataaagaaggaggggtaccaataggaggatgtttaataaataataaagatggaagtgtattaggaagaggacataatatgagatttcaaaaaggaagtgcaacattacatggagaaataagtacattagaaaattgtggaagattagaaggaaaagtatataaagatacaacattatatacaacattaagtccatgtgatatgtgtacaggagcaataataatgtatggaataccaagatgtgtagtaggagaaaatgtaaattttaaaagcaaaggagagaaatatttacaaacaagaggacatgaagtagtagtagtagatgatgaaagatgtaaaaaaataatgaaacaatttatagatgaaagaccacaagattggtttgaagatataggagaataa

SEQ ID NO: 6081 - protein, 158 aa, synthetic construct; identical to SEQ ID NO: 5385
  REGION 1..158: note Cytosine_Deaminase_fcy1__Saccharomyces_cerevisiae__A0A0D4ZQ 92

SEQ ID NO: 6082 - RNA, 477 nt, synthetic construct; identical to SEQ ID NO: 5386
  misc_feature 1..477: note Cytosine_Deaminase_fcy1__Saccharomyces_cerevisiae__AJW25948
  source 1..477: mol_type = other RNA

SEQ ID NO: 6083 - RNA, 477 nt, synthetic construct; identical to SEQ ID NO: 5387
  misc_feature 1..477: note = derived and/or modified sequence opt1 fromCytosine_Deaminase_fcy1__Saccharomyces_cerevisiae__AJW2 5948
  source 1..477: mol_type = other RNA

SEQ ID NO: 6084 - RNA, 477 nt, synthetic construct; identical to SEQ ID NO: 5388
  misc_feature 1..477: note = derived and/or modified sequence opt2 fromCytosine_Deaminase_fcy1__Saccharomyces_cerevisiae__AJW2 5948
  source 1..477: mol_type = other RNA

SEQ ID NO: 6085 - RNA, 477 nt, synthetic construct; identical to SEQ ID NO: 5389
  misc_feature 1..477: note = derived and/or modified sequence opt3 fromCytosine_Deaminase_fcy1__Saccharomyces_cerevisiae__AJW2 5948
  source 1..477: mol_type = other RNA

SEQ ID NO: 6086 - RNA, 477 nt, synthetic construct; identical to SEQ ID NO: 5390
  misc_feature 1..477: note = derived and/or modified sequence opt4 fromCytosine_Deaminase_fcy1__Saccharomyces_cerevisiae__AJW2 5948
  source 1..477: mol_type = other RNA

SEQ ID NO: 6087 - RNA, 477 nt, synthetic construct; identical to SEQ ID NO: 5391
  misc_feature 1..477: note = derived and/or modified sequence opt5 fromCytosine_Deaminase_fcy1__Saccharomyces_cerevisiae__AJW2 5948
  source 1..477: mol_type = other RNA

SEQ ID NO: 6088 - RNA, 477 nt, synthetic construct
  misc_feature 1..477: note = derived and/or modified sequence opt6 fromCytosine_Deaminase_fcy1__Saccharomyces_cerevisiae__AJW2 5948
  source 1..477: mol_type = other RNA
atggtaacaggaggaatggcaagtaaatgggatcaaaaaggaatggatatagcatatgaagaagcagcattaggatataaagaaggaggagtaccaataggaggatgcttaataaataataaagacggaagtgtattaggaagaggacataatatgagatttcaaaaaggaagtgcaacactacatggagaaataagtacattagaaaattgtggaagattagaaggaaaagtatataaagatacaacactatatacaacattaagtccatgtgatatgtgcacaggagcaataataatgtatggaataccaagatgtgtagtaggagaaaatgtaaattttaaaagtaaaggagaaaaatatttacaaacaagaggacatgaagtagtagtagtagatgatgaaagatgtaaaaaaataatgaaacaatttatagatgaaagaccacaagattggtttgaagatataggagaataa

SEQ ID NO: 6089 - protein, 158 aa, synthetic construct; identical to SEQ ID NO: 5385
  REGION 1..158: note Cytosine_Deaminase_fcy1__Saccharomyces_cerevisiae__A0A0D4ZS 31

SEQ ID NO: 6090 - RNA, 477 nt, synthetic construct; identical to SEQ ID NO: 5386
  misc_feature 1..477: note Cytosine_Deaminase_fcy1__Saccharomyces_cerevisiae__AJW26880
  source 1..477: mol_type = other RNA

SEQ ID NO: 6091 - RNA, 477 nt, synthetic construct; identical to SEQ ID NO: 5387
  misc_feature 1..477: note = derived and/or modified sequence opt1 fromCytosine_Deaminase_fcy1__Saccharomyces_cerevisiae__AJW2 6880
  source 1..477: mol_type = other RNA

SEQ ID NO: 6092 - RNA, 477 nt, synthetic construct; identical to SEQ ID NO: 5388
  misc_feature 1..477: note = derived and/or modified sequence opt2 fromCytosine_Deaminase_fcy1__Saccharomyces_cerevisiae__AJW2 6880
  source 1..477: mol_type = other RNA

SEQ ID NO: 6093 - RNA, 477 nt, synthetic construct; identical to SEQ ID NO: 5389
  misc_feature 1..477: note = derived and/or modified sequence opt3 fromCytosine_Deaminase_fcy1__Saccharomyces_cerevisiae__AJW2 6880
  source 1..477: mol_type = other RNA

SEQ ID NO: 6094 - RNA, 477 nt, synthetic construct; identical to SEQ ID NO: 5390
  misc_feature 1..477: note = derived and/or modified sequence opt4 fromCytosine_Deaminase_fcy1__Saccharomyces_cerevisiae__AJW2 6880
  source 1..477: mol_type = other RNA

SEQ ID NO: 6095 - RNA, 477 nt, synthetic construct; identical to SEQ ID NO: 5391
  misc_feature 1..477: note = derived and/or modified sequence opt5 fromCytosine_Deaminase_fcy1__Saccharomyces_cerevisiae__AJW2 6880
  source 1..477: mol_type = other RNA

SEQ ID NO: 6096 - RNA, 477 nt, synthetic construct
  misc_feature 1..477: note = derived and/or modified sequence opt6 fromCytosine_Deaminase_fcy1__Saccharomyces_cerevisiae__AJW2 6880
  source 1..477: mol_type = other RNA
atggtaacaggaggaatggcaagtaaatgggatcaaaaaggaatggacatagcatatgaagaagcagcattaggatacaaagaagggggagtaccaataggaggatgcttaataaataataaagacggaagtgtattaggaagaggacataatatgagatttcaaaaaggaagtgcaacattacacggagaaataagcacattagaaaactgtggaagactagaaggaaaagtatataaagatacaacattatatacaacattaagtccatgtgacatgtgcacaggagcaataataatgtatggaataccaagatgtgtagtaggagaaaatgtaaattttaaaagtaaaggagaaaaatatctacaaacaaggggacatgaagtagtagtagtagatgacgaaagatgtaaaaaaataatgaaacaatttatagatgaaagaccacaagattggtttgaagatataggagaataa

SEQ ID NO: 6097 - protein, 158 aa, synthetic construct; identical to SEQ ID NO: 5385
  REGION 1..158: note Cytosine_Deaminase_fcy1__Saccharomyces_cerevisiae__A0A0D4ZS 87

SEQ ID NO: 6098 - RNA, 477 nt, synthetic construct; identical to SEQ ID NO: 5386
  misc_feature 1..477: note Cytosine_Deaminase_fcy1__Saccharomyces_cerevisiae__AJW26613
  source 1..477: mol_type = other RNA

SEQ ID NO: 6099 - RNA, 477 nt, synthetic construct; identical to SEQ ID NO: 5387
  misc_feature 1..477: note = derived and/or modified sequence opt1 fromCytosine_Deaminase_fcy1__Saccharomyces_cerevisiae__AJW2 6613
  source 1..477: mol_type = other RNA

SEQ ID NO: 6100 - RNA, 477 nt, synthetic construct; identical to SEQ ID NO: 5388
  misc_feature 1..477: note = derived and/or modified sequence opt2 fromCytosine_Deaminase_fcy1__Saccharomyces_cerevisiae__AJW2 6613
  source 1..477: mol_type = other RNA

SEQ ID NO: 6101 - RNA, 477 nt, synthetic construct; identical to SEQ ID NO: 5389
  misc_feature 1..477: note = derived and/or modified sequence opt3 fromCytosine_Deaminase_fcy1__Saccharomyces_cerevisiae__AJW2 6613
  source 1..477: mol_type = other RNA

SEQ ID NO: 6102 - RNA, 477 nt, synthetic construct; identical to SEQ ID NO: 5390
  misc_feature 1..477: note = derived and/or modified sequence opt4 fromCytosine_Deaminase_fcy1__Saccharomyces_cerevisiae__AJW2 6613
  source 1..477: mol_type = other RNA

SEQ ID NO: 6103 - RNA, 477 nt, synthetic construct; identical to SEQ ID NO: 5391
  misc_feature 1..477: note = derived and/or modified sequence opt5 fromCytosine_Deaminase_fcy1__Saccharomyces_cerevisiae__AJW2 6613
  source 1..477: mol_type = other RNA

SEQ ID NO: 6104 - RNA, 477 nt, synthetic construct
  misc_feature 1..477: note = derived and/or modified sequence opt6 fromCytosine_Deaminase_fcy1__Saccharomyces_cerevisiae__AJW2 6613
  source 1..477: mol_type = other RNA
atggtaacaggaggaatggcaagtaaatgggatcaaaaaggaatggatatagcatatgaagaagcagcattaggatataaagaaggaggagtaccaataggaggatgcttaataaataataaagacggaagtgtactaggaagaggacataatatgagatttcaaaaaggaagcgcgacattacatggagaaataagtacattagaaaattgcggaaggttagaaggaaaagtatataaagatacaacattatatacaacattaagtccatgtgatatgtgtacaggagcaataataatgtatggaataccaagatgtgtagtaggagaaaatgtaaattttaaaagcaaaggagaaaaatatttacaaacaagaggacatgaagtagtagtagtagatgatgaaagatgtaaaaaaataatgaaacaatttatagatgaaagaccacaagattggtttgaagatataggagaataa

SEQ ID NO: 6105 - protein, 158 aa, synthetic construct; identical to SEQ ID NO: 5385
  REGION 1..158: note Cytosine_Deaminase_fcy1__Saccharomyces_cerevisiae__A0A0D4ZT S6

SEQ ID NO: 6106 - RNA, 477 nt, synthetic construct; identical to SEQ ID NO: 5386
  misc_feature 1..477: note Cytosine_Deaminase_fcy1__Saccharomyces_cerevisiae__AJW27148
  source 1..477: mol_type = other RNA

SEQ ID NO: 6107 - RNA, 477 nt, synthetic construct; identical to SEQ ID NO: 5387
  misc_feature 1..477: note = derived and/or modified sequence opt1 fromCytosine_Deaminase_fcy1__Saccharomyces_cerevisiae__AJW2 7148
  source 1..477: mol_type = other RNA

SEQ ID NO: 6108 - RNA, 477 nt, synthetic construct; identical to SEQ ID NO: 5388
  misc_feature 1..477: note = derived and/or modified sequence opt2 fromCytosine_Deaminase_fcy1__Saccharomyces_cerevisiae__AJW2 7148
  source 1..477: mol_type = other RNA

SEQ ID NO: 6109 - RNA, 477 nt, synthetic construct; identical to SEQ ID NO: 5389
  misc_feature 1..477: note = derived and/or modified sequence opt3 fromCytosine_Deaminase_fcy1__Saccharomyces_cerevisiae__AJW2 7148
  source 1..477: mol_type = other RNA

SEQ ID NO: 6110 - RNA, 477 nt, synthetic construct; identical to SEQ ID NO: 5390
  misc_feature 1..477: note = derived and/or modified sequence opt4 fromCytosine_Deaminase_fcy1__Saccharomyces_cerevisiae__AJW2 7148
  source 1..477: mol_type = other RNA

SEQ ID NO: 6111 - RNA, 477 nt, synthetic construct; identical to SEQ ID NO: 5391
  misc_feature 1..477: note = derived and/or modified sequence opt5 fromCytosine_Deaminase_fcy1__Saccharomyces_cerevisiae__AJW2 7148
  source 1..477: mol_type = other RNA

SEQ ID NO: 6112 - RNA, 477 nt, synthetic construct
  misc_feature 1..477: note = derived and/or modified sequence opt6 fromCytosine_Deaminase_fcy1__Saccharomyces_cerevisiae__AJW2 7148
  source 1..477: mol_type = other RNA
atggtaacaggaggaatggcaagtaaatgggatcaaaaaggaatggacatagcatatgaagaagcagcattaggatataaagaaggaggagtaccaataggaggatgcttaataaataataaagacggaagtgtattaggaagaggacataatatgagatttcaaaaaggaagtgcaacattacacggagaaataagtacattagaaaactgtggaagattagaaggaaaagtatataaagatacaacattatatacaacattaagtccatgtgacatgtgtacaggagcaataataatgtatggaataccaagatgtgtagtaggagaaaatgtaaattttaaaagtaaaggagaaaaatatttacaaacaagaggacatgaagtagtagtagtagatgacgaaagatgtaaaaaaataatgaaacaatttatagatgaaagaccacaagattggtttgaagatataggagaataa

SEQ ID NO: 6113 - protein, 158 aa, synthetic construct; identical to SEQ ID NO: 5385
  REGION 1..158: note Cytosine_Deaminase_fcy1__Saccharomyces_cerevisiae__A0A0D4ZU K0

SEQ ID NO: 6114 - RNA, 477 nt, synthetic construct; identical to SEQ ID NO: 5386
  misc_feature 1..477: note Cytosine_Deaminase_fcy1__Saccharomyces_cerevisiae__AJW27576
  source 1..477: mol_type = other RNA

SEQ ID NO: 6115 - RNA, 477 nt, synthetic construct; identical to SEQ ID NO: 5387
  misc_feature 1..477: note = derived and/or modified sequence opt1 fromCytosine_Deaminase_fcy1__Saccharomyces_cerevisiae__AJW2 7576
  source 1..477: mol_type = other RNA

SEQ ID NO: 6116 - RNA, 477 nt, synthetic construct; identical to SEQ ID NO: 5388
  misc_feature 1..477: note = derived and/or modified sequence opt2 fromCytosine_Deaminase_fcy1__Saccharomyces_cerevisiae__AJW2 7576
  source 1..477: mol_type = other RNA

SEQ ID NO: 6117 - RNA, 477 nt, synthetic construct; identical to SEQ ID NO: 5389
  misc_feature 1..477: note = derived and/or modified sequence opt3 fromCytosine_Deaminase_fcy1__Saccharomyces_cerevisiae__AJW2 7576
  source 1..477: mol_type = other RNA

SEQ ID NO: 6118 - RNA, 477 nt, synthetic construct; identical to SEQ ID NO: 5390
  misc_feature 1..477: note = derived and/or modified sequence opt4 fromCytosine_Deaminase_fcy1__Saccharomyces_cerevisiae__AJW2 7576
  source 1..477: mol_type = other RNA

SEQ ID NO: 6119 - RNA, 477 nt, synthetic construct; identical to SEQ ID NO: 5391
  misc_feature 1..477: note = derived and/or modified sequence opt5 fromCytosine_Deaminase_fcy1__Saccharomyces_cerevisiae__AJW2 7576
  source 1..477: mol_type = other RNA

SEQ ID NO: 6120 - RNA, 477 nt, synthetic construct
  misc_feature 1..477: note = derived and/or modified sequence opt6 fromCytosine_Deaminase_fcy1__Saccharomyces_cerevisiae__AJW2 7576
  source 1..477: mol_type = other RNA
atggtaacaggaggaatggcaagtaaatgggatcaaaaaggaatggatatagcatatgaagaagcagcattaggatataaagaaggaggagtaccaataggaggatgcttaataaataataaagacggaagtgtactaggaagaggacataatatgagatttcaaaaaggaagtgcaacattacacggagaaataagtacattagaaaactgtggaagattagaaggaaaagtatataaagatacaacattatatacaacattaagtccatgtgacatgtgcacaggagcaataataatgtatggaataccaagatgtgtagtaggagaaaatgtaaattttaaaagtaaaggagagaaatatttacaaacaagaggacatgaagtagtagtagtagatgatgaaagatgtaaaaaaataatgaaacaatttatagatgaaagaccacaagattggtttgaagatataggagaataa

SEQ ID NO: 6121 - protein, 158 aa, synthetic construct; identical to SEQ ID NO: 5385
  REGION 1..158: note Cytosine_Deaminase_fcy1__Saccharomyces_cerevisiae__A0A0D4ZV N6

SEQ ID NO: 6122 - RNA, 477 nt, synthetic construct; identical to SEQ ID NO: 5386
  misc_feature 1..477: note Cytosine_Deaminase_fcy1__Saccharomyces_cerevisiae__AJW27843
  source 1..477: mol_type = other RNA

SEQ ID NO: 6123 - RNA, 477 nt, synthetic construct; identical to SEQ ID NO: 5387
  misc_feature 1..477: note = derived and/or modified sequence opt1 fromCytosine_Deaminase_fcy1__Saccharomyces_cerevisiae__AJW2 7843
  source 1..477: mol_type = other RNA

SEQ ID NO: 6124 - RNA, 477 nt, synthetic construct; identical to SEQ ID NO: 5388
  misc_feature 1..477: note = derived and/or modified sequence opt2 fromCytosine_Deaminase_fcy1__Saccharomyces_cerevisiae__AJW2 7843
  source 1..477: mol_type = other RNA

SEQ ID NO: 6125 - RNA, 477 nt, synthetic construct; identical to SEQ ID NO: 5389
  misc_feature 1..477: note = derived and/or modified sequence opt3 fromCytosine_Deaminase_fcy1__Saccharomyces_cerevisiae__AJW2 7843
  source 1..477: mol_type = other RNA

SEQ ID NO: 6126 - RNA, 477 nt, synthetic construct; identical to SEQ ID NO: 5390
  misc_feature 1..477: note = derived and/or modified sequence opt4 fromCytosine_Deaminase_fcy1__Saccharomyces_cerevisiae__AJW2 7843
  source 1..477: mol_type = other RNA

SEQ ID NO: 6127 - RNA, 477 nt, synthetic construct; identical to SEQ ID NO: 5391
  misc_feature 1..477: note = derived and/or modified sequence opt5 fromCytosine_Deaminase_fcy1__Saccharomyces_cerevisiae__AJW2 7843
  source 1..477: mol_type = other RNA

SEQ ID NO: 6128 - RNA, 477 nt, synthetic construct
  misc_feature 1..477: note = derived and/or modified sequence opt6 fromCytosine_Deaminase_fcy1__Saccharomyces_cerevisiae__AJW2 7843
  source 1..477: mol_type = other RNA
atggtaacaggaggaatggcaagtaaatgggatcaaaaaggaatggatatagcatatgaagaagcagcattaggatataaagaaggaggagtaccaataggaggatgtttaataaataataaagatggaagtgtattaggaagagggcataatatgagatttcaaaaaggaagtgcaacattacatggagaaataagcacattagaaaattgtggaagattagaaggaaaagtatataaagatacaacattatatacaacattaagtccatgtgatatgtgtacaggagcaataataatgtatggaataccaagatgtgtagtaggagaaaatgtaaattttaaaagcaaaggagaaaaatatttacaaacaaggggacatgaagtagtagtagtagatgatgaaaggtgtaaaaaaataatgaaacaatttatagatgaaagaccacaagattggtttgaagatataggagaataa

SEQ ID NO: 6129 - protein, 158 aa, synthetic construct; identical to SEQ ID NO: 5385
  REGION 1..158: note Cytosine_Deaminase_fcy1__Saccharomyces_cerevisiae__A0A0D4ZW P2

SEQ ID NO: 6130 - RNA, 477 nt, synthetic construct; identical to SEQ ID NO: 5386
  misc_feature 1..477: note Cytosine_Deaminase_fcy1__Saccharomyces_cerevisiae__AJW28286
  source 1..477: mol_type = other RNA

SEQ ID NO: 6131 - RNA, 477 nt, synthetic construct; identical to SEQ ID NO: 5387
  misc_feature 1..477: note = derived and/or modified sequence opt1 fromCytosine_Deaminase_fcy1__Saccharomyces_cerevisiae__AJW2 8286
  source 1..477: mol_type = other RNA

SEQ ID NO: 6132 - RNA, 477 nt, synthetic construct; identical to SEQ ID NO: 5388
  misc_feature 1..477: note = derived and/or modified sequence opt2 fromCytosine_Deaminase_fcy1__Saccharomyces_cerevisiae__AJW2 8286
  source 1..477: mol_type = other RNA

SEQ ID NO: 6133 - RNA, 477 nt, synthetic construct; identical to SEQ ID NO: 5389
  misc_feature 1..477: note = derived and/or modified sequence opt3 fromCytosine_Deaminase_fcy1__Saccharomyces_cerevisiae__AJW2 8286
  source 1..477: mol_type = other RNA

SEQ ID NO: 6134 - RNA, 477 nt, synthetic construct; identical to SEQ ID NO: 5390
  misc_feature 1..477: note = derived and/or modified sequence opt4 fromCytosine_Deaminase_fcy1__Saccharomyces_cerevisiae__AJW2 8286
  source 1..477: mol_type = other RNA

SEQ ID NO: 6135 - RNA, 477 nt, synthetic construct; identical to SEQ ID NO: 5391
  misc_feature 1..477: note = derived and/or modified sequence opt5 fromCytosine_Deaminase_fcy1__Saccharomyces_cerevisiae__AJW2 8286
  source 1..477: mol_type = other RNA

SEQ ID NO: 6136 - RNA, 477 nt, synthetic construct
  misc_feature 1..477: note = derived and/or modified sequence opt6 fromCytosine_Deaminase_fcy1__Saccharomyces_cerevisiae__AJW2 8286
  source 1..477: mol_type = other RNA
atggtaacaggaggaatggcaagtaaatgggatcaaaaaggaatggatatagcatatgaagaagcagcactaggatataaagaaggaggagtaccaataggaggatgtttaataaataataaagatggaagcgtattaggaagaggacataatatgagatttcaaaaaggaagtgcaacattacatggagaaataagtacattagaaaattgtggaaggttagaaggaaaagtatataaagatacaacattatatacaacactaagtccatgtgatatgtgtacaggagcaataataatgtatggaataccaagatgtgtagtaggagaaaatgtaaattttaaaagcaaaggggaaaaatatttacaaacaagaggacatgaagtagtagtagtagatgatgaaagatgtaaaaaaataatgaaacaatttatagatgaaagaccacaagattggtttgaagatataggagaataa

SEQ ID NO: 6137 - protein, 158 aa, synthetic construct; identical to SEQ ID NO: 5385
  REGION 1..158: note Cytosine_Deaminase_fcy1__Saccharomyces_cerevisiae__A0A0D4ZX 07

SEQ ID NO: 6138 - RNA, 477 nt, synthetic construct; identical to SEQ ID NO: 5386
  misc_feature 1..477: note Cytosine_Deaminase_fcy1__Saccharomyces_cerevisiae__AJW28555
  source 1..477: mol_type = other RNA

SEQ ID NO: 6139 - RNA, 477 nt, synthetic construct; identical to SEQ ID NO: 5387
  misc_feature 1..477: note = derived and/or modified sequence opt1 fromCytosine_Deaminase_fcy1__Saccharomyces_cerevisiae__AJW2 8555
  source 1..477: mol_type = other RNA

SEQ ID NO: 6140 - RNA, 477 nt, synthetic construct; identical to SEQ ID NO: 5388
  misc_feature 1..477: note = derived and/or modified sequence opt2 fromCytosine_Deaminase_fcy1__Saccharomyces_cerevisiae__AJW2 8555
  source 1..477: mol_type = other RNA

SEQ ID NO: 6141 - RNA, 477 nt, synthetic construct; identical to SEQ ID NO: 5389
  misc_feature 1..477: note = derived and/or modified sequence opt3 fromCytosine_Deaminase_fcy1__Saccharomyces_cerevisiae__AJW2 8555
  source 1..477: mol_type = other RNA

SEQ ID NO: 6142 - RNA, 477 nt, synthetic construct; identical to SEQ ID NO: 5390
  misc_feature 1..477: note = derived and/or modified sequence opt4 fromCytosine_Deaminase_fcy1__Saccharomyces_cerevisiae__AJW2 8555
  source 1..477: mol_type = other RNA

SEQ ID NO: 6143 - RNA, 477 nt, synthetic construct; identical to SEQ ID NO: 5391
  misc_feature 1..477: note = derived and/or modified sequence opt5 fromCytosine_Deaminase_fcy1__Saccharomyces_cerevisiae__AJW2 8555
  source 1..477: mol_type = other RNA

SEQ ID NO: 6144 - RNA, 477 nt, synthetic construct
  misc_feature 1..477: note = derived and/or modified sequence opt6 fromCytosine_Deaminase_fcy1__Saccharomyces_cerevisiae__AJW2 8555
  source 1..477: mol_type = other RNA
atggtaacaggaggaatggcaagtaaatgggatcaaaaaggaatggacatagcatatgaagaagcagcattaggatataaagaaggaggagtaccaataggaggatgcttaataaataataaagacggaagtgtattaggaagaggacataatatgagatttcaaaaaggaagtgcaacattacacggagaaataagcacattagaaaactgtggaaggctagaaggaaaagtatataaagatacaacattatatacaacattaagtccatgtgacatgtgcacaggagcaataataatgtatggaataccaagatgtgtagtaggagaaaatgtaaattttaaaagtaaaggagaaaaatatttacaaacaagaggacatgaagtagtagtagtagatgacgaaagatgtaaaaaaataatgaaacaatttatagatgaaagaccacaagattggtttgaagatataggagaataa

SEQ ID NO: 6145 - protein, 158 aa, synthetic construct; identical to SEQ ID NO: 5385
  REGION 1..158: note Cytosine_Deaminase_fcy1__Saccharomyces_cerevisiae__Q12178

SEQ ID NO: 6146 - RNA, 477 nt, synthetic construct
  misc_feature 1..477: note Cytosine_Deaminase_fcy1__Saccharomyces_cerevisiae__AAB67713
  source 1..477: mol_type = other RNA
atggtgacagggggaatggcaagcaagtgggatcagaagggtatggacattgcctatgaggaggcggccttaggttacaaagagggtggtgttcctattggcggatgtcttatcaataacaaagacggaagtgttctcggtcgtggtcacaacatgagatttcaaaagggttccgccacactacatggtgagatctccactttggaaaactgtgggagattagagggcaaagtgtacaaagataccactttgtatacgacgctgtctccatgcgacatgtgtacaggtgccatcatcatgtatggtattccacgctgtgttgtcggtgagaacgttaatttcaaaagtaagggcgagaaatatttacaaactagaggtcacgaggttgttgttgttgacgatgagaggtgtaaaaagatcatgaaacaatttatcgatgaaagacctcaggattggtttgaagatattggtgagtag

SEQ ID NO: 6147 - RNA, 477 nt, synthetic construct; identical to SEQ ID NO: 5387
  misc_feature 1..477: note = derived and/or modified sequence opt1 fromCytosine_Deaminase_fcy1__Saccharomyces_cerevisiae__AAB6 7713
  source 1..477: mol_type = other RNA

SEQ ID NO: 6148 - RNA, 477 nt, synthetic construct; identical to SEQ ID NO: 5388
  misc_feature 1..477: note = derived and/or modified sequence opt2 fromCytosine_Deaminase_fcy1__Saccharomyces_cerevisiae__AAB6 7713
  source 1..477: mol_type = other RNA

SEQ ID NO: 6149 - RNA, 477 nt, synthetic construct; identical to SEQ ID NO: 5389
  misc_feature 1..477: note = derived and/or modified sequence opt3 fromCytosine_Deaminase_fcy1__Saccharomyces_cerevisiae__AAB6 7713
  source 1..477: mol_type = other RNA

SEQ ID NO: 6150 - RNA, 477 nt, synthetic construct; identical to SEQ ID NO: 5390
  misc_feature 1..477: note = derived and/or modified sequence opt4 fromCytosine_Deaminase_fcy1__Saccharomyces_cerevisiae__AAB6 7713
  source 1..477: mol_type = other RNA

SEQ ID NO: 6151 - RNA, 477 nt, synthetic construct; identical to SEQ ID NO: 5391
  misc_feature 1..477: note = derived and/or modified sequence opt5 fromCytosine_Deaminase_fcy1__Saccharomyces_cerevisiae__AAB6 7713
  source 1..477: mol_type = other RNA

SEQ ID NO: 6152 - RNA, 477 nt, synthetic construct
  misc_feature 1..477: note = derived and/or modified sequence opt6 fromCytosine_Deaminase_fcy1__Saccharomyces_cerevisiae__AAB6 7713
  source 1..477: mol_type = other RNA
atggtaacaggaggaatggcaagcaaatgggatcaaaaaggaatggacatagcatatgaagaagcagcgctaggatataaagaaggaggagtaccaataggaggatgcttaataaataacaaagacggaagcgtactaggaagaggacataatatgagattccaaaaaggaagtgcaacattacacggagaaataagcacactagaaaactgtggaagactagaaggaaaagtatataaagatacaacactatatacaacattatcaccatgtgacatgtgcacaggagcaataataatgtacggaataccaagatgtgtagtaggagaaaatgtaaatttcaaaagcaaaggagaaaaatatctacaaacaagaggacatgaagtagtagtagtagatgacgaaagatgtaaaaaaataatgaaacaatttatagacgaaagaccacaagattggtttgaagatataggagaataa

SEQ ID NO: 6153 - protein, 158 aa, synthetic construct; identical to SEQ ID NO: 5385
  REGION 1..158: note Cytosine_Deaminase_fcy1__Saccharomyces_cerevisiae__W7PK48

SEQ ID NO: 6154 - RNA, 477 nt, synthetic construct; identical to SEQ ID NO: 5386
  misc_feature 1..477: note Cytosine_Deaminase_fcy1__Saccharomyces_cerevisiae__EWG82851
  source 1..477: mol_type = other RNA

SEQ ID NO: 6155 - RNA, 477 nt, synthetic construct; identical to SEQ ID NO: 5387
  misc_feature 1..477: note = derived and/or modified sequence opt1 fromCytosine_Deaminase_fcy1__Saccharomyces_cerevisiae__EWG8 2851
  source 1..477: mol_type = other RNA

SEQ ID NO: 6156 - RNA, 477 nt, synthetic construct; identical to SEQ ID NO: 5388
  misc_feature 1..477: note = derived and/or modified sequence opt2 fromCytosine_Deaminase_fcy1__Saccharomyces_cerevisiae__EWG8 2851
  source 1..477: mol_type = other RNA

SEQ ID NO: 6157 - RNA, 477 nt, synthetic construct; identical to SEQ ID NO: 5389
  misc_feature 1..477: note = derived and/or modified sequence opt3 fromCytosine_Deaminase_fcy1__Saccharomyces_cerevisiae__EWG8 2851
  source 1..477: mol_type = other RNA

SEQ ID NO: 6158 - RNA, 477 nt, synthetic construct; identical to SEQ ID NO: 5390
  misc_feature 1..477: note = derived and/or modified sequence opt4 fromCytosine_Deaminase_fcy1__Saccharomyces_cerevisiae__EWG8 2851
  source 1..477: mol_type = other RNA

SEQ ID NO: 6159 - RNA, 477 nt, synthetic construct; identical to SEQ ID NO: 5391
  misc_feature 1..477: note = derived and/or modified sequence opt5 fromCytosine_Deaminase_fcy1__Saccharomyces_cerevisiae__EWG8 2851
  source 1..477: mol_type = other RNA

SEQ ID NO: 6160 - RNA, 477 nt, synthetic construct
  misc_feature 1..477: note = derived and/or modified sequence opt6 fromCytosine_Deaminase_fcy1__Saccharomyces_cerevisiae__EWG8 2851
  source 1..477: mol_type = other RNA
atggtaacaggaggaatggcaagtaaatgggatcaaaaaggaatggatatagcatatgaagaagcagcattaggatataaagaaggaggagtaccaataggaggatgtttaataaataataaagatggaagtgtattaggaaggggacataatatgagatttcaaaaaggaagtgcaacattacatggggaaataagtacattagaaaattgtggaagattagaaggaaaagtatataaagatacaacgttatatacaacattaagtccatgtgatatgtgtacaggagcaataataatgtatggaataccaagatgcgtagtaggagaaaatgtaaattttaaaagtaaaggagaaaaatatttacaaacaagaggacatgaagtagtagtagtagatgatgaaagatgtaaaaaaataatgaaacaatttatagatgaaagaccacaagattggtttgaagatataggagaataa

SEQ ID NO: 6161 - protein, 158 aa, synthetic construct; identical to SEQ ID NO: 5385
  REGION 1..158: note Cytosine_Deaminase_fcy1__Saccharomyces_cerevisiae__W7R647

SEQ ID NO: 6162 - RNA, 477 nt, synthetic construct; identical to SEQ ID NO: 5386
  misc_feature 1..477: note Cytosine_Deaminase_fcy1__Saccharomyces_cerevisiae__EWH15533
  source 1..477: mol_type = other RNA

SEQ ID NO: 6163 - RNA, 477 nt, synthetic construct; identical to SEQ ID NO: 5387
  misc_feature 1..477: note = derived and/or modified sequence opt1 fromCytosine_Deaminase_fcy1__Saccharomyces_cerevisiae__EWH1 5533
  source 1..477: mol_type = other RNA

SEQ ID NO: 6164 - RNA, 477 nt, synthetic construct; identical to SEQ ID NO: 5388
  misc_feature 1..477: note = derived and/or modified sequence opt2 fromCytosine_Deaminase_fcy1__Saccharomyces_cerevisiae__EWH1 5533
  source 1..477: mol_type = other RNA

SEQ ID NO: 6165 - RNA, 477 nt, synthetic construct; identical to SEQ ID NO: 5389
  misc_feature 1..477: note = derived and/or modified sequence opt3 fromCytosine_Deaminase_fcy1__Saccharomyces_cerevisiae__EWH1 5533
  source 1..477: mol_type = other RNA

SEQ ID NO: 6166 - RNA, 477 nt, synthetic construct; identical to SEQ ID NO: 5390
  misc_feature 1..477: note = derived and/or modified sequence opt4 fromCytosine_Deaminase_fcy1__Saccharomyces_cerevisiae__EWH1 5533
  source 1..477: mol_type = other RNA

SEQ ID NO: 6167 - RNA, 477 nt, synthetic construct; identical to SEQ ID NO: 5391
  misc_feature 1..477: note = derived and/or modified sequence opt5 fromCytosine_Deaminase_fcy1__Saccharomyces_cerevisiae__EWH1 5533
  source 1..477: mol_type = other RNA

SEQ ID NO: 6168 - RNA, 477 nt, synthetic construct
  misc_feature 1..477: note = derived and/or modified sequence opt6 fromCytosine_Deaminase_fcy1__Saccharomyces_cerevisiae__EWH1 5533
  source 1..477: mol_type = other RNA
atggtaacaggaggaatggcaagtaaatgggatcaaaaaggaatggacatagcatatgaagaagcagcattaggatataaagaaggaggagtaccaataggaggatgtttaataaataataaagacggaagtgtattaggaagaggacataatatgagatttcaaaaaggaagtgcaacattacacggagaaataagtacactagaaaactgtggaagactagaaggaaaagtatataaagatacaacattatatacaacattaagtccatgtgacatgtgcacaggagcaataataatgtatggaataccaagatgtgtagtaggagaaaatgtaaattttaaaagcaaaggagaaaaatatttacaaacaagaggacatgaagtagtagtagtagatgacgaaagatgtaaaaaaataatgaaacaatttatagatgaaagaccgcaagattggtttgaagatataggagaataa

SEQ ID NO: 6169 - protein, 260 aa, synthetic construct [sequence omitted]

SEQ ID NO: 6170 - RNA, 783 nt, synthetic construct
  misc_feature 1..783: note = Deoxy-cytidine_Kinase_dCK__Homo_sapiens__AAA35752
  source 1..783: mol_type = other RNA
atggccaccccgcccaagagaagctgcccgtctttctcagccagctctgaggggacccgcatcaagaaaatctccatcgaagggaacatcgctgcagggaagtcaacatttgtgaatatccttaaacaattgtgtgaagattgggaagtggttcctgaacctgttgccagatggtgcaatgttcaaagtactcaagatgaatttgaggaacttacaatgtctcagaaaaatggtgggaatgttcttcagatgatgtatgagaaacctgaacgatggtcttttaccttccaaacatatgcctgtctcagtcgaataagagctcagcttgcctctctgaatggcaagctcaaagatgcagagaaacctgtattattttttgaacgatctgtgtatagtgacaggtatatttttgcatctaatttgtatgaatctgaatgcatgaatgagacagagtggacaatttatcaagactggcatgactggatgaataaccaatttggccaaagccttgaattggatggaatcatttatcttcaagccactccagagacatgcttacatagaatatatttacggggaagaaatgaagagcaaggcattcctcttgaatatttagagaagcttcattataaacatgaaagctggctcctgcataggacactgaaaaccaacttcgattatcttcaagaggtgcctatcttaacactggatgttaatgaagactttaaagacaaatatgaaagtctggttgaaaaggtcaaagagtttttgagtactttgtga

SEQ ID NO: 6171 - RNA, 783 nt, synthetic construct
  misc_feature 1..783: note = derived and/or modified sequence opt1 fromDeoxy-cytidine_Kinase_dCK__Homo_sapiens__AAA35752
  source 1..783: mol_type = other RNA
atggccacgcccccgaagcgcagctgcccctccttcagcgcctccagcgagggcacccggatcaagaagatctccatcgaggggaacatcgcggccggcaagagcaccttcgtgaacatcctgaagcagctctgcgaggactgggaggtcgtgcccgagcccgtggcccgctggtgcaacgtccagtccacccaggacgagttcgaggagctgaccatgagccagaagaacgggggcaacgtgctgcagatgatgtacgagaagccggagcggtggtccttcaccttccagacgtacgcctgcctcagccgcatccgggcccagctggcgtccctgaacgggaagctcaaggacgccgagaagcccgtgctgttcttcgagcgcagcgtctactccgaccggtacatcttcgccagcaacctgtacgagtccgagtgcatgaacgagaccgagtggaccatctaccaggactggcacgactggatgaacaaccagttcggccagagcctcgagctggacggcatcatctacctgcaggccacccccgagacgtgcctccaccgcatctacctgcgggggcgcaacgaggagcagggcatccccctggagtacctcgagaagctgcactacaagcacgagtcctggctgctccaccggaccctgaagaccaacttcgactacctgcaggaggtgccgatcctcaccctggacgtgaacgaggacttcaaggacaagtacgagagcctggtcgagaaggtgaaggagttcctctccacgctgtga

SEQ ID NO: 6172 - RNA, 783 nt, synthetic construct
  misc_feature 1..783: note = derived and/or modified sequence opt2 fromDeoxy-cytidine_Kinase_dCK__Homo_sapiens__AAA35752
  source 1..783: mol_type = other RNA
atggccaccccccccaagcgctcctgcccctccttctccgcctcctccgagggcacccgcatcaagaagatctccatcgagggcaacatcgccgccggcaagtccaccttcgtcaacatcctcaagcagctctgcgaggactgggaggtcgtccccgagcccgtcgcccgctggtgcaacgtccagtccacccaggacgagttcgaggagctcaccatgtcccagaagaacggcggcaacgtcctccagatgatgtacgagaagcccgagcgctggtccttcaccttccagacctacgcctgcctctcccgcatccgcgcccagctcgcctccctcaacggcaagctcaaggacgccgagaagcccgtcctcttcttcgagcgctccgtctactccgaccgctacatcttcgcctccaacctctacgagtccgagtgcatgaacgagaccgagtggaccatctaccaggactggcacgactggatgaacaaccagttcggccagtccctcgagctcgacggcatcatctacctccaggccacccccgagacctgcctccaccgcatctacctccgcggccgcaacgaggagcagggcatccccctcgagtacctcgagaagctccactacaagcacgagtcctggctcctccaccgcaccctcaagaccaacttcgactacctccaggaggtccccatcctcaccctcgacgtcaacgaggacttcaaggacaagtacgagtccctcgtcgagaaggtcaaggagttcctctccaccctctga

SEQ ID NO: 6173 - RNA, 783 nt, synthetic construct
  misc_feature 1..783: note = derived and/or modified sequence opt3 fromDeoxy-cytidine_Kinase_dCK__Homo_sapiens__AAA35752
  source 1..783: mol_type = other RNA
atggccacaccccctaagagaagctgcccatccttctctgcttcaagtgagggcaccaggatcaaaaagattagcatagaagggaacatcgcagccggaaaatccacttttgtgaatattctgaagcagctctgtgaggactgggaagtcgttccggagcccgtggcgcggtggtgcaacgtacaatctacgcaggatgaatttgaggagcttaccatgtcgcagaaaaatggtggcaacgtgctgcagatgatgtacgaaaagcctgagcgctggtcattcacattccaaacttatgcttgtttgagccgaatccgtgcccagttagcaagtctgaatgggaagctaaaagacgccgaaaagccagtcctctttttcgagagatccgtgtactctgataggtatatttttgctagcaacctgtacgagtccgaatgcatgaatgagaccgaatggacaatctatcaggactggcacgattggatgaacaatcagttcggacaatcacttgagctggacggcataatctacttgcaggcaacccccgaaacttgtctccatcggatttatctgcgcggtagaaacgaggagcaggggatccctctggaatacctcgagaaattacactacaagcatgaaagttggctgcttcacaggacattgaaaaccaattttgattatctgcaggaggttccaattctaacgctcgacgtgaacgaagatttcaaggacaagtacgagagcctggtcgagaaagtgaaggaatttctttctactctgtga

SEQ ID NO: 6174 - RNA, 783 nt, synthetic construct
  misc_feature 1..783: note = derived and/or modified sequence opt4 fromDeoxy-cytidine_Kinase_dCK__Homo_sapiens__AAA35752
  source 1..783: mol_type = other RNA
atggccaccccccccaagagaagctgccccagcttcagcgccagcagcgagggcaccagaatcaagaagatcagcatcgagggcaacatcgccgccggcaagagcaccttcgtgaacatcctgaagcagctgtgcgaggactgggaggtggtgcccgagcccgtggccagatggtgcaacgtgcagagcacccaggacgagttcgaggagctgaccatgagccagaagaacggcggcaacgtgctgcagatgatgtacgagaagcccgagagatggagcttcaccttccagacctacgcctgcctgagcagaatcagagcccagctggccagcctgaacggcaagctgaaggacgccgagaagcccgtgctgttcttcgagagaagcgtgtacagcgacagatacatcttcgccagcaacctgtacgagagcgagtgcatgaacgagaccgagtggaccatctaccaggactggcacgactggatgaacaaccagttcggccagagcctggagctggacggcatcatctacctgcaggccacccccgagacctgcctgcacagaatctacctgagaggcagaaacgaggagcagggcatccccctggagtacctggagaagctgcactacaagcacgagagctggctgctgcacagaaccctgaagaccaacttcgactacctgcaggaggtgcccatcctgaccctggacgtgaacgaggacttcaaggacaagtacgagagcctggtggagaaggtgaaggagttcctgagcaccctgtga

SEQ ID NO: 6175 - RNA, 783 nt, synthetic construct
  misc_feature 1..783: note = derived and/or modified sequence opt5 fromDeoxy-cytidine_Kinase_dCK__Homo_sapiens__AAA35752
  source 1..783: mol_type = other RNA
atggccacaccccctaagagaagctgcccgtccttctctgctagctccgagggcacccggatcaaaaagatttctatcgaagggaacattgccgcgggaaaaagcacgtttgtgaatatcctgaagcagctctgtgaggactgggaagtcgttcccgagcctgtggctcgctggtgcaacgtgcaatccacccaggatgaatttgaggagctgacaatgtctcagaaaaatggcgggaacgtccttcagatgatgtacgaaaagcccgagagatggagcttcaccttccaaacatatgcctgtctgtcccggattcgcgcccagctcgctagcctgaatggaaaacttaaggacgccgaaaagcctgtgctgtttttcgagagatctgtttactccgatcggtatatctttgctagcaacctctacgagtctgaatgcatgaatgagaccgaatggacaatctatcaggactggcacgattggatgaacaatcagttcggccaatccctggagctggacgggattatctacctccaggccacccccgaaacgtgtctgcatcgcatttatcttagaggacggaacgaggagcagggcatccctctggaatacctcgagaaactgcactacaagcatgaaagctggcttctgcaccgcaccctcaaaacaaattttgattatctgcaggaggtgccgattctgaccctcgacgtcaacgaagatttcaaggacaagtacgagtctctggtggagaaagttaaggaatttctttccacactgtga

SEQ ID NO: 6176 - RNA, 783 nt, synthetic construct
  misc_feature 1..783: note = derived and/or modified sequence opt6 fromDeoxy-cytidine_Kinase_dCK__Homo_sapiens__AAA35752
  source 1..783: mol_type = other RNA
atggcaacaccaccaaaaagaagctgcccatcattctcagcatcatcagaaggcacaagaataaaaaaaataagtatagaaggaaatatagcagcaggaaaatcaacattcgtaaacatactaaaacaattatgcgaagactgggaagtagtaccagaaccagtagcaagatggtgcaacgtacaatcaacacaagatgaattcgaagaactaacaatgagccaaaaaaacggaggaaacgtcctacaaatgatgtacgaaaaaccagaaagatggtcattcacattccaaacatacgcatgcctatcaagaataagagcacaactagcatccctaaacggaaaactaaaagacgccgaaaaaccagtactattcttcgaaagatcagtatacagcgacagatacatattcgcatcaaacttatatgaaagcgaatgcatgaatgaaacagaatggacaatataccaagattggcacgactggatgaataaccaattcggacaatcactagaattagatggaataatatatttacaagcaacaccagaaacatgtctacacagaatatacctaagaggaagaaacgaagaacaaggaataccactagaatacttagaaaaattacactacaaacacgaatcatggctattacacagaacactaaaaacaaatttcgattacctacaagaagtaccaatactaacactagacgtaaacgaagacttcaaagacaaatacgaatcactagtagaaaaagtaaaagaattcttatcaacactataa

SEQ ID NO: 6177 - protein, 250 aa, synthetic construct
  REGION 1..250: note Deoxynucleoside_Kinase_dNK__Drosophila_melanogaster__Q540Z9
MAEAASCARKGTKYAEGTQPFTVLIEGNIGSGKTTYLNHFEKYKNDICLLTEPVEKWRNVNGVNLLELMYKDPKKWAMPFQSYVTLTMLQSHTAPTNKKLKIMERSIFSARYCFVENMRRNGSLEQGMYNTLEEWYKFIEESIHVQADLIIYLRTSPEVAYERIRQRARSEESCVPLKYLQELHELHEDWLIHQRRPQSCKVLVLDADLNLENIGTEYQRSESSIFDAISSNQQPSPVLVSPSKRQRVAR

SEQ ID NO: 6178 - RNA, 753 nt, synthetic construct
  misc_feature 1..753: note Deoxynucleoside_Kinase_dNK__Drosophila_melanogaster__AAM275 18
  source 1..753: mol_type = other RNA
atggcggaggcagcatcctgtgcccgaaaggggaccaagtacgccgagggcacccagcccttcaccgtcctcatcgagggcaacatcggcagcgggaagaccacgtatttgaaccacttcgagaagtacaagaacgacatttgcctgctgaccgagcccgtcgagaagtggcgcaacgtcaacggggtaaatctgctggagctgatgtacaaagatcccaagaagtgggccatgccctttcagagttatgtcacgctgaccatgctgcagtcgcacaccgccccaaccaacaagaagctaaaaataatggagcgctccatttttagcgctcgctattgcttcgtggagaacatgcgacgaaacggctcgctggagcagggcatgtacaatacgctggaggagtggtacaagttcatcgaagagtccattcacgtgcaggcggacctcatcatatatctgcgcacctcgccggaggtggcgtacgaacgcatccggcagcgggctcgttctgaggagagctgcgtgccgcttaagtaccttcaggagctgcatgagttgcacgaggactggttgatacaccagagacgaccgcagtcgtgcaaggtcctagtcctcgatgccgatctgaacctggaaaacattggcaccgagtaccagcgctcggagagcagcatattcgacgccatctcaagtaaccaacagccctcgccggttctggtgtcgcccagcaagcgccagagggtcgccagataa

SEQ ID NO: 6179 - RNA, 753 nt, synthetic construct
  misc_feature 1..753: note = derived and/or modified sequence opt1 fromDeoxynucleoside_Kinase_dNK__Drosophila_melanogaster__AA M27518
  source 1..753: mol_type = other RNA
atggccgaggccgcgagctgcgcccgcaagggcaccaagtacgccgaggggacccagcccttcacggtgctgatcgagggcaacatcgggtccggcaagaccacctacctcaaccacttcgagaagtacaagaacgacatctgcctgctgaccgagccggtcgagaagtggcggaacgtgaacggggtgaacctcctggagctgatgtacaaggaccccaagaagtgggccatgcccttccagagctacgtcacgctcaccatgctgcagtcccacaccgcccccaccaacaagaagctgaagatcatggagcgcagcatcttctccgcgcggtactgcttcgtggagaacatgcgccggaacggcagcctcgagcagggcatgtacaacacgctggaggagtggtacaagttcatcgaggagtccatccacgtgcaggccgacctgatcatctacctccgcaccagcccggaggtcgcctacgagcggatccgccagcgggcccgctccgaggagagctgcgtgcccctgaagtacctgcaggagctccacgagctgcacgaggactggctgatccaccagcggcgcccccagtcctgcaaggtgctcgtcctggacgcggacctgaacctcgagaacatcgggaccgagtaccagcggagcgagtccagcatcttcgacgccatctccagcaaccagcagccctccccggtgctggtgagcccctccaagcgccagcgggtcgcccgctga

SEQ ID NO: 6180 - RNA, 753 nt, synthetic construct
  misc_feature 1..753: note = derived and/or modified sequence opt2 fromDeoxynucleoside_Kinase_dNK__Drosophila_melanogaster__AA M27518
  source 1..753: mol_type = other RNA
atggccgaggccgcctcctgcgcccgcaagggcaccaagtacgccgagggcacccagcccttcaccgtcctcatcgagggcaacatcggctccggcaagaccacctacctcaaccacttcgagaagtacaagaacgacatctgcctcctcaccgagcccgtcgagaagtggcgcaacgtcaacggcgtcaacctcctcgagctcatgtacaaggaccccaagaagtgggccatgcccttccagtcctacgtcaccctcaccatgctccagtcccacaccgcccccaccaacaagaagctcaagatcatggagcgctccatcttctccgcccgctactgcttcgtcgagaacatgcgccgcaacggctccctcgagcagggcatgtacaacaccctcgaggagtggtacaagttcatcgaggagtccatccacgtccaggccgacctcatcatctacctccgcacctcccccgaggtcgcctacgagcgcatccgccagcgcgcccgctccgaggagtcctgcgtccccctcaagtacctccaggagctccacgagctccacgaggactggctcatccaccagcgccgcccccagtcctgcaaggtcctcgtcctcgacgccgacctcaacctcgagaacatcggcaccgagtaccagcgctccgagtcctccatcttcgacgccatctcctccaaccagcagccctcccccgtcctcgtctccccctccaagcgccagcgcgtcgcccgctga

SEQ ID NO: 6181 - RNA, 753 nt, synthetic construct
  misc_feature 1..753: note = derived and/or modified sequence opt3 fromDeoxynucleoside_Kinase_dNK__Drosophila_melanogaster__AA M27518
  source 1..753: mol_type = other RNA
atggccgaggctgcaagctgcgccagaaagggcaccaaatacgcggaagggacacagcccttcactgtgctgatcgagggaaacattggttccggcaagacgacctatctcaatcactttgaaaaatacaagaacgacatatgtcttctgacagagcctgtcgaaaaatggaggaatgttaacggggtgaatttgttagagctgatgtataaggatccaaagaaatgggctatgccgttccaatcttacgtaactctaaccatgctccagtcacatacagcccccaccaacaagaaactgaagatcatggagcggagtatttttagcgcacgctattgcttcgtggaaaatatgcgacgtaacggatcccttgagcagggcatgtacaatactctggaagagtggtataaatttatcgaggaatctattcacgtccaggccgacttgatcatatacctcagaacatcgcctgaggtggcttacgaaaggatccggcaacgcgcaagatcagaggaaagctgtgttccactgaagtatctgcaggagctccatgagttacacgaagattggctgattcatcagaggcggccccagagttgcaaggtgcttgtcttggacgccgatctgaacctagagaatatcggtaccgaataccaacgctccgagtctagcattttcgacgctatctcctcaaaccagcagcctagtccagtgctcgtaagcccctctaaacgacagagagttgccaggtga

SEQ ID NO: 6182 - RNA, 753 nt, synthetic construct
  misc_feature 1..753: note = derived and/or modified sequence opt4 fromDeoxynucleoside_Kinase_dNK__Drosophila_melanogaster__AA M27518
  source 1..753: mol_type = other RNA
atggccgaggccgccagctgcgccagaaagggcaccaagtacgccgagggcacccagcccttcaccgtgctgatcgagggcaacatcggcagcggcaagaccacctacctgaaccacttcgagaagtacaagaacgacatctgcctgctgaccgagcccgtggagaagtggagaaacgtgaacggcgtgaacctgctggagctgatgtacaaggaccccaagaagtgggccatgcccttccagagctacgtgaccctgaccatgctgcagagccacaccgcccccaccaacaagaagctgaagatcatggagagaagcatcttcagcgccagatactgcttcgtggagaacatgagaagaaacggcagcctggagcagggcatgtacaacaccctggaggagtggtacaagttcatcgaggagagcatccacgtgcaggccgacctgatcatctacctgagaaccagccccgaggtggcctacgagagaatcagacagagagccagaagcgaggagagctgcgtgcccctgaagtacctgcaggagctgcacgagctgcacgaggactggctgatccaccagagaagaccccagagctgcaaggtgctggtgctggacgccgacctgaacctggagaacatcggcaccgagtaccagagaagcgagagcagcatcttcgacgccatcagcagcaaccagcagcccagccccgtgctggtgagccccagcaagagacagagagtggccagatga

SEQ ID NO: 6183 - RNA, 753 nt, synthetic construct
  misc_feature 1..753: note = derived and/or modified sequence opt5 fromDeoxynucleoside_Kinase_dNK__Drosophila_melanogaster__AA M27518
  source 1..753: mol_type = other RNA
atggccgaggctgccagctgcgcgagaaagggcaccaaatacgctgaagggacacagcccttcacggtgctgatcgagggaaacattggctccgggaagaccacatatctcaatcactttgaaaaatacaagaacgacatctgtctgcttaccgagcctgtcgaaaaatggcggaatgttaacggagtgaatctgctcgagctgatgtataaggatccgaagaaatgggccatgcccttccaatcttacgtgacacttaccatgctgcagagccatacagcccctaccaacaagaaactcaagattatggagcgctccatcttttctgctagatattgcttcgtcgaaaatatgcggcgcaacggcagcctggagcaggggatgtacaatacgctggaagagtggtataaatttattgaggaatccatccacgtgcaggccgacctcatcatttacctgagaacctctcccgaggttgcttacgaacggatccgccaaagagcccggagcgaggaatcctgtgtgcctcttaagtatctgcaggagctccatgagctgcacgaagattggcttattcatcagcgcagaccccagagctgcaaggtcctggtgctcgacgcggatctgaacctggagaatatcggaacagaataccaacggtctgagtccagcattttcgacgccatctcttccaaccagcagcctagcccggttctcgtgtctccctccaaacgccagagagtcgctcggtga

SEQ ID NO: 6184 - RNA, 753 nt, synthetic construct
  misc_feature 1..753: note = derived and/or modified sequence opt6 fromDeoxynucleoside_Kinase_dNK__Drosophila_melanogaster__AA M27518
  source 1..753: mol_type = other RNA
atggcagaagcagcatcatgcgcaagaaaaggaacaaaatacgcagaaggcacacaaccattcacagtattaatagaaggaaacataggatcaggaaaaacaacatacctaaaccatttcgaaaaatacaaaaacgacatatgcctactaaccgaaccagtagaaaaatggagaaacgtaaacggagtaaacctactagaactaatgtacaaagacccaaaaaaatgggcaatgccattccaatcatacgtcacactaacaatgttacaatcacacaccgccccaacaaacaaaaaattaaaaataatggaaagatcaatattcagcgcaagatactgctttgtagaaaacatgagaagaaacggatcacttgaacaaggcatgtataacacactagaagaatggtacaaattcatcgaagaatcaatacatgtccaagccgacctaataatatatttaagaacctcaccagaagtagcatacgaaagaataagacaaagagcaagatctgaagaaagctgcgtaccattaaaatacctacaagaactacacgaattacacgaagactggctaatacaccaaagaagaccacaatcatgtaaagtactagtactagacgcagacttaaacctagaaaacataggaacagaataccaaagatcagaatcatcaatattcgacgcaatatcatcaaaccaacaaccatcaccagtactagtatcaccatcaaaaagacaaagagtcgccagataa

SEQ ID NO: 6185 - protein, 250 aa, synthetic construct; identical to SEQ ID NO: 6177
  REGION 1..250: note Deoxynucleoside_Kinase_dNK__Drosophila_melanogaster__Q9XZT6

SEQ ID NO: 6186 - RNA, 753 nt, synthetic construct; identical to SEQ ID NO: 6178
  misc_feature 1..753: note Deoxynucleoside_Kinase_dNK__Drosophila_melanogaster__AAD473 55
  source 1..753: mol_type = other RNA

SEQ ID NO: 6187 - RNA, 753 nt, synthetic construct; identical to SEQ ID NO: 6179
  misc_feature 1..753: note = derived and/or modified sequence opt1 fromDeoxynucleoside_Kinase_dNK__Drosophila_melanogaster__AA D47355
  source 1..753: mol_type = other RNA

SEQ ID NO: 6188 - RNA, 753 nt, synthetic construct; identical to SEQ ID NO: 6180
  misc_feature 1..753: note = derived and/or modified sequence opt2 fromDeoxynucleoside_Kinase_dNK__Drosophila_melanogaster__AA D47355
  source 1..753: mol_type = other RNA

SEQ ID NO: 6189 - RNA, 753 nt, synthetic construct; identical to SEQ ID NO: 6181
  misc_feature 1..753: note = derived and/or modified sequence opt3 fromDeoxynucleoside_Kinase_dNK__Drosophila_melanogaster__AA D47355
  source 1..753: mol_type = other RNA

SEQ ID NO: 6190 - RNA, 753 nt, synthetic construct; identical to SEQ ID NO: 6182
  misc_feature 1..753: note = derived and/or modified sequence opt4 fromDeoxynucleoside_Kinase_dNK__Drosophila_melanogaster__AA D47355
  source 1..753: mol_type = other RNA

SEQ ID NO: 6191 - RNA, 753 nt, synthetic construct; identical to SEQ ID NO: 6183
  misc_feature 1..753: note = derived and/or modified sequence opt5 fromDeoxynucleoside_Kinase_dNK__Drosophila_melanogaster__AA D47355
  source 1..753: mol_type = other RNA

SEQ ID NO: 6192 - RNA, 753 nt, synthetic construct
  misc_feature 1..753: note = derived and/or modified sequence opt6 fromDeoxynucleoside_Kinase_dNK__Drosophila_melanogaster__AA D47355
  source 1..753: mol_type = other RNA
atggcagaagcagcatcatgcgcaagaaaaggaactaaatacgcagaaggcacacaaccattcacagtattaatagaaggaaacataggaagcggaaaaacaacatacttaaaccacttcgaaaaatataaaaacgacatatgcctactaactgaaccagtagaaaaatggagaaacgtaaacggagtaaacttactagaactaatgtacaaagaccctaaaaaatgggcaatgccattccaatcatacgtaacactaacaatgctacaatcacatacagcaccaacaaacaaaaaactaaaaataatggaaagaagtatattctcagcaagatattgcttcgtagaaaacatgagaagaaacggaagcctagaacaaggaatgtacaacacattagaagaatggtacaaattcatagaagaatcaatacacgtacaagccgacctaataatatacctaagaacatcaccagaagtagcatacgaaagaataagacaaagagcaagaagcgaagaaagctgcgtaccattaaaatacctacaagaactacacgaactacacgaagactggctaatacaccaaagaagaccacaaagttgcaaagtattagtattagacgcagacctaaatctagaaaacataggaacagaatatcaaagatcagaatcaagtatattcgacgcaatatcatcaaaccaacaaccatcaccagtactagtatcaccctcaaaaagacaaagagtagcaagataa

SEQ ID NO: 6193 - protein, 239 aa, synthetic construct
  REGION 1..239: note Purine_Nucleoside_Phosphorylase_deoD__Escherichia_coli__A0A 023Z7B9
MATPHINAEMGDFADVVLMPGDPLRAKYIAETFLEDAREVNNVRGMLGFTGTYKGRKISVMGHGMGIPSCSIYTKELITDFGVKKIIRVGSCGAVLPHVKLRDVVIGMGACTDSKVNRIRFKDHDFAAIADFDMVRNAVDAAKALGIDARVGNLFSADLFYSPDGEMFDVMEKYGILGVEMEAAGIYGVAAEFGAKALTICTVSDHIRTHEQTTAAERQTTFNDMIKIALESVLLGDKE

SEQ ID NO: 6194 - RNA, 720 nt, synthetic construct
  misc_feature 1..720: note Purine_Nucleoside_Phosphorylase_deoD__Escherichia_coli__AHY 74112
  source 1..720: mol_type = other RNA
atggctaccccacacattaatgcagaaatgggcgatttcgctgacgtagttttgatgccaggcgacccgctgcgtgcgaagtatattgctgaaactttccttgaagatgcccgtgaagtgaacaacgttcgcggtatgctgggcttcaccggtacttacaaaggccgcaaaatttccgtaatgggtcacggtatgggtatcccgtcctgctccatctacaccaaagaactgatcaccgatttcggcgtgaagaaaattatccgcgtgggttcctgtggcgcagttctgccgcacgtaaaactgcgcgacgtcgttatcggtatgggtgcctgcaccgattccaaagttaaccgcatccgttttaaagaccatgactttgccgctatcgctgacttcgacatggtgcgtaacgcagtagatgcagctaaagcactgggcattgatgctcgcgtgggtaacctgttctccgctgacctgttctactctccggacggcgaaatgttcgacgtgatggaaaaatacggcattctcggcgtggaaatggaagcggctggtatctacggcgtcgctgcagaatttggcgcgaaagccctgaccatctgcaccgtatctgaccacatccgcactcacgagcagaccactgccgctgagcgtcagaccaccttcaacgacatgatcaaaatcgcactggaatccgttctgctgggcgataaagagtaa

SEQ ID NO: 6195 - RNA, 720 nt, synthetic construct
  misc_feature 1..720: note = derived and/or modified sequence opt1 fromPurine_Nucleoside_Phosphorylase_deoD__Escherichia_coli_ _AHY74112
  source 1..720: mol_type = other RNA
atggccacgccccacatcaacgccgagatgggcgacttcgcggacgtggtcctgatgccgggggaccccctccgcgccaagtacatcgccgagaccttcctggaggacgcccgggaggtgaacaacgtgcgcggcatgctggggttcaccggcacctacaaggggcggaagatcagcgtcatgggccacggcatggggatcccctcctgcagcatctacaccaaggagctcatcaccgacttcggcgtgaagaagatcatccgcgtggggtcctgcggcgccgtcctgccccacgtgaagctgcgggacgtggtcatcgggatgggcgcgtgcacggacagcaaggtgaaccgcatccggttcaaggaccacgacttcgccgccatcgccgacttcgacatggtgcgcaacgcggtcgacgccgccaaggccctcggcatcgacgcccgggtggggaacctgttctccgcggacctgttctacagcccggacggcgagatgttcgacgtgatggagaagtacgggatcctcggcgtcgagatggaggccgccggcatctacggggtggccgccgagttcggcgcgaaggccctgaccatctgcaccgtgtccgaccacatccgcacccacgagcagacgaccgccgccgagcggcagaccaccttcaacgacatgatcaagatcgccctggagagcgtcctcctgggggacaaggagtga

SEQ ID NO: 6196 - RNA, 720 nt, synthetic construct
  misc_feature 1..720: note = derived and/or modified sequence opt2 fromPurine_Nucleoside_Phosphorylase_deoD__Escherichia_coli_ _AHY74112
  source 1..720: mol_type = other RNA
atggccaccccccacatcaacgccgagatgggcgacttcgccgacgtcgtcctcatgcccggcgaccccctccgcgccaagtacatcgccgagaccttcctcgaggacgcccgcgaggtcaacaacgtccgcggcatgctcggcttcaccggcacctacaagggccgcaagatctccgtcatgggccacggcatgggcatcccctcctgctccatctacaccaaggagctcatcaccgacttcggcgtcaagaagatcatccgcgtcggctcctgcggcgccgtcctcccccacgtcaagctccgcgacgtcgtcatcggcatgggcgcctgcaccgactccaaggtcaaccgcatccgcttcaaggaccacgacttcgccgccatcgccgacttcgacatggtccgcaacgccgtcgacgccgccaaggccctcggcatcgacgcccgcgtcggcaacctcttctccgccgacctcttctactcccccgacggcgagatgttcgacgtcatggagaagtacggcatcctcggcgtcgagatggaggccgccggcatctacggcgtcgccgccgagttcggcgccaaggccctcaccatctgcaccgtctccgaccacatccgcacccacgagcagaccaccgccgccgagcgccagaccaccttcaacgacatgatcaagatcgccctcgagtccgtcctcctcggcgacaaggagtga

SEQ ID NO: 6197 - RNA, 720 nt, synthetic construct
  misc_feature 1..720: note = derived and/or modified sequence opt3 fromPurine_Nucleoside_Phosphorylase_deoD__Escherichia_coli_ _AHY74112
  source 1..720: mol_type = other RNA
atggccacaccccacatcaacgctgagatgggcgacttcgcagatgtggtcctgatgcctggggacccactcagagccaagtacattgcggaaacctttcttgaggatgctagggaagttaataacgtgcggggaatgctgggtttcactggcacgtataaagggcgcaagataagcgtaatgggacatggcatgggtatcccgtcctgctctatttacaccaaagagttgatcacagactttggggtgaagaaaattatccgagtcggatcatgtggcgccgtgttaccccacgttaagctgcgtgatgtggtcataggcatgggggcatgcactgacagtaaggtgaatagaatcaggttcaaagatcatgactttgccgctattgcagatttcgacatggtacggaacgccgttgatgctgccaaggcgctaggaatcgacgcacgcgtgggtaatctctttagcgccgatctgttctattcccctgacggcgaaatgtttgacgtcatggagaaatacgggattcttggagtggagatggaagctgccggcatctatggtgtggcagctgagttcggggccaaggcgctgaccatatgtacagtctctgatcacattagaacccatgaacagactacagccgcagagaggcaaaccacgtttaacgacatgatcaaaattgctttggagtcggttctcctgggagataaggaatga

SEQ ID NO: 6198 - RNA, 720 nt, synthetic construct
  misc_feature 1..720: note = derived and/or modified sequence opt4 fromPurine_Nucleoside_Phosphorylase_deoD__Escherichia_coli_ _AHY74112
  source 1..720: mol_type = other RNA
atggccaccccccacatcaacgccgagatgggcgacttcgccgacgtggtgctgatgcccggcgaccccctgagagccaagtacatcgccgagaccttcctggaggacgccagagaggtgaacaacgtgagaggcatgctgggcttcaccggcacctacaagggcagaaagatcagcgtgatgggccacggcatgggcatccccagctgcagcatctacaccaaggagctgatcaccgacttcggcgtgaagaagatcatcagagtgggcagctgcggcgccgtgctgccccacgtgaagctgagagacgtggtgatcggcatgggcgcctgcaccgacagcaaggtgaacagaatcagattcaaggaccacgacttcgccgccatcgccgacttcgacatggtgagaaacgccgtggacgccgccaaggccctgggcatcgacgccagagtgggcaacctgttcagcgccgacctgttctacagccccgacggcgagatgttcgacgtgatggagaagtacggcatcctgggcgtggagatggaggccgccggcatctacggcgtggccgccgagttcggcgccaaggccctgaccatctgcaccgtgagcgaccacatcagaacccacgagcagaccaccgccgccgagagacagaccaccttcaacgacatgatcaagatcgccctggagagcgtgctgctgggcgacaaggagtga

SEQ ID NO: 6199 - RNA, 720 nt, synthetic construct
  misc_feature 1..720: note = derived and/or modified sequence opt5 fromPurine_Nucleoside_Phosphorylase_deoD__Escherichia_coli_ _AHY74112
  source 1..720: mol_type = other RNA
atggccacaccccacatcaacgctgagatgggcgacttcgccgatgtggtcctgatgcctggggacccgctcagagcgaagtacattgctgaaacctttctggaggatgcccgggaagttaataacgtgcgcggaatgcttggcttcacggggacctataaaggaagaaagatcagcgtgatgggccatgggatgggcattccctcctgctctatctacacaaaagagctgattaccgactttggagtcaagaaaatcatccgggtgggcagctgtggggccgttctccctcacgtgaagctgcgcgatgtcgtgattggaatgggcgcttgcacagactccaaggttaatagaatccggttcaaagatcatgactttgccgctattgccgatttcgacatggtgcgcaacgcggtcgatgccgctaaggcccttgggatcgacgctagagtgggaaatctgttttctgccgatctcttctatagccccgacggcgaaatgtttgacgtgatggagaaatacgggattctgggagtcgagatggaagcggccggcatctatggcgttgctgccgagttcggggctaaggccctgaccatttgtacagtgtccgatcacatccggacccatgaacagacgaccgccgctgagcgccaaacaacctttaacgacatgatcaaaattgcgctcgagtctgtgctgcttggagataaggaatga

SEQ ID NO: 6200 - RNA, 720 nt, synthetic construct
  misc_feature 1..720: note = derived and/or modified sequence opt6 fromPurine_Nucleoside_Phosphorylase_deoD__Escherichia_coli_ _AHY74112
  source 1..720: mol_type = other RNA
atggcaacaccacatataaatgcagaaatgggggactttgcagatgtagtactaatgccaggggacccattaagagcaaaatacatagcagaaacatttttagaagacgcaagagaagtaaataacgtaagaggaatgttaggatttacaggaacctataaagggagaaaaatatcagtaatgggacatggaatgggcattccaagttgcagtatatatacaaaagaattaataacagactttggagtaaaaaaaataataagagtaggatcatgtggagcagtactaccacacgtaaaattaagagatgtagtaataggaatgggagcatgtacagatagcaaagtaaatagaataagatttaaagatcacgatttcgcagcaatagcagattttgatatggtacgaaatgccgtagacgcagccaaagcattaggaatagacgcaagagtgggaaatctttttagcgcagacttattttatagcccagacggagaaatgttcgatgtaatggaaaaatacggaatattaggagtagaaatggaagcagcagggatatatggagtagcagcagaatttggagcaaaagcactaacaatatgtaccgtaagcgaccacataagaacacacgaacaaacaacagcagcagaaagacaaacaacattcaatgacatgataaaaatagcactagaaagtgtactattaggagacaaagaataa

SEQ ID NO: 6201 - protein, 239 aa, synthetic construct
  REGION 1..239: note Purine_Nucleoside_Phosphorylase_deoD__Escherichia_coli__A0A 024KMI2
MATPHINAEMGDFADVVLMPGDPLRAKYIAETFLEDAREVNNVRGMLGFTGTYKGRKISVMGHGMGIPSCSIYTKELITDFGVKKIIRVGSCGAVLPHVKLRDVVIGMGACTDSKVNRIRFKDHDFAAIADFDMVRNAVDAAKALGVDARVGNLFSADLFYSPDGEMFDVMEKYGILGVEMEAAGIYGVAAEFGAKALTICTVSDHIRTHEQTTAAERQTTFNDMIKIALESVLLGDKE

SEQ ID NO: 6202 - RNA, 720 nt, synthetic construct
  misc_feature 1..720: note Purine_Nucleoside_Phosphorylase_deoD__Escherichia_coli__CDU 33019
  source 1..720: mol_type = other RNA
atggctaccccacacattaatgcagaaatgggcgatttcgctgacgtagttttgatgccaggcgacccgctgcgtgcgaagtatattgctgaaactttccttgaagatgcccgtgaagtgaacaacgttcgcggtatgctgggcttcaccggtacttacaaaggccgcaaaatttccgtaatgggtcacggtatgggtatcccgtcctgctccatctacaccaaagaactgatcaccgatttcggcgtgaagaaaattatccgcgtgggttcctgtggcgcagttctgccgcacgtaaaactgcgcgacgtcgttatcggtatgggtgcctgcaccgattccaaagttaaccgtatccgttttaaagaccatgactttgccgctatcgctgactttgacatggtgcgtaacgcggtagacgcggctaaagcactgggtgttgatgctcgcgtgggtaacctgttctccgctgacctgttctactctccggacggcgaaatgttcgacgtgatggaaaaatacggcatcctcggcgtggaaatggaagcggctggtatctacggcgtcgctgcagagtttggcgcgaaagccctgaccatctgcaccgtgtctgaccacatccgcactcacgagcagaccactgccgctgagcgtcagaccaccttcaacgacatgatcaaaatcgcactggaatccgttctgctgggcgataaagagtaa

SEQ ID NO: 6203 - RNA, 720 nt, synthetic construct
  misc_feature 1..720: note = derived and/or modified sequence opt1 fromPurine_Nucleoside_Phosphorylase_deoD__Escherichia_coli_ _CDU33019
  source 1..720: mol_type = other RNA
atggccacgccccacatcaacgccgagatgggcgacttcgcggacgtggtcctgatgccgggggaccccctccgcgccaagtacatcgccgagaccttcctggaggacgcccgggaggtgaacaacgtgcgcggcatgctggggttcaccggcacctacaaggggcggaagatcagcgtcatgggccacggcatggggatcccctcctgcagcatctacaccaaggagctcatcaccgacttcggcgtgaagaagatcatccgcgtggggtcctgcggcgccgtcctgccccacgtgaagctgcgggacgtggtcatcgggatgggcgcgtgcacggacagcaaggtgaaccgcatccggttcaaggaccacgacttcgccgccatcgccgacttcgacatggtgcgcaacgcggtcgacgccgccaaggccctcggcgtggacgcccgggtggggaacctgttctccgcggacctgttctacagcccggacggcgagatgttcgacgtcatggagaagtacgggatcctcggcgtggagatggaggccgccggcatctacggggtggccgccgagttcggcgcgaaggccctgaccatctgcaccgtctccgaccacatccgcacccacgagcagacgaccgccgccgagcggcagaccaccttcaacgacatgatcaagatcgccctggagagcgtgctcctgggggacaaggagtga

SEQ ID NO: 6204 - RNA, 720 nt, synthetic construct
  misc_feature 1..720: note = derived and/or modified sequence opt2 fromPurine_Nucleoside_Phosphorylase_deoD__Escherichia_coli_ _CDU33019
  source 1..720: mol_type = other RNA
atggccaccccccacatcaacgccgagatgggcgacttcgccgacgtcgtcctcatgcccggcgaccccctccgcgccaagtacatcgccgagaccttcctcgaggacgcccgcgaggtcaacaacgtccgcggcatgctcggcttcaccggcacctacaagggccgcaagatctccgtcatgggccacggcatgggcatcccctcctgctccatctacaccaaggagctcatcaccgacttcggcgtcaagaagatcatccgcgtcggctcctgcggcgccgtcctcccccacgtcaagctccgcgacgtcgtcatcggcatgggcgcctgcaccgactccaaggtcaaccgcatccgcttcaaggaccacgacttcgccgccatcgccgacttcgacatggtccgcaacgccgtcgacgccgccaaggccctcggcgtcgacgcccgcgtcggcaacctcttctccgccgacctcttctactcccccgacggcgagatgttcgacgtcatggagaagtacggcatcctcggcgtcgagatggaggccgccggcatctacggcgtcgccgccgagttcggcgccaaggccctcaccatctgcaccgtctccgaccacatccgcacccacgagcagaccaccgccgccgagcgccagaccaccttcaacgacatgatcaagatcgccctcgagtccgtcctcctcggcgacaaggagtga

SEQ ID NO: 6205 - RNA, 720 nt, synthetic construct
  misc_feature 1..720: note = derived and/or modified sequence opt3 fromPurine_Nucleoside_Phosphorylase_deoD__Escherichia_coli_ _CDU33019
  source 1..720: mol_type = other RNA
atggccacaccccacatcaacgctgagatgggcgacttcgcagatgtggtcctgatgcctggggacccactcagagccaagtacattgcggaaacctttcttgaggatgctagggaagttaataacgtgcggggaatgctgggtttcactggcacgtataaagggcgcaagataagcgtaatgggacatggcatgggtatcccgtcctgctctatttacaccaaagagttgatcacagactttggggtgaagaaaattatccgagtcggatcatgtggcgccgtgttaccccacgttaagctgcgtgatgtggtcataggcatgggggcatgcactgacagtaaggtgaatagaatcaggttcaaagatcatgactttgccgctattgcagatttcgacatggtacggaacgccgttgatgctgccaaggcgctaggagtggacgcacgcgtcggtaatctctttagcgccgatctgttctattcccctgacggcgaaatgtttgacgtgatggagaaatacgggatccttggagtggagatggaagctgccggcatttatggtgtcgcagctgagttcggggccaaggcgctgaccatctgtacagtttctgatcacataagaacccatgaacagactacagccgcagagaggcaaaccacgtttaacgacatgattaaaatcgctttggagtcggtgctcctgggagataaggaatga

SEQ ID NO: 6206 - RNA, 720 nt, synthetic construct
  misc_feature 1..720: note = derived and/or modified sequence opt4 fromPurine_Nucleoside_Phosphorylase_deoD__Escherichia_coli_ _CDU33019
  source 1..720: mol_type = other RNA
atggccaccccccacatcaacgccgagatgggcgacttcgccgacgtggtgctgatgcccggcgaccccctgagagccaagtacatcgccgagaccttcctggaggacgccagagaggtgaacaacgtgagaggcatgctgggcttcaccggcacctacaagggcagaaagatcagcgtgatgggccacggcatgggcatccccagctgcagcatctacaccaaggagctgatcaccgacttcggcgtgaagaagatcatcagagtgggcagctgcggcgccgtgctgccccacgtgaagctgagagacgtggtgatcggcatgggcgcctgcaccgacagcaaggtgaacagaatcagattcaaggaccacgacttcgccgccatcgccgacttcgacatggtgagaaacgccgtggacgccgccaaggccctgggcgtggacgccagagtgggcaacctgttcagcgccgacctgttctacagccccgacggcgagatgttcgacgtgatggagaagtacggcatcctgggcgtggagatggaggccgccggcatctacggcgtggccgccgagttcggcgccaaggccctgaccatctgcaccgtgagcgaccacatcagaacccacgagcagaccaccgccgccgagagacagaccaccttcaacgacatgatcaagatcgccctggagagcgtgctgctgggcgacaaggagtga

SEQ ID NO: 6207 - RNA, 720 nt, synthetic construct
  misc_feature 1..720: note = derived and/or modified sequence opt5 fromPurine_Nucleoside_Phosphorylase_deoD__Escherichia_coli_ _CDU33019
  source 1..720: mol_type = other RNA
atggccacaccccacatcaacgctgagatgggcgacttcgccgatgtggtcctgatgcctggggacccgctcagagcgaagtacattgctgaaacctttctggaggatgcccgggaagttaataacgtgcgcggaatgcttggcttcacggggacctataaaggaagaaagatcagcgtgatgggccatgggatgggcattccctcctgctctatctacacaaaagagctgattaccgactttggagtcaagaaaatcatccgggtgggcagctgtggggccgttctccctcacgtgaagctgcgcgatgtcgtgattggaatgggcgcttgcacagactccaaggttaatagaatccggttcaaagatcatgactttgccgctattgccgatttcgacatggtgcgcaacgcggtcgatgccgctaaggcccttggggtggacgctagagtgggaaatctgttttctgccgatctcttctatagccccgacggcgaaatgtttgacgtcatggagaaatacgggatcctgggagttgagatggaagcggccggcatttatggcgtggctgccgagttcggggctaaggccctgaccatctgtacagtgtccgatcacattcggacccatgaacagacgaccgccgctgagcgccaaacaacctttaacgacatgatcaaaatcgcgctcgagtctgtcctgcttggagataaggaatga

SEQ ID NO: 6208 - RNA, 720 nt, synthetic construct
  misc_feature 1..720: note = derived and/or modified sequence opt6 fromPurine_Nucleoside_Phosphorylase_deoD__Escherichia_coli_ _CDU33019
  source 1..720: mol_type = other RNA
atggcaacaccacatataaatgcagaaatgggagactttgcagatgtagtactaatgccaggagacccattaagagcaaaatatatagcagaaacattcctcgaagacgcaagagaagtaaataacgtaagagggatgttaggatttacagggacatataaaggaagaaaaataagtgtaatgggacatggtatgggaataccatcatgcagtatatataccaaagaattaataacggactttggagtaaaaaaaataataagagtaggatcatgcggggccgtactaccacatgtgaaattaagagatgtagtaataggaatgggggcatgtacagacagtaaagtaaataggataagatttaaagatcacgatttcgcagcaatagcagacttcgatatggtaagaaatgcagttgacgcagcaaaagcattaggagtagacgcaagagtgggaaatctattcagtgcagacttattctatagcccagacggagaaatgttcgatgtaatggaaaaatacgggatattaggagtggaaatggaagcagcaggaatatatggagtagcagcagaatttggagcaaaagcgttaacaatatgtacggtaagcgatcacataagaacacacgaacaaacaacagcagcagaaagacaaacaacattcaatgatatgataaaaatagcattagaaagtgtactattaggagataaagaatga

SEQ ID NO: 6209 - protein, 235 aa, synthetic construct
  REGION 1..235: note Purine_Nucleoside_Phosphorylase_deoD__Escherichia_coli__A0A 0E0SRY5
MTAHINAKLGDFAPTVIMPGDPLRAKFIAENYLQDHREVTNVRNMLGYTGFYSGQLISVMGHGMGIPSMTLYAHELVNDFDVKRIIRVGSLGATQRTIKMRDIILAVASGTDSVTNFKRSSGYFMASSAYFPLLQKAWSLAQEAGLEVKAGNVFSGDIYYDPDDNLIPALEKFGVLGIDMEVAGLYALAHQFGIEALAILTVSDHCLTGEETTAEERQLTFNNMIELALNTAVAI

SEQ ID NO: 6210 - RNA, 708 nt, synthetic construct
  misc_feature 1..708: note Purine_Nucleoside_Phosphorylase_deoD__Escherichia_coli__ACD 54493
  source 1..708: mol_type = other RNA
atgactgcacatataaatgctaaactaggcgattttgcaccaacagtaattatgccaggagatcctctaagggcgaaatttatagccgaaaactatctgcaggaccaccgtgaagtcacaaatgttcggaatatgttgggatacacgggattctattcagggcaactcatttctgtgatggggcacggaatgggaattccatcaatgacattatatgcccatgaactggttaatgattttgatgtaaaacggattattcgtgttggcagtcttggtgcaacacaacgtacaattaaaatgcgggatattattttagcggtcgcttccggaacagactctgtcactaattttaaacgtagttcgggttactttatggcgtcctccgcatatttccccttattacaaaaagcatggtcattagctcaggaagccggtttagaggtaaaagctggcaatgtatttagcggcgacatttattacgatccggatgataatttaattccggcacttgagaaattcggagtgctaggtatcgatatggaagtcgcagggttatatgcacttgcacatcaattcggtattgaagcgttggcaattttaacggtatccgatcactgtctgacaggagaagaaacaacagcagaagagcgacagttaacatttaacaacatgattgaattggcgctgaatactgctgtcgccatttag

SEQ ID NO: 6211 - RNA, 708 nt, synthetic construct
  misc_feature 1..708: note = derived and/or modified sequence opt1 fromPurine_Nucleoside_Phosphorylase_deoD__Escherichia_coli_ _ACD54493
  source 1..708: mol_type = other RNA
atgaccgcccacatcaacgccaagctgggcgacttcgcgcccaccgtgatcatgccgggggaccccctccgcgccaagttcatcgccgagaactacctgcaggaccaccgggaggtcacgaacgtgcgcaacatgctgggctacaccgggttctacagcggccagctcatctccgtgatggggcacggcatgggcatccccagcatgaccctgtacgcccacgagctggtcaacgacttcgacgtgaagcggatcatccgcgtggggtccctcggcgccacccagcggacgatcaagatgcgcgacatcatcctggcggtcgccagcgggaccgactccgtgaccaacttcaagcggagctccggctacttcatggccagctccgcctacttccccctgctccagaaggcgtggagcctggcccaggaggccgggctggaggtgaaggccggcaacgtcttctccggcgacatctactacgacccggacgacaacctcatccccgccctggagaagttcggggtgctgggcatcgacatggaggtggcggggctctacgccctggcccaccagttcggcatcgaggccctggccatcctcaccgtcagcgaccactgcctgacgggcgaggagaccaccgcggaggagcgccagctgaccttcaacaacatgatcgagctcgccctgaacacggccgtggccatctga

SEQ ID NO: 6212 - RNA, 708 nt, synthetic construct
  misc_feature 1..708: note = derived and/or modified sequence opt2 fromPurine_Nucleoside_Phosphorylase_deoD__Escherichia_coli_ _ACD54493
  source 1..708: mol_type = other RNA
atgaccgcccacatcaacgccaagctcggcgacttcgcccccaccgtcatcatgcccggcgaccccctccgcgccaagttcatcgccgagaactacctccaggaccaccgcgaggtcaccaacgtccgcaacatgctcggctacaccggcttctactccggccagctcatctccgtcatgggccacggcatgggcatcccctccatgaccctctacgcccacgagctcgtcaacgacttcgacgtcaagcgcatcatccgcgtcggctccctcggcgccacccagcgcaccatcaagatgcgcgacatcatcctcgccgtcgcctccggcaccgactccgtcaccaacttcaagcgctcctccggctacttcatggcctcctccgcctacttccccctcctccagaaggcctggtccctcgcccaggaggccggcctcgaggtcaaggccggcaacgtcttctccggcgacatctactacgaccccgacgacaacctcatccccgccctcgagaagttcggcgtcctcggcatcgacatggaggtcgccggcctctacgccctcgcccaccagttcggcatcgaggccctcgccatcctcaccgtctccgaccactgcctcaccggcgaggagaccaccgccgaggagcgccagctcaccttcaacaacatgatcgagctcgccctcaacaccgccgtcgccatctga

SEQ ID NO: 6213 - RNA, 708 nt, synthetic construct
  misc_feature 1..708: note = derived and/or modified sequence opt3 fromPurine_Nucleoside_Phosphorylase_deoD__Escherichia_coli_ _ACD54493
  source 1..708: mol_type = other RNA
atgaccgcccacatcaacgctaagctgggcgacttcgcacccacagtgattatgcctggggatccactcagagccaaatttatagcggagaattaccttcaggaccatagggaagtcactaacgttcggaatatgctgggatatacgggtttctacagcggccaattgatctccgtgatggggcacggaatgggcattccgtctatgaccttatatgctcatgagctggtaaacgattttgacgtgaagcgcatcattcgagtcggttcactaggggccacacagcgtactatcaaaatgagagatataatcctcgcagtggccagtggaaccgacagcgttacaaatttcaagaggtcctctggctactttatggcttcgtcagcatatttccccctgcttcagaaagcctggagcctggctcaggaagccggcttggaggtgaaggcggggaacgtctttagtggagatatttactatgaccctgatgacaatctcatcccagcactggaaaagttcggtgtgctgggcattgatatggaggtagccgggctctacgctttagcccaccaatttggaatcgaggcactggctatacttaccgtttccgaccattgcttgactggcgaagagacaaccgccgaggaacggcagctgacgttcaacaatatgattgagctagcgctcaacactgccgtggcaatctga

SEQ ID NO: 6214 - RNA, 708 nt, synthetic construct
  misc_feature 1..708: note = derived and/or modified sequence opt4 fromPurine_Nucleoside_Phosphorylase_deoD__Escherichia_coli_ _ACD54493
  source 1..708: mol_type = other RNA
atgaccgcccacatcaacgccaagctgggcgacttcgcccccaccgtgatcatgcccggcgaccccctgagagccaagttcatcgccgagaactacctgcaggaccacagagaggtgaccaacgtgagaaacatgctgggctacaccggcttctacagcggccagctgatcagcgtgatgggccacggcatgggcatccccagcatgaccctgtacgcccacgagctggtgaacgacttcgacgtgaagagaatcatcagagtgggcagcctgggcgccacccagagaaccatcaagatgagagacatcatcctggccgtggccagcggcaccgacagcgtgaccaacttcaagagaagcagcggctacttcatggccagcagcgcctacttccccctgctgcagaaggcctggagcctggcccaggaggccggcctggaggtgaaggccggcaacgtgttcagcggcgacatctactacgaccccgacgacaacctgatccccgccctggagaagttcggcgtgctgggcatcgacatggaggtggccggcctgtacgccctggcccaccagttcggcatcgaggccctggccatcctgaccgtgagcgaccactgcctgaccggcgaggagaccaccgccgaggagagacagctgaccttcaacaacatgatcgagctggccctgaacaccgccgtggccatctga

SEQ ID NO: 6215 - RNA, 708 nt, synthetic construct
  misc_feature 1..708: note = derived and/or modified sequence opt5 fromPurine_Nucleoside_Phosphorylase_deoD__Escherichia_coli_ _ACD54493
  source 1..708: mol_type = other RNA
atgaccgcccacatcaacgctaagctgggcgacttcgcccccacagtgattatgcctggggatccgctcagagcgaaatttatcgctgagaattacctgcaggaccatcgggaagtcacgaacgttcgcaatatgcttggatataccggcttctacagcgggcaactgatttccgtgatgggacacggcatggggatcccctctatgacactctatgcccatgagctggtgaacgattttgacgtcaagagaattatccgggtgggaagccttggcgccacccagcgcacaatcaaaatgagagatattatcctggctgttgcctccggcaccgactctgtgacaaatttcaagcggagctccgggtactttatggcttctagcgcctatttccctctcctgcagaaagcgtggtccctggcccaggaagctggactcgaggtcaaggccggcaacgtgtttagcggggatatttactatgaccccgatgacaatctgatccctgctcttgaaaagttcggagttctgggcattgatatggaggtggccgggctctacgcgctggcccaccaatttggaatcgaggctcttgccattctgaccgtctctgaccattgcctcacgggcgaagagaccacagctgaggaacgccagctgaccttcaacaatatgatcgagctggccctcaacacagccgtggctatctga

SEQ ID NO: 6216 - RNA, 708 nt, synthetic construct
  misc_feature 1..708: note = derived and/or modified sequence opt6 fromPurine_Nucleoside_Phosphorylase_deoD__Escherichia_coli_ _ACD54493
  source 1..708: mol_type = other RNA
atgacagcacacataaatgcaaaactaggagatttcgcaccaacagtaataatgccaggagacccattaagagcaaaattcatagcagaaaactacttacaagatcacagggaagtaacaaacgtcagaaacatgctaggatacacaggattctactcaggacaattaataagtgtaatgggacacgggatgggaataccatcaatgacattatacgcacacgaattagtaaacgacttcgacgttaaaagaataataagagtaggaagcctaggagcaacccaaagaacaataaaaatgagagacataatactagcagtagcatcaggaacagactcagtaacaaactttaaaagaagttcaggatatttcatggcatcatcagcatacttcccactactacaaaaagcatggtcattagcacaagaagcaggcttagaagtaaaagcaggaaacgtattctcaggagacatatactatgacccagacgacaacttaataccagcactagaaaaattcggagtactaggaatagacatggaagtagctggactatacgcattagcacaccaattcggaatagaagcactagcaatcttaacagtatcagaccactgcctaacaggagaagaaacaacagcagaagaaagacaattaacattcaacaacatgatagaattagcactaaatacagcagtagcaatataa

SEQ ID NO: 6217 - protein, 239 aa, synthetic construct; identical to SEQ ID NO: 6201
  REGION 1..239: note Purine_Nucleoside_Phosphorylase_deoD__Escherichia_coli__A0A 0E0U7I4

SEQ ID NO: 6218 - RNA, 720 nt, synthetic construct
  misc_feature 1..720: note Purine_Nucleoside_Phosphorylase_deoD__Escherichia_coli__AEE 59766
  source 1..720: mol_type = other RNA
atggctaccccacacattaatgcagaaatgggcgatttcgctgacgtagttttgatgccaggcgacccgctgcgtgcgaagtatattgctgaaactttccttgaagatgcccgtgaagtgaacaacgttcgcggtatgctgggcttcaccggtacttacaaaggccgcaaaatttccgtaatgggtcacggtatgggtatcccgtcctgctccatctacaccaaagaactgatcaccgatttcggcgtgaagaaaattatccgcgtgggttcctgtggcgcagttctgccgcacgtaaaactacgcgacgtcgttatcggtatgggtgcctgcaccgattccaaagttaaccgcatccgttttaaagaccatgactttgccgctatcgctgactttgacatggtgcgtaacgcggtagacgcggctaaagcactgggcgttgatgctcgcgtgggtaacctgttctccgctgacctgttctactctccggacggcgaaatgttcgacgtgatggaaaaatacggcatcctcggcgtggaaatggaagcggctggtatctacggcgtcgctgcagaatttggcgcgaaagccctgaccatctgcaccgtgtctgaccacatccgcactcacgagcagaccactgccgctgagcgtcagaccaccttcaacgacatgatcaaaatcgcactggaatccgttctgctgggcgataaagagtaa

SEQ ID NO: 6219 - RNA, 720 nt, synthetic construct; identical to SEQ ID NO: 6203
  misc_feature 1..720: note = derived and/or modified sequence opt1 fromPurine_Nucleoside_Phosphorylase_deoD__Escherichia_coli_ _AEE59766
  source 1..720: mol_type = other RNA

SEQ ID NO: 6220 - RNA, 720 nt, synthetic construct; identical to SEQ ID NO: 6204
  misc_feature 1..720: note = derived and/or modified sequence opt2 fromPurine_Nucleoside_Phosphorylase_deoD__Escherichia_coli_ _AEE59766
  source 1..720: mol_type = other RNA

SEQ ID NO: 6221 - RNA, 720 nt, synthetic construct; identical to SEQ ID NO: 6205
  misc_feature 1..720: note = derived and/or modified sequence opt3 fromPurine_Nucleoside_Phosphorylase_deoD__Escherichia_coli_ _AEE59766
  source 1..720: mol_type = other RNA

SEQ ID NO: 6222 - RNA, 720 nt, synthetic construct; identical to SEQ ID NO: 6206
  misc_feature 1..720: note = derived and/or modified sequence opt4 fromPurine_Nucleoside_Phosphorylase_deoD__Escherichia_coli_ _AEE59766
  source 1..720: mol_type = other RNA

SEQ ID NO: 6223 - RNA, 720 nt, synthetic construct; identical to SEQ ID NO: 6207
  misc_feature 1..720: note = derived and/or modified sequence opt5 fromPurine_Nucleoside_Phosphorylase_deoD__Escherichia_coli_ _AEE59766
  source 1..720: mol_type = other RNA

SEQ ID NO: 6224 - RNA, 720 nt, synthetic construct
  misc_feature 1..720: note = derived and/or modified sequence opt6 fromPurine_Nucleoside_Phosphorylase_deoD__Escherichia_coli_ _AEE59766
  source 1..720: mol_type = other RNA
atggcaacaccacatataaacgcagaaatgggggactttgcagatgtagtactaatgccaggagacccactaagagcaaaatacatagcagaaacatttctagaagatgcaagagaagtaaataatgtaagaggaatgttaggatttacagggacatataaaggaagaaaaataagtgtaatgggacatggaatgggcataccatcatgcagtatatatacaaaagaattaataacagacttcggagtgaaaaaaataataagagtaggatcatgcggagcagtactaccacacgtaaaattaagagatgtagtaattggaatgggagcatgtaccgatagcaaagtaaatagaataagatttaaagatcatgatttcgcagcaatagccgatttcgatatggtacgaaatgcagtagacgcagcaaaggcattaggagtagacgcaagagtaggaaatctattcagcgcagacttattttatagtccagacggagaaatgttcgatgtaatggaaaaatacggaatattaggagtagaaatggaagcagcaggaatatacggagtagccgcagaatttggagcaaaagcacttacaatatgtacagtaagcgatcacataagaacacacgaacaaacaacagcagcagaaagacaaacaacattcaatgacatgataaaaatagcactcgaaagcgtattattaggagataaagaataa

SEQ ID NO: 6225 - protein, 239 aa, synthetic construct; identical to SEQ ID NO: 6201
  REGION 1..239: note Purine_Nucleoside_Phosphorylase_deoD__Escherichia_coli__A0A 0E0VFI3

SEQ ID NO: 6226 - RNA, 720 nt, synthetic construct
  misc_feature 1..720: note Purine_Nucleoside_Phosphorylase_deoD__Escherichia_coli__AEQ 15845
  source 1..720: mol_type = other RNA
atggctaccccacacattaatgcagaaatgggcgatttcgctgacgtagttttgatgccaggcgacccgctgcgtgcgaagtatattgctgaaactttccttgaagatgcccgtgaagtgaacaacgttcgcggtatgctgggcttcaccggtacttacaaaggccgcaaaatttccgtaatgggtcacggtatgggtatcccgtcctgctccatctacaccaaagaactgatcaccgatttcggcgtgaagaaaattatccgcgtaggctcctgtggcgctgttctgccacacgtaaaactgcgcgacgtcgttatcggtatgggtgcctgcaccgattccaaagttaaccgtatccgttttaaagaccatgactttgccgctatcgctgactttgacatggtgcgtaacgcggtagacgcggctaaagcactgggcgttgatgctcgcgttggtaacctgttctccgctgacctgttctactctccggacggcgaaatgttcgatgtgatggaaaaatacggcatcctcggcgtggaaatggaagcagctggtatctacggcgtcgctgcagaatttggcgcgaaagccctgaccatctgcaccgtgtctgaccacatccgcactcacgagcagaccactgccgctgagcgtcagaccaccttcaacgacatgatcaaaatcgcactggaatccgttctgttgggcgataaagagtaa

SEQ ID NO: 6227 - RNA, 720 nt, synthetic construct; identical to SEQ ID NO: 6203
  misc_feature 1..720: note = derived and/or modified sequence opt1 fromPurine_Nucleoside_Phosphorylase_deoD__Escherichia_coli_ _AEQ15845
  source 1..720: mol_type = other RNA

SEQ ID NO: 6228 - RNA, 720 nt, synthetic construct; identical to SEQ ID NO: 6204
  misc_feature 1..720: note = derived and/or modified sequence opt2 fromPurine_Nucleoside_Phosphorylase_deoD__Escherichia_coli_ _AEQ15845
  source 1..720: mol_type = other RNA

SEQ ID NO: 6229 - RNA, 720 nt, synthetic construct; identical to SEQ ID NO: 6205
  misc_feature 1..720: note = derived and/or modified sequence opt3 fromPurine_Nucleoside_Phosphorylase_deoD__Escherichia_coli_ _AEQ15845
  source 1..720: mol_type = other RNA

SEQ ID NO: 6230 - RNA, 720 nt, synthetic construct; identical to SEQ ID NO: 6206
  misc_feature 1..720: note = derived and/or modified sequence opt4 fromPurine_Nucleoside_Phosphorylase_deoD__Escherichia_coli_ _AEQ15845
  source 1..720: mol_type = other RNA

SEQ ID NO: 6231 - RNA, 720 nt, synthetic construct; identical to SEQ ID NO: 6207
  misc_feature 1..720: note = derived and/or modified sequence opt5 fromPurine_Nucleoside_Phosphorylase_deoD__Escherichia_coli_ _AEQ15845
  source 1..720: mol_type = other RNA

SEQ ID NO: 6232 - RNA, 720 nt, synthetic construct
  misc_feature 1..720: note = derived and/or modified sequence opt6 fromPurine_Nucleoside_Phosphorylase_deoD__Escherichia_coli_ _AEQ15845
  source 1..720: mol_type = other RNA
atggcaacaccacatataaatgccgaaatgggagactttgcagacgtagtactaatgccaggagatccactaagagcaaaatacatagcagaaacatttctagaagacgcaagagaagtaaataatgtaagaggaatgttaggatttacaggaacatataaaggaagaaaaataagtgtaatgggacatggaatgggtataccatcatgtagtatatacacaaaagaattaatcacagactttggagtaaaaaaaataataagagtaggaagttgcggagcagtactaccacacgtaaaattaagagatgtagtaataggaatgggagcatgtacagacagcaaagtaaatagaataagatttaaagaccatgattttgccgcaatagcagatttcgatatggtacgaaacgcagtagacgcagcaaaagcactaggagtagatgcaagagtaggaaatttatttagcgcggacttattttacagcccagacggagaaatgttcgatgtaatggaaaaatacggaatattaggagtagaaatggaagcagcaggaatatatggagtagcagcagaatttggagcaaaagcactaacgatatgtacagtaagcgatcacataagaacacacgaacaaacaacagcagcagaaagacaaacaactttcaatgacatgataaaaatagcattagaaagcgttttactaggagataaagaataa

SEQ ID NO: 6233 - protein, 239 aa, synthetic construct; identical to SEQ ID NO: 6193
  REGION 1..239: note Purine_Nucleoside_Phosphorylase_deoD__Escherichia_coli__A0A 0E0Y455

SEQ ID NO: 6234 - RNA, 720 nt, synthetic construct
  misc_feature 1..720: note Purine_Nucleoside_Phosphorylase_deoD__Escherichia_coli__AFS 76188
  source 1..720: mol_type = other RNA
atggctaccccacacattaatgcagaaatgggcgatttcgctgacgtagttttgatgccaggcgacccgctgcgtgcaaagtatattgctgaaactttccttgaagatgcccgtgaagtgaacaacgttcgcggtatgctgggcttcaccggtacttataaaggccgcaaaatttccgtaatgggtcacggtatgggtatcccgtcctgctccatctacaccaaagaactgatcaccgatttcggcgtgaagaaaattatccgcgtgggttcctgtggcgcagttctgccgcacgtaaaactgcgcgacgtcgttatcggtatgggtgcctgcaccgattccaaagttaaccgcatccgttttaaagatcatgactttgccgctatcgctgactttgacatggtgcgtaacgcggtagacgcggctaaagcactgggcattgatgctcgcgttggtaacctgttctccgctgacctgttctactctccggacggcgaaatgttcgacgtgatggaaaaatacggcatcctcggcgtggaaatggaagcggctggtatctacggcgtcgctgcagaatttggcgcgaaagccctgaccatctgtaccgtgtctgaccacatccgcactcacgagcagaccactgccgctgagcgtcagaccaccttcaacgacatgatcaaaatcgcactggaatccgttctgctgggcgataaagagtaa

SEQ ID NO: 6235 - RNA, 720 nt, synthetic construct; identical to SEQ ID NO: 6195
  misc_feature 1..720: note = derived and/or modified sequence opt1 fromPurine_Nucleoside_Phosphorylase_deoD__Escherichia_coli_ _AFS76188
  source 1..720: mol_type = other RNA

SEQ ID NO: 6236 - RNA, 720 nt, synthetic construct; identical to SEQ ID NO: 6196
  misc_feature 1..720: note = derived and/or modified sequence opt2 fromPurine_Nucleoside_Phosphorylase_deoD__Escherichia_coli_ _AFS76188
  source 1..720: mol_type = other RNA

SEQ ID NO: 6237 - RNA, 720 nt, synthetic construct; identical to SEQ ID NO: 6197
  misc_feature 1..720: note = derived and/or modified sequence opt3 fromPurine_Nucleoside_Phosphorylase_deoD__Escherichia_coli_ _AFS76188
  source 1..720: mol_type = other RNA

SEQ ID NO: 6238 - RNA, 720 nt, synthetic construct; identical to SEQ ID NO: 6198
  misc_feature 1..720: note = derived and/or modified sequence opt4 fromPurine_Nucleoside_Phosphorylase_deoD__Escherichia_coli_ _AFS76188
  source 1..720: mol_type = other RNA

SEQ ID NO: 6239 - RNA, 720 nt, synthetic construct; identical to SEQ ID NO: 6199
  misc_feature 1..720: note = derived and/or modified sequence opt5 fromPurine_Nucleoside_Phosphorylase_deoD__Escherichia_coli_ _AFS76188
  source 1..720: mol_type = other RNA

SEQ ID NO: 6240 - RNA, 720 nt, synthetic construct
  misc_feature 1..720: note = derived and/or modified sequence opt6 fromPurine_Nucleoside_Phosphorylase_deoD__Escherichia_coli_ _AFS76188
  source 1..720: mol_type = other RNA
atggcaacaccacatataaatgcagaaatgggagactttgcagatgtagtattaatgccaggagatcccctaagagcaaaatacatagcagaaacatttctagaagacgcaagagaagtcaataacgtaagaggaatgttaggatttacaggaacatataaaggaagaaaaatatcagtaatgggacatggaatgggaataccatcatgctcaatatatacaaaagaattaataacggactttggagtaaaaaaaataataagagtaggatcatgcggagcagtattaccacacgtgaaactaagagatgtagtaataggaatgggagcatgtacagatagcaaagtaaatagaataagatttaaagatcacgattttgcagcaatagcagatttcgatatggtaagaaatgcagtagacgcagcaaaagcactaggaatagacgcaagagtgggaaatttatttagcgcagacttattctatagcccagacggagaaatgttcgatgtaatggaaaaatacggaatcttaggagtagaaatggaagcggcaggaatatatggagtagcagcagaatttggagcaaaagcattaacgatatgtacagtaagcgatcacataagaacgcacgaacaaacaacagcagcagaacgacaaacaacattcaatgatatgataaaaatagcactagaaagcgtactattaggcgataaagaataa

SEQ ID NO: 6241 - protein, 239 aa, synthetic construct; identical to SEQ ID NO: 6201
  REGION 1..239: note Purine_Nucleoside_Phosphorylase_deoD__Escherichia_coli__A0A 0E1M7E2

SEQ ID NO: 6242 - RNA, 720 nt, synthetic construct; identical to SEQ ID NO: 6202
  misc_feature 1..720: note Purine_Nucleoside_Phosphorylase_deoD__Escherichia_coli__AJF 59253
  source 1..720: mol_type = other RNA

SEQ ID NO: 6243 - RNA, 720 nt, synthetic construct; identical to SEQ ID NO: 6203
  misc_feature 1..720: note = derived and/or modified sequence opt1 fromPurine_Nucleoside_Phosphorylase_deoD__Escherichia_coli_ _AJF59253
  source 1..720: mol_type = other RNA

SEQ ID NO: 6244 - RNA, 720 nt, synthetic construct; identical to SEQ ID NO: 6204
  misc_feature 1..720: note = derived and/or modified sequence opt2 fromPurine_Nucleoside_Phosphorylase_deoD__Escherichia_coli_ _AJF59253
  source 1..720: mol_type = other RNA

SEQ ID NO: 6245 - RNA, 720 nt, synthetic construct; identical to SEQ ID NO: 6205
  misc_feature 1..720: note = derived and/or modified sequence opt3 fromPurine_Nucleoside_Phosphorylase_deoD__Escherichia_coli_ _AJF59253
  source 1..720: mol_type = other RNA

SEQ ID NO: 6246 - RNA, 720 nt, synthetic construct; identical to SEQ ID NO: 6206
  misc_feature 1..720: note = derived and/or modified sequence opt4 fromPurine_Nucleoside_Phosphorylase_deoD__Escherichia_coli_ _AJF59253
  source 1..720: mol_type = other RNA

SEQ ID NO: 6247 - RNA, 720 nt, synthetic construct; identical to SEQ ID NO: 6207
  misc_feature 1..720: note = derived and/or modified sequence opt5 fromPurine_Nucleoside_Phosphorylase_deoD__Escherichia_coli_ _AJF59253
  source 1..720: mol_type = other RNA

SEQ ID NO: 6248 - RNA, 720 nt, synthetic construct
  misc_feature 1..720: note = derived and/or modified sequence opt6 fromPurine_Nucleoside_Phosphorylase_deoD__Escherichia_coli_ _AJF59253
  source 1..720: mol_type = other RNA
atggcaacaccacatataaatgcagaaatgggagattttgcagatgtagtactaatgccaggagacccgctaagagccaaatacatagcagaaacatttttagaagacgcaagagaagtcaataatgtaagagggatgttaggatttacaggaacctacaaaggaagaaaaatatcagtaatgggacatggaatgggaataccttcatgcagtatatatacaaaagaattaataacagactttggagtaaaaaaaataataagagtaggatcatgcggagcagtactaccacacgtaaaactaagagatgtagtaataggaatgggagcctgtacagatagcaaagtaaatagaataagatttaaagatcacgatttcgcagcaatagcagattttgacatggtaagaaatgcagtggacgcagcaaaagcattaggagtagacgcaagagtaggaaatctatttagcgcagatttattctatagtccagacggagaaatgttcgatgtaatggaaaaatatggaatactaggagtagaaatggaagcagcagggatatatggagtagcagcagaatttggagcaaaagcactaacaatatgtacagtaagtgatcatataaggacgcacgaacaaacaacagcagcagaaagacaaactacatttaatgacatgataaaaatagcactagaaagcgtattattaggagataaagaataa

SEQ ID NO: 6249 - protein, 239 aa, synthetic construct; identical to SEQ ID NO: 6193
  REGION 1..239: note Purine_Nucleoside_Phosphorylase_deoD__Escherichia_coli__A0A 0E3KJD7

SEQ ID NO: 6250 - RNA, 720 nt, synthetic construct
  misc_feature 1..720: note Purine_Nucleoside_Phosphorylase_deoD__Escherichia_coli__AKA 93549
  source 1..720: mol_type = other RNA
atggctaccccacacattaatgcagaaatgggcgatttcgctgacgtagttttgatgccaggcgacccgctgcgtgcgaagtatattgctgaaactttccttgaagatgcccgtgaagtgaacaacgttcgcggtatgctgggcttcaccggtacttacaaaggccgcaaaatttccgtaatgggtcacggtatgggtatcccgtcctgctccatctacaccaaagaactgatcaccgatttcggcgtgaagaaaattatccgcgtaggctcctgtggcgctgttctgccgcacgtaaaactgcgcgacgtcgttatcggtatgggtgcctgcaccgattccaaagttaaccgtatccgttttaaagaccatgactttgccgctatcgctgactttgacatggtgcgtaacgcggtagacgcggctaaagcactgggcattgatgctcgcgttggtaacctgttctccgctgacctgttctactctccggacggcgaaatgttcgacgtgatggaaaaatacggcatcctcggcgtggaaatggaagcggctggtatctacggcgtcgctgcagaatttggcgcgaaagccctgaccatctgtaccgtgtctgaccacatccgcactcacgagcagaccactgccgctgagcgtcagaccaccttcaacgacatgatcaaaatcgcactggaatccgttctgctgggcgataaagagtaa

SEQ ID NO: 6251 - RNA, 720 nt, synthetic construct; identical to SEQ ID NO: 6195
  misc_feature 1..720: note = derived and/or modified sequence opt1 fromPurine_Nucleoside_Phosphorylase_deoD__Escherichia_coli_ _AKA93549
  source 1..720: mol_type = other RNA

SEQ ID NO: 6252 - RNA, 720 nt, synthetic construct; identical to SEQ ID NO: 6196
  misc_feature 1..720: note = derived and/or modified sequence opt2 fromPurine_Nucleoside_Phosphorylase_deoD__Escherichia_coli_ _AKA93549
  source 1..720: mol_type = other RNA

SEQ ID NO: 6253 - RNA, 720 nt, synthetic construct; identical to SEQ ID NO: 6197
  misc_feature 1..720: note = derived and/or modified sequence opt3 fromPurine_Nucleoside_Phosphorylase_deoD__Escherichia_coli_ _AKA93549
  source 1..720: mol_type = other RNA

SEQ ID NO: 6254 - RNA, 720 nt, synthetic construct; identical to SEQ ID NO: 6198
  misc_feature 1..720: note = derived and/or modified sequence opt4 fromPurine_Nucleoside_Phosphorylase_deoD__Escherichia_coli_ _AKA93549
  source 1..720: mol_type = other RNA

SEQ ID NO: 6255 - RNA, 720 nt, synthetic construct; identical to SEQ ID NO: 6199
  misc_feature 1..720: note = derived and/or modified sequence opt5 fromPurine_Nucleoside_Phosphorylase_deoD__Escherichia_coli_ _AKA93549
  source 1..720: mol_type = other RNA

SEQ ID NO: 6256 - RNA, 720 nt, synthetic construct
  misc_feature 1..720: note = derived and/or modified sequence opt6 fromPurine_Nucleoside_Phosphorylase_deoD__Escherichia_coli_ _AKA93549
  source 1..720: mol_type = other RNA
atggcaacaccacatataaacgcagaaatgggagactttgcagatgtagtactaatgcccggagatccactaagagcaaaatacatagcagaaacattcttagaagacgcaagagaagtaaataacgtaagaggaatgttaggttttacaggaacatataaaggaagaaaaatatcagtaatgggacatggaatgggaataccaagttgctcaatatatacaaaagaattaataacagactttggagtaaaaaaaataataagagtaggttcgtgcggagcagtactaccacacgtaaaattaagagatgtagtaataggaatgggagcatgtacagatagcaaagtaaatagaataagatttaaagatcacgatttcgcagcaatagcagatttcgatatggtaagaaatgcagtagacgcagcaaaagcattaggaatagacgcaagggtaggcaatttatttagtgcagacttattctatagcccagacggagaaatgttcgatgtaatggaaaaatacggaatattaggagtagaaatggaagcagctggaatatatggagtagcagcagaatttggagcaaaagcactaacaatctgcacagtaagtgatcacataagaacacatgaacaaacaacagcagcagaacgacaaacaacattcaatgacatgataaaaatagcactagaaagtgtattattaggagataaagaataa

SEQ ID NO: 6257 - protein, 239 aa, synthetic construct; identical to SEQ ID NO: 6193
  REGION 1..239: note Purine_Nucleoside_Phosphorylase_deoD__Escherichia_coli__A0A 0F6CCW6

SEQ ID NO: 6258 - RNA, 720 nt, synthetic construct
  misc_feature 1..720: note Purine_Nucleoside_Phosphorylase_deoD__Escherichia_coli__AFJ 32072
  source 1..720: mol_type = other RNA
atggctaccccacacattaatgcagaaatgggcgatttcgctgacgtagttttgatgccaggcgacccgctgcgtgcgaagtatattgctgaaactttccttgaagatgcccgtgaagtgaacaacgttcgcggtatgctgggcttcaccggtacttacaaaggccgcaaaatttccgtaatgggtcacggtatgggtatcccgtcctgctccatctacaccaaagaactgatcaccgatttcggcgtgaagaaaattatccgcgtgggttcctgtggcgcagttctgccgcacgtaaaactgcgcgacgtcgttatcggtatgggtgcctgcaccgattccaaagttaaccgcatccgttttaaagaccatgactttgccgctatcgctgacttcgacatggtgcgtaacgcagtagatgcagctaaagcactgggcattgatgctcgcgttggtaacctgttctccgctgacctgttctactctccggacggcgaaatgttcgacgtgatggaaaaatacggcattctcggcgtggaaatggaagcggctggtatctacggcgtggctgcagagtttggcgcgaaagccctgaccatctgcaccgtgtctgaccacatccgcactcacgagcaaaccactgccgctgagcgtcagaccaccttcaacgacatgatcaaaatcgcactggaatccgttctgctgggcgataaagagtaa

SEQ ID NO: 6259 - RNA, 720 nt, synthetic construct; identical to SEQ ID NO: 6195
  misc_feature 1..720: note = derived and/or modified sequence opt1 fromPurine_Nucleoside_Phosphorylase_deoD__Escherichia_coli_ _AFJ32072
  source 1..720: mol_type = other RNA

SEQ ID NO: 6260 - RNA, 720 nt, synthetic construct; identical to SEQ ID NO: 6196
  misc_feature 1..720: note = derived and/or modified sequence opt2 fromPurine_Nucleoside_Phosphorylase_deoD__Escherichia_coli_ _AFJ32072
  source 1..720: mol_type = other RNA

SEQ ID NO: 6261 - RNA, 720 nt, synthetic construct; identical to SEQ ID NO: 6197
  misc_feature 1..720: note = derived and/or modified sequence opt3 fromPurine_Nucleoside_Phosphorylase_deoD__Escherichia_coli_ _AFJ32072
  source 1..720: mol_type = other RNA

SEQ ID NO: 6262 - RNA, 720 nt, synthetic construct; identical to SEQ ID NO: 6198
  misc_feature 1..720: note = derived and/or modified sequence opt4 fromPurine_Nucleoside_Phosphorylase_deoD__Escherichia_coli_ _AFJ32072
  source 1..720: mol_type = other RNA

SEQ ID NO: 6263 - RNA, 720 nt, synthetic construct; identical to SEQ ID NO: 6199
  misc_feature 1..720: note = derived and/or modified sequence opt5 fromPurine_Nucleoside_Phosphorylase_deoD__Escherichia_coli_ _AFJ32072
  source 1..720: mol_type = other RNA

SEQ ID NO: 6264 - RNA, 720 nt, synthetic construct
  misc_feature 1..720: note = derived and/or modified sequence opt6 fromPurine_Nucleoside_Phosphorylase_deoD__Escherichia_coli_ _AFJ32072
  source 1..720: mol_type = other RNA
atggcaacaccccatataaatgcagaaatgggggactttgcagatgtagtactaatgccaggggatccactaagagcaaaatacatagcagaaacatttttagaagacgcaagggaagtaaataacgtacgaggaatgttaggatttacaggaacatataaaggaagaaaaataagtgtaatgggccatggaatgggaataccatcatgctcaatatatacaaaagaattaataacagactttggagtaaaaaaaataataagagtaggatcatgcggagcagtactaccacacgtaaaattaagagatgttgtaataggaatgggagcatgtacagatagcaaagtaaatagaataagatttaaagatcacgatttcgcagctatagcagatttcgatatggtaagaaatgccgtagacgcggcaaaagcactaggaatagacgcgagagtaggaaatctatttagcgcagacttattctatagcccagacggagaaatgttcgacgtaatggaaaagtatggaatactaggagtagaaatggaagcagcaggaatatatggagtagcagcagaattcggagcaaaagcactaacaatatgtacagtaagtgatcacataagaacacacgaacaaacaacagcagcagaaagacaaacaacatttaatgacatgataaaaatagcactagaaagcgtactattaggagataaagaataa

SEQ ID NO: 6265 - protein, 239 aa, synthetic construct; identical to SEQ ID NO: 6193
  REGION 1..239: note Purine_Nucleoside_Phosphorylase_deoD__Escherichia_coli__A0A 0F6FGI8

SEQ ID NO: 6266 - RNA, 720 nt, synthetic construct; identical to SEQ ID NO: 6258
  misc_feature 1..720: note Purine_Nucleoside_Phosphorylase_deoD__Escherichia_coli__AJA 29528
  source 1..720: mol_type = other RNA

SEQ ID NO: 6267 - RNA, 720 nt, synthetic construct; identical to SEQ ID NO: 6195
  misc_feature 1..720: note = derived and/or modified sequence opt1 fromPurine_Nucleoside_Phosphorylase_deoD__Escherichia_coli_ _AJA29528
  source 1..720: mol_type = other RNA

SEQ ID NO: 6268 - RNA, 720 nt, synthetic construct; identical to SEQ ID NO: 6196
  misc_feature 1..720: note = derived and/or modified sequence opt2 fromPurine_Nucleoside_Phosphorylase_deoD__Escherichia_coli_ _AJA29528
  source 1..720: mol_type = other RNA

SEQ ID NO: 6269 - RNA, 720 nt, synthetic construct; identical to SEQ ID NO: 6197
  misc_feature 1..720: note = derived and/or modified sequence opt3 fromPurine_Nucleoside_Phosphorylase_deoD__Escherichia_coli_ _AJA29528
  source 1..720: mol_type = other RNA

SEQ ID NO: 6270 - RNA, 720 nt, synthetic construct; identical to SEQ ID NO: 6198
  misc_feature 1..720: note = derived and/or modified sequence opt4 fromPurine_Nucleoside_Phosphorylase_deoD__Escherichia_coli_ _AJA29528
  source 1..720: mol_type = other RNA

SEQ ID NO: 6271 - RNA, 720 nt, synthetic construct; identical to SEQ ID NO: 6199
  misc_feature 1..720: note = derived and/or modified sequence opt5 fromPurine_Nucleoside_Phosphorylase_deoD__Escherichia_coli_ _AJA29528
  source 1..720: mol_type = other RNA

SEQ ID NO: 6272 - RNA, 720 nt, synthetic construct
  misc_feature 1..720: note = derived and/or modified sequence opt6 fromPurine_Nucleoside_Phosphorylase_deoD__Escherichia_coli_ _AJA29528
  source 1..720: mol_type = other RNA
atggcaacaccacatataaatgcagaaatgggagactttgcagatgtagtactaatgccaggagatccactaagagctaaatacatagcagaaacatttctagaagacgcaagagaagtaaataatgtaagaggaatgttaggatttacaggaacatataaaggaagaaaaatatcagtaatgggacatggaatgggaataccaagttgctcaatatatacaaaagaactaataacagactttggagtaaaaaaaataataagagtgggaagttgcggagcagttctaccacacgtaaaattaagagatgtagtaataggaatgggagcatgtacagatagtaaagtaaatagaataagatttaaagaccacgatttcgcagcaatagcagattttgatatggtaagaaatgcagtagatgcagcgaaagcattaggaatagacgcacgagtaggaaatttatttagcgcagacttattctatagcccagacggggaaatgttcgatgtaatggaaaaatacgggatattaggagtagaaatggaagcagcaggaatatatggagtagcagcagaatttggagcaaaggcattaacaatatgcacagtaagcgatcacataagaacacacgaacaaacaacagcagcagaaagacagacaacattcaatgacatgataaaaatagcattagaaagtgtactactaggagataaagaataa

SEQ ID NO: 6273 - protein, 239 aa, synthetic construct; identical to SEQ ID NO: 6193
  REGION 1..239: note Purine_Nucleoside_Phosphorylase_deoD__Escherichia_coli__A0A 0F6GWR2

SEQ ID NO: 6274 - RNA, 720 nt, synthetic construct
  misc_feature 1..720: note Purine_Nucleoside_Phosphorylase_deoD__Escherichia_coli__BAI 57857
  source 1..720: mol_type = other RNA
atggctactccacacattaatgcagaaatgggcgatttcgctgacgtagttttgatgccaggcgacccgctgcgtgcgaagtatattgctgaaactttccttgaagatgctcgtgaagtgaacaacgttcgcggtatgctgggcttcaccggtacttacaaaggccgcaaaatttctgtaatgggccacggtatgggtatcccgtcctgctccatctacactaaagaactgatcaccgatttcggcgtgaagaaaatcattcgcgttggttcctgtggcgcagttctgccgcacgtaaaactgcgtgacgtagtgattggtatgggtgcctgcaccgattccaaagttaaccgcatccgttttaaagaccatgactttgcagctatcgctgacttcgacatggtgcgtaacgcagtagatgcagctaaagcactgggcattgatgctcgcgttggtaacctgttctccgctgacctgttctactctccggacggtgaaatgttcgacgtgatggaaaaatacggcattctcggcgtggaaatggaagcagctggtatctacggcgtggctgcagagtttggcgcgaaagccctgaccatctgcaccgtatctgaccatattcgcacgcacgagcagaccactgccgctgagcgtcagactaccttcaacgacatgatcaaaatcgcactggaatccgttctgctgggcgataaagagtaa

SEQ ID NO: 6275 - RNA, 720 nt, synthetic construct; identical to SEQ ID NO: 6195
  misc_feature 1..720: note = derived and/or modified sequence opt1 fromPurine_Nucleoside_Phosphorylase_deoD__Escherichia_coli_ _BAI57857
  source 1..720: mol_type = other RNA

SEQ ID NO: 6276 - RNA, 720 nt, synthetic construct; identical to SEQ ID NO: 6196
  misc_feature 1..720: note = derived and/or modified sequence opt2 fromPurine_Nucleoside_Phosphorylase_deoD__Escherichia_coli_ _BAI57857
  source 1..720: mol_type = other RNA

SEQ ID NO: 6277 - RNA, 720 nt, synthetic construct; identical to SEQ ID NO: 6197
  misc_feature 1..720: note = derived and/or modified sequence opt3 fromPurine_Nucleoside_Phosphorylase_deoD__Escherichia_coli_ _BAI57857
  source 1..720: mol_type = other RNA

SEQ ID NO: 6278 - RNA, 720 nt, synthetic construct; identical to SEQ ID NO: 6198
  misc_feature 1..720: note = derived and/or modified sequence opt4 fromPurine_Nucleoside_Phosphorylase_deoD__Escherichia_coli_ _BAI57857
  source 1..720: mol_type = other RNA

SEQ ID NO: 6279 - RNA, 720 nt, synthetic construct; identical to SEQ ID NO: 6199
  misc_feature 1..720: note = derived and/or modified sequence opt5 fromPurine_Nucleoside_Phosphorylase_deoD__Escherichia_coli_ _BAI57857
  source 1..720: mol_type = other RNA

SEQ ID NO: 6280 - RNA, 720 nt, synthetic construct
  misc_feature 1..720: note = derived and/or modified sequence opt6 fromPurine_Nucleoside_Phosphorylase_deoD__Escherichia_coli_ _BAI57857
  source 1..720: mol_type = other RNA
atggcaacaccacatatcaatgcagaaatgggagactttgcagatgtagtactaatgccaggagacccactaagagccaaatacatagcagaaacatttttagaagacgcaagagaagtaaataatgtaagaggaatgttaggatttacaggaacctataaaggacgaaaaataagtgtaatgggacatggaatgggaataccaagttgttcaatatatacaaaagaattaataacagactttggagtaaagaaaataataagagtaggatcatgcggagcagtactaccacacgtaaaactaagagatgtagtaatagggatgggagcatgtacagatagcaaagtaaatagaataagatttaaagatcacgattttgcagcaatagcagatttcgatatggtaagaaatgcagtagacgcagcaaaagcattaggaatagacgcaagagtaggaaatctatttagcgcagacctattctatagcccagacggagaaatgttcgatgtaatggaaaaatacggaatattaggagtagaaatggaagcagcaggaatatatggagtagcagcagaatttggagcaaaagcattaacaatatgtacagtaagcgatcacataagaacacacgaacaaacaacggcagcagaaagacaaacgacgttcaatgacatgataaaaatagcattagaaagcgtactattaggagataaagagtaa

SEQ ID NO: 6281 - protein, 239 aa, synthetic construct; identical to SEQ ID NO: 6201
  REGION 1..239: note Purine_Nucleoside_Phosphorylase_deoD__Escherichia_coli__A0A 0G2SIK5

SEQ ID NO: 6282 - RNA, 720 nt, synthetic construct
  misc_feature 1..720: note Purine_Nucleoside_Phosphorylase_deoD__Escherichia_coli__AJM 76720
  source 1..720: mol_type = other RNA
atggctactccacacattaatgcagaaatgggcgattttgctgacgtagttttgatgccaggtgacccgctgcgtgcgaagtatattgctgaaactttccttgaagatgcccgtgaagtgaacaacgttcgcggtatgctgggcttcactggtacttacaaaggccgcaaaatttccgtaatgggccacggtatgggtatcccgtcctgctccatctacaccaaagaactgatcactgatttcggcgtgaagaaaattatccgcgttggttcctgtggcgctgttctgccgcacgtaaaactgcgcgacgtcgttatcggtatgggtgcctgcaccgattccaaagttaaccgcatccgttttaaagaccatgactttgccgctatcgctgacttcgacatggtgcgtaacgcggtagacgcggcaaaagcactgggcgttgatgctcgtgttggtaacctgttctccgctgacctgttctactctccggacggcgaaatgttcgacgtgatggaaaaatacggcatcctcggcgtggaaatggaagcggctggtatctacggcgtcgctgcagaatttggcgcgaaagccctgaccatctgcaccgtgtctgaccacatccgcactcacgagcagaccactgccgctgagcgtcagaccaccttcaacgacatgatcaaaatcgcgctggaatccgttctgctgggcgataaagagtaa

SEQ ID NO: 6283 - RNA, 720 nt, synthetic construct; identical to SEQ ID NO: 6203
  misc_feature 1..720: note = derived and/or modified sequence opt1 fromPurine_Nucleoside_Phosphorylase_deoD__Escherichia_coli_ _AJM76720
  source 1..720: mol_type = other RNA

SEQ ID NO: 6284 - RNA, 720 nt, synthetic construct; identical to SEQ ID NO: 6204
  misc_feature 1..720: note = derived and/or modified sequence opt2 fromPurine_Nucleoside_Phosphorylase_deoD__Escherichia_coli_ _AJM76720
  source 1..720: mol_type = other RNA

SEQ ID NO: 6285 - RNA, 720 nt, synthetic construct; identical to SEQ ID NO: 6205
  misc_feature 1..720: note = derived and/or modified sequence opt3 fromPurine_Nucleoside_Phosphorylase_deoD__Escherichia_coli_ _AJM76720
  source 1..720: mol_type = other RNA

SEQ ID NO: 6286 - RNA, 720 nt, synthetic construct; identical to SEQ ID NO: 6206
  misc_feature 1..720: note = derived and/or modified sequence opt4 fromPurine_Nucleoside_Phosphorylase_deoD__Escherichia_coli_ _AJM76720
  source 1..720: mol_type = other RNA

SEQ ID NO: 6287 - RNA, 720 nt, synthetic construct; identical to SEQ ID NO: 6207
  misc_feature 1..720: note = derived and/or modified sequence opt5 fromPurine_Nucleoside_Phosphorylase_deoD__Escherichia_coli_ _AJM76720
  source 1..720: mol_type = other RNA

SEQ ID NO: 6288 - RNA, 720 nt, synthetic construct
  misc_feature 1..720: note = derived and/or modified sequence opt6 fromPurine_Nucleoside_Phosphorylase_deoD__Escherichia_coli_ _AJM76720
  source 1..720: mol_type = other RNA
atggcaacaccccatataaatgcagagatgggagacttcgcagatgtagtactaatgccaggagatccactaagagcaaaatacatagcagaaacatttctagaagacgcgagagaagtaaacaacgtaagaggaatgctaggatttacaggaacatataaaggaagaaaaatatcagtcatgggacatggcatgggaataccaagttgtagtatatataccaaagaattaataacagactttggagtcaaaaaaataataagagtaggatcatgcggagcagtactcccacacgtaaaattaagagatgtagtaataggaatgggagcatgtacagatagtaaggtaaatagaatacgatttaaagatcacgatttcgcagcaatagcagatttcgatatggtaagaaatgcagtagacgcagcaaaagcattaggagtagacgcacgagtaggaaatctatttagcgcagacttattctatagcccggacggagaaatgtttgatgtaatggaaaaatacggaatattaggagtagaaatggaagcagcagggatatatggagtagcagcagaatttggagcaaaagcactaacaatatgtacagtaagtgatcacataagaacacacgaacaaacaacagcagcagaaagacaaacaacattcaatgacatgataaaaatagcattagaaagcgtattattaggagataaagaataa

SEQ ID NO: 6289 - protein, 239 aa, synthetic construct; identical to SEQ ID NO: 6201
  REGION 1..239: note Purine_Nucleoside_Phosphorylase_deoD__Escherichia_coli__A0A 0G3J9R6

SEQ ID NO: 6290 - RNA, 720 nt, synthetic construct
  misc_feature 1..720: note Purine_Nucleoside_Phosphorylase_deoD__Escherichia_coli__AKK 37374
  source 1..720: mol_type = other RNA
atggctaccccacacattaatgcagaaatgggcgatttcgctgacgtagttttgatgccaggcgacccgctgcgtgcgaagtatattgctgaaactttccttgaagatgcccgtgaagtgaacaacgttcgcggtatgctgggcttcaccggtacttacaaaggccgcaaaatttccgtaatgggccacggtatgggtatcccgtcctgctccatctacaccaaagaactgatcaccgatttcggcgtgaagaaaattatccgcgttggttcctgtggcgctgttctgccgcacgtaaaactgcgcgacgtcgttatcggtatgggtgcctgcaccgattccaaagttaaccgcatccgttttaaagaccatgactttgccgctatcgctgacttcgacatggtgcgtaacgcggtagacgcggctaaagcactgggcgttgatgctcgcgttggtaacctgttctccgctgacctgttctactctccggacggcgaaatgttcgacgtgatggaaaaatacggcatcctcggcgtggaaatggaagccgctggcatctacggcgtcgctgcagaatttggcgcgaaagccctgaccatctgcaccgtgtctgaccacatccgcactcacgagcagaccactgccgctgagcgtcagaccaccttcaacgacatgatcaaaatcgcactggaatccgttctgttgggcgataaagagtaa

SEQ ID NO: 6291 - RNA, 720 nt, synthetic construct; identical to SEQ ID NO: 6203
  misc_feature 1..720: note = derived and/or modified sequence opt1 fromPurine_Nucleoside_Phosphorylase_deoD__Escherichia_coli_ _AKK37374
  source 1..720: mol_type = other RNA

SEQ ID NO: 6292 - RNA, 720 nt, synthetic construct; identical to SEQ ID NO: 6204
  misc_feature 1..720: note = derived and/or modified sequence opt2 fromPurine_Nucleoside_Phosphorylase_deoD__Escherichia_coli_ _AKK37374
  source 1..720: mol_type = other RNA

SEQ ID NO: 6293 - RNA, 720 nt, synthetic construct; identical to SEQ ID NO: 6205
  misc_feature 1..720: note = derived and/or modified sequence opt3 fromPurine_Nucleoside_Phosphorylase_deoD__Escherichia_coli_ _AKK37374
  source 1..720: mol_type = other RNA

SEQ ID NO: 6294 - RNA, 720 nt, synthetic construct; identical to SEQ ID NO: 6206
  misc_feature 1..720: note = derived and/or modified sequence opt4 fromPurine_Nucleoside_Phosphorylase_deoD__Escherichia_coli_ _AKK37374
  source 1..720: mol_type = other RNA

SEQ ID NO: 6295 - RNA, 720 nt, synthetic construct; identical to SEQ ID NO: 6207
  misc_feature 1..720: note = derived and/or modified sequence opt5 fromPurine_Nucleoside_Phosphorylase_deoD__Escherichia_coli_ _AKK37374
  source 1..720: mol_type = other RNA

SEQ ID NO: 6296 - RNA, 720 nt, synthetic construct
  misc_feature 1..720: note = derived and/or modified sequence opt6 fromPurine_Nucleoside_Phosphorylase_deoD__Escherichia_coli_ _AKK37374
  source 1..720: mol_type = other RNA
atggcaacaccacatataaatgcagaaatgggagactttgcagatgtagtattaatgccaggagacccactaagagcaaaatacatagcagaaacatttttagaagacgcaagggaagtaaataacgtcagaggaatgttaggctttacaggaacatataaaggaagaaaaataagtgtaatgggacatggaatgggaataccatcatgcagtatatatacaaaagaattaataacagactttggagtaaaaaaaataataagagtaggaagttgtggagcagtactaccacacgtaaaactaagagacgtagtaataggaatgggagcatgtacagatagcaaagtaaatagaataagatttaaggatcatgatttcgcagctatagcagatttcgatatggtaagaaatgcagtagacgcagcaaaagccctaggagtagacgcaagagtgggaaatctatttagtgcagacctattctatagcccggacggagaaatgttcgatgtaatggaaaaatacggaatattaggagtagaaatggaagcagcaggaatatatggagtagcagcagaatttggagcaaaagcattaacaatatgtacagtatcagatcacataagaacacacgaacaaacaacagcagccgaaagacaaactacgtttaatgacatgataaaaatagcactagaaagtgtgctattaggagataaagaataa

SEQ ID NO: 6297 - protein, 239 aa, synthetic construct; identical to SEQ ID NO: 6201
  REGION 1..239: note Purine_Nucleoside_Phosphorylase_deoD__Escherichia_coli__A0A 0G3J9Y2

SEQ ID NO: 6298 - RNA, 720 nt, synthetic construct; identical to SEQ ID NO: 6282
  misc_feature 1..720: note Purine_Nucleoside_Phosphorylase_deoD__Escherichia_coli__AKK 35966
  source 1..720: mol_type = other RNA

SEQ ID NO: 6299 - RNA, 720 nt, synthetic construct; identical to SEQ ID NO: 6203
  misc_feature 1..720: note = derived and/or modified sequence opt1 fromPurine_Nucleoside_Phosphorylase_deoD__Escherichia_coli_ _AKK35966
  source 1..720: mol_type = other RNA

SEQ ID NO: 6300 - RNA, 720 nt, synthetic construct; identical to SEQ ID NO: 6204
  misc_feature 1..720: note = derived and/or modified sequence opt2 fromPurine_Nucleoside_Phosphorylase_deoD__Escherichia_coli_ _AKK35966
  source 1..720: mol_type = other RNA

SEQ ID NO: 6301 - RNA, 720 nt, synthetic construct; identical to SEQ ID NO: 6205
  misc_feature 1..720: note = derived and/or modified sequence opt3 fromPurine_Nucleoside_Phosphorylase_deoD__Escherichia_coli_ _AKK35966
  source 1..720: mol_type = other RNA

SEQ ID NO: 6302 - RNA, 720 nt, synthetic construct; identical to SEQ ID NO: 6206
  misc_feature 1..720: note = derived and/or modified sequence opt4 fromPurine_Nucleoside_Phosphorylase_deoD__Escherichia_coli_ _AKK35966
  source 1..720: mol_type = other RNA

SEQ ID NO: 6303 - RNA, 720 nt, synthetic construct; identical to SEQ ID NO: 6207
  misc_feature 1..720: note = derived and/or modified sequence opt5 fromPurine_Nucleoside_Phosphorylase_deoD__Escherichia_coli_ _AKK35966
  source 1..720: mol_type = other RNA

SEQ ID NO: 6304 - RNA, 720 nt, synthetic construct
  misc_feature 1..720: note = derived and/or modified sequence opt6 fromPurine_Nucleoside_Phosphorylase_deoD__Escherichia_coli_ _AKK35966
  source 1..720: mol_type = other RNA
atggcaacaccacatataaatgcagaaatgggagactttgcagatgtagtattaatgccaggagacccactaagagcaaaatacatagcagaaacatttttagaagatgcaagagaagtaaataacgtaagaggaatgctaggatttacaggaacatataaaggaagaaaaatatcagtaatgggacatggaatgggaataccatcatgctcaatatatacaaaagaattaataacagactttggagtaaaaaaaataataagagtgggatcatgcggagcagtactaccacacgttaaactaagagatgtagtaataggaatgggagcatgtaccgatagcaaagtaaatagaataagatttaaagatcatgatttcgcagcaatagcagatttcgatatggtaaggaatgcagtagacgcggcaaaagcattaggagtggacgcaagagtaggaaatttatttagcgcagacttattctatagcccagatggagaaatgttcgatgtaatggaaaaatatgggatattaggagtagaaatggaagcagcaggaatatatggagtagcagcagaatttggagcaaaagcactaacaatatgtacagtaagcgatcacataagaacacacgaacaaacaacagcggcagaaagacaaacaacattcaatgacatgataaaaatagcactagaaagcgtactattaggagataaagaataa

SEQ ID NO: 6305 - protein, 239 aa, synthetic construct; identical to SEQ ID NO: 6201
  REGION 1..239: note Purine_Nucleoside_Phosphorylase_deoD__Escherichia_coli__A0A 0G3KD68

SEQ ID NO: 6306 - RNA, 720 nt, synthetic construct
  misc_feature 1..720: note Purine_Nucleoside_Phosphorylase_deoD__Escherichia_coli__AKK 51383
  source 1..720: mol_type = other RNA
atggctaccccacacattaatgcagaaatgggcgatttcgctgacgtagttttgatgccaggcgacccgctgcgtgcgaagtatattgctgaaactttccttgaagatgcccgtgaagtgaacaacgttcgcggtatgctgggcttcaccggtacttacaaaggccgcaaaatttccgtaatgggtcacggtatgggtatcccgtcctgctccatctacaccaaagaactgatcaccgatttcggcgtgaagaaaattatccgcgtaggctcctgtggcgctgttctgccacacgtaaaactgcgcgacgtcgttatcggtatgggtgcctgcaccgattccaaagttaaccgtatccgttttaaagaccatgactttgccgctatcgctgactttgacatggtgcgtaacgcggtagacgcggctaaagcactgggcgttgatgctcgcgttggtaacctgttctccgctgacctgttctactctccggacggcgaaatgttcgacgtgatggaaaaatacggcatcctcggcgtggaaatggaagcagctggtatctacggcgtcgctgcagaatttggcgcgaaagccctgaccatctgtaccgtatctgaccacatccgcactcacgagcagaccactgccgctgagcgtcagaccaccttcaacgacatgatcaaaatcgcactggaatccgttctgctgggcgataaagagtaa

SEQ ID NO: 6307 - RNA, 720 nt, synthetic construct; identical to SEQ ID NO: 6203
  misc_feature 1..720: note = derived and/or modified sequence opt1 fromPurine_Nucleoside_Phosphorylase_deoD__Escherichia_coli_ _AKK51383
  source 1..720: mol_type = other RNA

SEQ ID NO: 6308 - RNA, 720 nt, synthetic construct; identical to SEQ ID NO: 6204
  misc_feature 1..720: note = derived and/or modified sequence opt2 fromPurine_Nucleoside_Phosphorylase_deoD__Escherichia_coli_ _AKK51383
  source 1..720: mol_type = other RNA

SEQ ID NO: 6309 - RNA, 720 nt, synthetic construct; identical to SEQ ID NO: 6205
  misc_feature 1..720: note = derived and/or modified sequence opt3 fromPurine_Nucleoside_Phosphorylase_deoD__Escherichia_coli_ _AKK51383
  source 1..720: mol_type = other RNA

SEQ ID NO: 6310 - RNA, 720 nt, synthetic construct; identical to SEQ ID NO: 6206
  misc_feature 1..720: note = derived and/or modified sequence opt4 fromPurine_Nucleoside_Phosphorylase_deoD__Escherichia_coli_ _AKK51383
  source 1..720: mol_type = other RNA

SEQ ID NO: 6311 - RNA, 720 nt, synthetic construct; identical to SEQ ID NO: 6207
  misc_feature 1..720: note = derived and/or modified sequence opt5 fromPurine_Nucleoside_Phosphorylase_deoD__Escherichia_coli_ _AKK51383
  source 1..720: mol_type = other RNA

SEQ ID NO: 6312 - RNA, 720 nt, synthetic construct
  misc_feature 1..720: note = derived and/or modified sequence opt6 fromPurine_Nucleoside_Phosphorylase_deoD__Escherichia_coli_ _AKK51383
  source 1..720: mol_type = other RNA
atggcaacaccacatataaatgcagaaatgggagactttgcagatgttgtattaatgccaggagacccattaagagccaagtacatagcagaaacatttctagaagacgcaagagaagtaaataacgtgagaggaatgttaggatttacaggaacatataaaggaaggaaaataagcgtaatgggccatggaatgggaataccatcatgctcaatatatacaaaagaattaataacagacttcggagtaaaaaaaataataagagtaggatcatgtggagcagtgctaccacacgtaaaattaagagatgtagtaataggaatgggagcctgtacagatagtaaagtaaatagaataagatttaaagatcatgatttcgcagcaatagcagatttcgatatggtacgaaatgcagtagacgcagcaaaagcattaggagtagatgcaagagtaggaaatctatttagcgcggacttattctatagcccagacggagaaatgttcgacgtaatggaaaaatacggaatattaggagtagaaatggaagcagcaggaatatatggagtagcagcagaatttggagcaaaagcactaacaatatgtaccgtaagtgatcacataagaacacacgaacaaacaacagcagcagaacgacaaaccacattcaatgacatgataaaaatagcactagaaagcgtactactaggagataaagaataa

SEQ ID NO: 6313 - protein, 258 aa, synthetic construct
  REGION 1..258: note Purine_Nucleoside_Phosphorylase_deoD__Escherichia_coli__A0A 0H2Z6H1
MDLGGAVTPPLICHKKDKMMATPHINAEMGDFADVVLMPGDPLRAKYIAETFLEDAREVNNVRGMLGFTGTYKGRKISVMGHGMGIPSCSIYTKELITDFGVKKIIRVGSCGAVLPHVKLRDVVIGMGACTDSKVNRIRFKDHDFAAIADFDMVRNAVDAAKALGVDARVGNLFSADLFYSPDGEMFDVMEKYGILGVEMEAAGIYGVAAEFGAKALTICTVSDHIRTHEQTTAAERQTTFNDMIKIALESVLLGDKE

SEQ ID NO: 6314 - RNA, 777 nt, synthetic construct
  misc_feature 1..777: note Purine_Nucleoside_Phosphorylase_deoD__Escherichia_coli__ABJ 03941
  source 1..777: mol_type = other RNA
atggatttgggcggagcagtgactccgcctttaatatgtcacaaaaaggataaaatgatggctactccacacattaatgcagaaatgggcgattttgctgacgtagttttgatgccaggtgacccgctgcgtgcgaagtatattgctgaaactttccttgaagatgcccgtgaagtgaacaacgttcgcggtatgctgggcttcactggtacttacaaaggccgcaaaatttccgtaatgggccacggtatgggtatcccgtcctgctccatctacaccaaagaactgatcactgatttcggcgtgaagaaaattatccgcgttggttcctgtggcgctgttctgccgcacgtaaaactgcgcgacgtcgttatcggtatgggtgcctgcaccgattccaaagttaaccgcatccgttttaaagaccatgactttgccgctatcgctgacttcgacatggtgcgtaacgcggtagacgcggcaaaagcactgggcgttgatgctcgtgttggtaacctgttctccgctgacctgttctactctccggacggcgaaatgttcgacgtgatggaaaaatacggcatcctcggcgtggaaatggaagcggctggtatctacggcgtcgctgcagaatttggcgcgaaagccctgaccatctgcaccgtgtctgaccacatccgcactcacgagcagaccactgccgctgagcgtcagaccaccttcaacgacatgatcaaaatcgcgctggaatccgttctgctgggcgataaagagtaa

SEQ ID NO: 6315 - RNA, 777 nt, synthetic construct
  misc_feature 1..777: note = derived and/or modified sequence opt1 fromPurine_Nucleoside_Phosphorylase_deoD__Escherichia_coli_ _ABJ03941
  source 1..777: mol_type = other RNA
atggacctgggcggggccgtgacgcccccgctcatctgccacaagaaggacaagatgatggccacgccccacatcaacgcggagatgggcgacttcgccgacgtcgtgctgatgcccggggaccccctgcgcgccaagtacatcgccgagaccttcctcgaggacgcccgggaggtgaacaacgtccgcggcatgctggggttcaccggcacctacaagggccggaagatcagcgtgatggggcacggcatggggatcccgtcctgcagcatctacaccaaggagctgatcaccgacttcggcgtgaagaagatcatccgcgtcgggtcctgcggcgcggtgctcccccacgtgaagctgcgggacgtcgtgatcggcatgggggcctgcaccgacagcaaggtgaaccgcatccggttcaaggaccacgacttcgccgccatcgcggacttcgacatggtccgcaacgccgtggacgccgccaaggccctgggcgtggacgcgcgggtcgggaacctcttctccgccgacctgttctacagccccgacggcgagatgttcgacgtgatggagaagtacggcatcctgggggtggagatggaggccgccggcatctacggggtcgccgcggagttcggcgccaaggccctcaccatctgcaccgtgtccgaccacatccgcacgcacgagcagaccaccgccgccgagcggcagaccacgttcaacgacatgatcaagatcgcgctggagagcgtgctgctcggggacaaggagtga

SEQ ID NO: 6316 - RNA, 777 nt, synthetic construct
  misc_feature 1..777: note = derived and/or modified sequence opt2 fromPurine_Nucleoside_Phosphorylase_deoD__Escherichia_coli_ _ABJ03941
  source 1..777: mol_type = other RNA
atggacctcggcggcgccgtcaccccccccctcatctgccacaagaaggacaagatgatggccaccccccacatcaacgccgagatgggcgacttcgccgacgtcgtcctcatgcccggcgaccccctccgcgccaagtacatcgccgagaccttcctcgaggacgcccgcgaggtcaacaacgtccgcggcatgctcggcttcaccggcacctacaagggccgcaagatctccgtcatgggccacggcatgggcatcccctcctgctccatctacaccaaggagctcatcaccgacttcggcgtcaagaagatcatccgcgtcggctcctgcggcgccgtcctcccccacgtcaagctccgcgacgtcgtcatcggcatgggcgcctgcaccgactccaaggtcaaccgcatccgcttcaaggaccacgacttcgccgccatcgccgacttcgacatggtccgcaacgccgtcgacgccgccaaggccctcggcgtcgacgcccgcgtcggcaacctcttctccgccgacctcttctactcccccgacggcgagatgttcgacgtcatggagaagtacggcatcctcggcgtcgagatggaggccgccggcatctacggcgtcgccgccgagttcggcgccaaggccctcaccatctgcaccgtctccgaccacatccgcacccacgagcagaccaccgccgccgagcgccagaccaccttcaacgacatgatcaagatcgccctcgagtccgtcctcctcggcgacaaggagtga

SEQ ID NO: 6317 - RNA, 777 nt, synthetic construct
  misc_feature 1..777: note = derived and/or modified sequence opt3 fromPurine_Nucleoside_Phosphorylase_deoD__Escherichia_coli_ _ABJ03941
  source 1..777: mol_type = other RNA
atggacctgggcggggccgtgactccccctctcatctgccacaagaaagataagatgatggctacaccacatattaacgcagagatgggagacttcgccgatgtcgttcttatgccgggtgaccccctgagagcgaaatacatagctgaaacctttttggaggatgccagggaagtgaataacgtacggggcatgttagggttcacgggaacctataagggccgcaaaatcagcgtgatgggtcacgggatgggcattccttcctgttctatctacacaaaggagctgattactgactttggagtcaagaaaatcatacgagtgggctcatgcggggcagttctaccacatgtgaagctccgtgatgtcgtgatcggaatgggtgcctgtaccgacagtaaagtaaatagaattaggttcaaggatcacgactttgctgcaatcgccgatttcgacatggttcggaacgctgtggatgccgcgaaagcactgggcgtcgacgcccgcgtggggaatctttttagcgctgacctgttctattcccccgatggagaaatgtttgacgtgatggagaagtacggcattttgggtgtcgagatggaagccgcagggatctatggagttgctgccgagttcggcgcgaaggccctcacaatatgcaccgtgtctgatcatattagaactcacgaacagacaaccgcagctgagaggcaaacgacttttaacgacatgatcaaaattgccctggagtcggtactgctcggcgataaggaatga

SEQ ID NO: 6318 - RNA, 777 nt, synthetic construct
  misc_feature 1..777: note = derived and/or modified sequence opt4 fromPurine_Nucleoside_Phosphorylase_deoD__Escherichia_coli_ _ABJ03941
  source 1..777: mol_type = other RNA
atggacctgggcggcgccgtgaccccccccctgatctgccacaagaaggacaagatgatggccaccccccacatcaacgccgagatgggcgacttcgccgacgtggtgctgatgcccggcgaccccctgagagccaagtacatcgccgagaccttcctggaggacgccagagaggtgaacaacgtgagaggcatgctgggcttcaccggcacctacaagggcagaaagatcagcgtgatgggccacggcatgggcatccccagctgcagcatctacaccaaggagctgatcaccgacttcggcgtgaagaagatcatcagagtgggcagctgcggcgccgtgctgccccacgtgaagctgagagacgtggtgatcggcatgggcgcctgcaccgacagcaaggtgaacagaatcagattcaaggaccacgacttcgccgccatcgccgacttcgacatggtgagaaacgccgtggacgccgccaaggccctgggcgtggacgccagagtgggcaacctgttcagcgccgacctgttctacagccccgacggcgagatgttcgacgtgatggagaagtacggcatcctgggcgtggagatggaggccgccggcatctacggcgtggccgccgagttcggcgccaaggccctgaccatctgcaccgtgagcgaccacatcagaacccacgagcagaccaccgccgccgagagacagaccaccttcaacgacatgatcaagatcgccctggagagcgtgctgctgggcgacaaggagtga

SEQ ID NO: 6319 - RNA, 777 nt, synthetic construct
  misc_feature 1..777: note = derived and/or modified sequence opt5 fromPurine_Nucleoside_Phosphorylase_deoD__Escherichia_coli_ _ABJ03941
  source 1..777: mol_type = other RNA
atggacctgggcggggccgtgacaccccctctcatctgccacaagaaagataagatgatggctaccccgcatattaacgccgagatgggagacttcgcggatgtcgttctgatgcccggcgaccctcttagagctaaatacatcgccgaaacgtttctggaggatgcccgggaagtgaataacgtgcgcgggatgctcggattcaccggcacatataaggggagaaaaattagcgtcatgggacacggcatgggcatcccctcctgttctatttacaccaaggagctgatcacagactttggggtgaagaaaatcattcgggttggaagctgcggcgctgtgcttcctcatgtcaagctgcgcgatgtggttatcgggatgggagcctgtaccgactccaaagtgaatcggattagattcaaggatcacgactttgctgccatcgcggatttcgacatggtccgcaacgccgtggatgctgccaaagctctcggcgtggacgccagagtcgggaatctgttttctgcggacctgttctatagccccgatggagaaatgtttgacgttatggagaagtacggcattctcggcgtggagatggaagccgctgggatctatggagtggccgctgagttcggcgccaaggccctgacaatttgcaccgtctccgatcatatccggacgcacgaacagaccacagctgcggagcgccaaaccacatttaacgacatgatcaaaattgcccttgagtctgtgctgctcggggataaggaatga

SEQ ID NO: 6320 - RNA, 777 nt, synthetic construct
  misc_feature 1..777: note = derived and/or modified sequence opt6 fromPurine_Nucleoside_Phosphorylase_deoD__Escherichia_coli_ _ABJ03941
  source 1..777: mol_type = other RNA
atggatttaggaggagcagtaacgccaccactaatatgccataaaaaagacaaaatgatggcaacaccacatataaatgcagaaatgggagactttgcagatgtagtattaatgccaggagacccactaagagcaaaatacatagcagaaacatttctagaagacgcaagagaagtaaataatgtacgaggaatgttaggatttacaggaacatataaaggaagaaaaatatcagtaatgggacatggaatgggaataccatcatgcagcatatatacaaaagaattaataacagattttggagtaaaaaaaataatacgagtaggaagttgcggagcagtactaccacacgtaaaattaagagatgtagtaataggaatgggagcctgtacagatagcaaagtaaatagaattagatttaaagatcacgacttcgcagcaatcgcagatttcgatatggtaagaaatgcagtggacgcggcaaaagcattaggagtagacgcaagagtaggaaatttatttagtgctgacttattttatagcccagacggagaaatgttcgatgtaatggaaaaatacggaatactaggagtagaaatggaagcagcaggaatatatggagtagcagcagaatttggagcaaaagcactaacaatatgcacagtatcagatcatataagaacacatgaacaaacgacagcagcagaaagacaaacaacattcaatgatatgataaaaatagcattagaaagtgtactattaggagataaggaataa

SEQ ID NO: 6321 - protein, 239 aa, synthetic construct; identical to SEQ ID NO: 6201
  REGION 1..239: note Purine_Nucleoside_Phosphorylase_deoD__Escherichia_coli__A0A 0H3EQW1

SEQ ID NO: 6322 - RNA, 720 nt, synthetic construct
  misc_feature 1..720: note Purine_Nucleoside_Phosphorylase_deoD__Escherichia_coli__ADR 29841
  source 1..720: mol_type = other RNA
atggctactccacacattaatgcagaaatgggcgattttgctgacgtagttttgatgccaggcgacccgctgcgtgcgaagtatattgctgaaactttccttgaagatgcccgtgaagtgaacaacgttcgcggtatgctgggcttcaccggtacttataaaggccgcaaaatttccgtaatgggtcacggtatgggtatcccgtcctgctccatctacaccaaagaactgatcaccgatttcggcgtgaagaaaattatccgcgtaggttcctgtggtgctgttctgccgcacgtaaaactgcgtgacgtcgttatcggtatgggtgcctgcaccgattccaaagttaaccgcatccgttttaaagaccatgactttgccgctatcgctgacttcgacatggtgcgtaacgcggtagacgcggcaaaagcactgggcgttgatgctcgcgttggtaacctgttctccgctgacctgttctactctccggacggcgaaatgttcgacgtgatggaaaaatacggcatcctcggcgtggaaatggaagcggctggtatctacggcgtcgctgcagaatttggcgcgaaagccctgaccatctgcaccgtgtctgaccacatccgcactcacgagcagaccactgccgctgagcgtcagaccaccttcaacgacatgatcaaaatcgcgctggaatccgttctgctgggcgataaagagtaa

SEQ ID NO: 6323 - RNA, 720 nt, synthetic construct; identical to SEQ ID NO: 6203
  misc_feature 1..720: note = derived and/or modified sequence opt1 fromPurine_Nucleoside_Phosphorylase_deoD__Escherichia_coli_ _ADR29841
  source 1..720: mol_type = other RNA

SEQ ID NO: 6324 - RNA, 720 nt, synthetic construct; identical to SEQ ID NO: 6204
  misc_feature 1..720: note = derived and/or modified sequence opt2 fromPurine_Nucleoside_Phosphorylase_deoD__Escherichia_coli_ _ADR29841
  source 1..720: mol_type = other RNA

SEQ ID NO: 6325 - RNA, 720 nt, synthetic construct; identical to SEQ ID NO: 6205
  misc_feature 1..720: note = derived and/or modified sequence opt3 fromPurine_Nucleoside_Phosphorylase_deoD__Escherichia_coli_ _ADR29841
  source 1..720: mol_type = other RNA

SEQ ID NO: 6326 - RNA, 720 nt, synthetic construct; identical to SEQ ID NO: 6206
  misc_feature 1..720: note = derived and/or modified sequence opt4 fromPurine_Nucleoside_Phosphorylase_deoD__Escherichia_coli_ _ADR29841
  source 1..720: mol_type = other RNA

SEQ ID NO: 6327 - RNA, 720 nt, synthetic construct; identical to SEQ ID NO: 6207
  misc_feature 1..720: note = derived and/or modified sequence opt5 fromPurine_Nucleoside_Phosphorylase_deoD__Escherichia_coli_ _ADR29841
  source 1..720: mol_type = other RNA

SEQ ID NO: 6328 - RNA, 720 nt, synthetic construct
  misc_feature 1..720: note = derived and/or modified sequence opt6 fromPurine_Nucleoside_Phosphorylase_deoD__Escherichia_coli_ _ADR29841
  source 1..720: mol_type = other RNA
atggcaacaccacatataaatgcagaaatgggagactttgcagatgtagtattaatgcccggagacccgctaagagcaaaatacatagcagaaacatttctagaagacgcaagagaagtaaataacgtaagaggaatgttaggatttacaggaacatataaagggagaaaaatatcagtaatgggacatggaatgggaataccaagttgctcaatatatacaaaagaattaataacagactttggagtaaaaaaaataataagagtaggatcatgcggagcagtactaccacacgtaaaactaagagatgtagtaataggaatgggagcatgtacagatagtaaagtaaatagaataagatttaaagatcacgatttcgcagcaatagcagattttgatatggtaagaaatgcagtggacgcagcaaaagcattgggagtagatgcaagagtaggaaatctatttagcgcagacttgttctatagcccagacggagaaatgtttgatgtaatggaaaaatacggaatactaggagtagaaatggaagcagcaggaatatatggcgtagcagcagaatttggagcaaaagcactaacgatatgtacagtaagcgatcacataagaacacacgaacaaacaacagcagcagaaagacaaacaacattcaatgacatgataaaaatagcactagaaagcgtactattaggagataaagaataa

SEQ ID NO: 6329 - protein, 239 aa, synthetic construct; identical to SEQ ID NO: 6193
  REGION 1..239: note Purine_Nucleoside_Phosphorylase_deoD__Escherichia_coli__A0A 0H3XF09

SEQ ID NO: 6330 - RNA, 720 nt, synthetic construct
  misc_feature 1..720: note Purine_Nucleoside_Phosphorylase_deoD__Escherichia_coli__AKM 37993
  source 1..720: mol_type = other RNA
atggctaccccacacattaatgcagaaatgggcgatttcgctgacgtagttttgatgccaggcgacccgctgcgtgcgaagtatattgctgaaactttccttgaagatgcccgtgaagtgaacaacgttcgcggtatgctgggcttcaccggtacttacaaaggccgcaaaatttccgtaatgggtcacggtatgggtatcccgtcctgctccatctacaccaaagaactgatcaccgatttcggcgtgaagaaaattatccgcgtgggttcctgtggcgcagttctgccgcacgtaaaactgcgcgacgtcgttatcggtatgggtgcctgcaccgattccaaagttaaccgcatccgttttaaagatcatgactttgccgctatcgctgactttgacatggtgcgtaacgcggtagacgcggctaaagcactgggcattgatgctcgcgttggtaacctgttctccgctgacctgttctactctccggacggcgaaatgttcgacgtgatggaaaaatacggcatcctcggcgtggaaatggaagcggctggtatctacggcgtcgctgcagaatttggcgcgaaagccctgaccatctgtaccgtgtctgaccacatccgcactcacgagcagaccactgccgctgagcgtcagaccaccttcaacgacatgatcaaaatcgcactggaatccgttctgctgggcgataaagagtaa

SEQ ID NO: 6331 - RNA, 720 nt, synthetic construct; identical to SEQ ID NO: 6195
  misc_feature 1..720: note = derived and/or modified sequence opt1 fromPurine_Nucleoside_Phosphorylase_deoD__Escherichia_coli_ _AKM37993
  source 1..720: mol_type = other RNA

SEQ ID NO: 6332 - RNA, 720 nt, synthetic construct; identical to SEQ ID NO: 6196
  misc_feature 1..720: note = derived and/or modified sequence opt2 fromPurine_Nucleoside_Phosphorylase_deoD__Escherichia_coli_ _AKM37993
  source 1..720: mol_type = other RNA

SEQ ID NO: 6333 - RNA, 720 nt, synthetic construct; identical to SEQ ID NO: 6197
  misc_feature 1..720: note = derived and/or modified sequence opt3 fromPurine_Nucleoside_Phosphorylase_deoD__Escherichia_coli_ _AKM37993
  source 1..720: mol_type = other RNA

SEQ ID NO: 6334 - RNA, 720 nt, synthetic construct; identical to SEQ ID NO: 6198
  misc_feature 1..720: note = derived and/or modified sequence opt4 fromPurine_Nucleoside_Phosphorylase_deoD__Escherichia_coli_ _AKM37993
  source 1..720: mol_type = other RNA

SEQ ID NO: 6335 - RNA, 720 nt, synthetic construct; identical to SEQ ID NO: 6199
  misc_feature 1..720: note = derived and/or modified sequence opt5 fromPurine_Nucleoside_Phosphorylase_deoD__Escherichia_coli_ _AKM37993
  source 1..720: mol_type = other RNA

SEQ ID NO: 6336 - RNA, 720 nt, synthetic construct
  misc_feature 1..720: note = derived and/or modified sequence opt6 fromPurine_Nucleoside_Phosphorylase_deoD__Escherichia_coli_ _AKM37993
  source 1..720: mol_type = other RNA
atggcaacgcctcatataaatgcagaaatgggagactttgcagatgtagtactaatgccaggagaccctttaagagcaaagtacatagcagagacatttctagaagacgcaagagaagtaaataacgtaagaggaatgttaggattcacaggaacatataaaggacgaaaaatatcagtaatgggacatggaatgggaataccatcatgctcaatatacacaaaagaattaataacagactttggagtaaaaaaaataataagagtaggttcatgcggagcagtattaccacacgtaaaattacgagatgtagtaatcggaatgggagcatgtacagatagtaaagtaaatagaataagatttaaagatcacgattttgcagccatagcagatttcgatatggtaagaaatgcagtagacgcagctaaagcattaggaatagacgcaagagtaggaaatctatttagtgcagacctattctatagcccagacggagaaatgttcgatgtaatggaaaaatacgggatattaggagtagaaatggaagcagcaggaatatatggagtagcagcagaatttggagcaaaagcactaacaatatgtacagtaagtgatcacatacgtacacacgaacaaacaacagcagcagaaagacaaacaacattcaatgacatgataaaaatagcattagaaagcgtattattaggagataaagaataa

SEQ ID NO: 6337 - protein, 239 aa, synthetic construct; identical to SEQ ID NO: 6193
  REGION 1..239: note Purine_Nucleoside_Phosphorylase_deoD__Escherichia_coli__A0A 0J9WZC9

SEQ ID NO: 6338 - RNA, 720 nt, synthetic construct
  misc_feature 1..720: note Purine_Nucleoside_Phosphorylase_deoD__Escherichia_coli__BAL 40848
  source 1..720: mol_type = other RNA
atggctaccccacacattaatgcagaaatgggcgatttcgctgacgtagttttgatgccaggcgacccgctgcgtgcgaagtatattgctgaaactttccttgaagatgcccgtgaagtgaacaacgttcgcggtatgctgggcttcaccggtacttacaaaggccgcaaaatttccgtaatgggtcacggtatgggtatcccgtcctgctccatctacaccaaagaactgatcaccgatttcggcgtgaagaaaattatccgcgtgggttcctgtggcgcagttctgccgcacgtaaaactgcgcgacgtcgttatcggtatgggtgcctgcaccgattccaaagttaaccgcatccgttttaaagaccatgactttgccgctatcgctgacttcgacatggtgcgtaacgcagtagatgcagctaaagcactgggtattgatgctcgcgtgggtaacctgttctccgctgacctgttctactctccggacggcgaaatgttcgacgtgatggaaaaatacggcattctcggcgtggaaatggaagcggctggtatctacggcgtcgctgcagaatttggcgcgaaagccctgaccatctgcaccgtatctgaccacatccgcactcacgagcagaccactgccgctgagcgtcagactaccttcaacgacatgatcaaaatcgcactggaatccgttctgctgggcgataaagagtaa

SEQ ID NO: 6339 - RNA, 720 nt, synthetic construct; identical to SEQ ID NO: 6195
  misc_feature 1..720: note = derived and/or modified sequence opt1 fromPurine_Nucleoside_Phosphorylase_deoD__Escherichia_coli_ _BAL40848
  source 1..720: mol_type = other RNA

SEQ ID NO: 6340 - RNA, 720 nt, synthetic construct; identical to SEQ ID NO: 6196
  misc_feature 1..720: note = derived and/or modified sequence opt2 fromPurine_Nucleoside_Phosphorylase_deoD__Escherichia_coli_ _BAL40848
  source 1..720: mol_type = other RNA

SEQ ID NO: 6341 - RNA, 720 nt, synthetic construct; identical to SEQ ID NO: 6197
  misc_feature 1..720: note = derived and/or modified sequence opt3 fromPurine_Nucleoside_Phosphorylase_deoD__Escherichia_coli_ _BAL40848
  source 1..720: mol_type = other RNA

SEQ ID NO: 6342 - RNA, 720 nt, synthetic construct; identical to SEQ ID NO: 6198
  misc_feature 1..720: note = derived and/or modified sequence opt4 fromPurine_Nucleoside_Phosphorylase_deoD__Escherichia_coli_ _BAL40848
  source 1..720: mol_type = other RNA

SEQ ID NO: 6343 - RNA, 720 nt, synthetic construct; identical to SEQ ID NO: 6199
  misc_feature 1..720: note = derived and/or modified sequence opt5 fromPurine_Nucleoside_Phosphorylase_deoD__Escherichia_coli_ _BAL40848
  source 1..720: mol_type = other RNA

SEQ ID NO: 6344 - RNA, 720 nt, synthetic construct
  misc_feature 1..720: note = derived and/or modified sequence opt6 fromPurine_Nucleoside_Phosphorylase_deoD__Escherichia_coli_ _BAL40848
  source 1..720: mol_type = other RNA
atggcaacaccacatataaacgcagaaatgggagactttgcagatgtagtactaatgccaggagacccattaagagcgaaatacatagcagaaacatttctagaagacgcaagagaagtaaataacgtaagaggaatgttaggatttacaggaacatataaaggaagaaaaatatcagtaatgggacatggaatgggaataccttcatgcagtatatatacaaaagaactaataacggattttggagtaaaaaaaataataagagtaggatcatgtggagcagtactaccacacgtaaaattaagagatgtagtaataggaatgggggcctgtacagatagcaaagtaaatagaataagatttaaagatcacgatttcgcagcaatagcagatttcgatatggtaagaaatgcagtggacgcagcaaaagcactaggaatagacgcaagagtaggaaatctatttagcgcagacttattctatagtccggacggagaaatgttcgatgtaatggaaaaatacggaatattaggagtagaaatggaagcagccggaatatatggagtagcagcagaatttggagcgaaagcattaacaatatgtacagtaagtgatcacataagaacacacgaacaaacaacagcagcagaaagacaaacaacattcaatgacatgataaaaatagcactagaaagtgtactcttaggagataaagaataa

SEQ ID NO: 6345 - protein, 239 aa, synthetic construct; identical to SEQ ID NO: 6193
  REGION 1..239: note Purine_Nucleoside_Phosphorylase_deoD__Escherichia_coli__A7Z VS7

SEQ ID NO: 6346 - RNA, 720 nt, synthetic construct; identical to SEQ ID NO: 6234
  misc_feature 1..720: note Purine_Nucleoside_Phosphorylase_deoD__Escherichia_coli__ABV 17365
  source 1..720: mol_type = other RNA

SEQ ID NO: 6347 - RNA, 720 nt, synthetic construct; identical to SEQ ID NO: 6195
  misc_feature 1..720: note = derived and/or modified sequence opt1 fromPurine_Nucleoside_Phosphorylase_deoD__Escherichia_coli_ _ABV17365
  source 1..720: mol_type = other RNA

SEQ ID NO: 6348 - RNA, 720 nt, synthetic construct; identical to SEQ ID NO: 6196
  misc_feature 1..720: note = derived and/or modified sequence opt2 fromPurine_Nucleoside_Phosphorylase_deoD__Escherichia_coli_ _ABV17365
  source 1..720: mol_type = other RNA

SEQ ID NO: 6349 - RNA, 720 nt, synthetic construct; identical to SEQ ID NO: 6197
  misc_feature 1..720: note = derived and/or modified sequence opt3 fromPurine_Nucleoside_Phosphorylase_deoD__Escherichia_coli_ _ABV17365
  source 1..720: mol_type = other RNA

SEQ ID NO: 6350 - RNA, 720 nt, synthetic construct; identical to SEQ ID NO: 6198
  misc_feature 1..720: note = derived and/or modified sequence opt4 fromPurine_Nucleoside_Phosphorylase_deoD__Escherichia_coli_ _ABV17365
  source 1..720: mol_type = other RNA

SEQ ID NO: 6351 - RNA, 720 nt, synthetic construct; identical to SEQ ID NO: 6199
  misc_feature 1..720: note = derived and/or modified sequence opt5 fromPurine_Nucleoside_Phosphorylase_deoD__Escherichia_coli_ _ABV17365
  source 1..720: mol_type = other RNA

SEQ ID NO: 6352 - RNA, 720 nt, synthetic construct
  misc_feature 1..720: note = derived and/or modified sequence opt6 fromPurine_Nucleoside_Phosphorylase_deoD__Escherichia_coli_ _ABV17365
  source 1..720: mol_type = other RNA
atggcaacaccacatataaatgcagaaatgggagacttcgcagacgttgtactaatgccaggagacccattaagagcaaaatacatagcagaaacatttctagaagacgcaagagaagtaaataacgtaagaggaatgttaggctttacaggaacatataaaggaagaaaaataagtgtaatgggacatggaatgggaataccatcatgcagtatatatacaaaagaactaataacagactttggagtaaaaaaaataataagagtaggatcatgcggagcagtactaccacacgtaaaattaagggatgtagtgataggaatgggagcatgtacagatagcaaagtaaatagaataagattcaaagatcacgatttcgcagcaatagcagatttcgacatggtaagaaatgcagtagacgcagcaaaagcattaggaatagacgcaagagtaggaaatctatttagcgcagacctattctatagtccagacggagaaatgttcgatgtaatggaaaaatacggaatactaggagtggaaatggaagcagcaggaatatatggagtagcagcagaatttggagcaaaagcactaacaatatgtacagtgagcgatcacataagaacacacgaacaaacaacagcggcagaaagacaaacaacattcaatgacatgataaaaatagcactagaaagtgtattattaggagataaagaataa

SEQ ID NO: 6353 - protein, 239 aa, synthetic construct; identical to SEQ ID NO: 6193
  REGION 1..239: note Purine_Nucleoside_Phosphorylase_deoD__Escherichia_coli__A8A 8B3

SEQ ID NO: 6354 - RNA, 720 nt, synthetic construct; identical to SEQ ID NO: 6330
  misc_feature 1..720: note Purine_Nucleoside_Phosphorylase_deoD__Escherichia_coli__ABV 08767
  source 1..720: mol_type = other RNA

SEQ ID NO: 6355 - RNA, 720 nt, synthetic construct; identical to SEQ ID NO: 6195
  misc_feature 1..720: note = derived and/or modified sequence opt1 fromPurine_Nucleoside_Phosphorylase_deoD__Escherichia_coli_ _ABV08767
  source 1..720: mol_type = other RNA

SEQ ID NO: 6356 - RNA, 720 nt, synthetic construct; identical to SEQ ID NO: 6196
  misc_feature 1..720: note = derived and/or modified sequence opt2 fromPurine_Nucleoside_Phosphorylase_deoD__Escherichia_coli_ _ABV08767
  source 1..720: mol_type = other RNA

SEQ ID NO: 6357 - RNA, 720 nt, synthetic construct; identical to SEQ ID NO: 6197
  misc_feature 1..720: note = derived and/or modified sequence opt3 fromPurine_Nucleoside_Phosphorylase_deoD__Escherichia_coli_ _ABV08767
  source 1..720: mol_type = other RNA

SEQ ID NO: 6358 - RNA, 720 nt, synthetic construct; identical to SEQ ID NO: 6198
  misc_feature 1..720: note = derived and/or modified sequence opt4 fromPurine_Nucleoside_Phosphorylase_deoD__Escherichia_coli_ _ABV08767
  source 1..720: mol_type = other RNA

SEQ ID NO: 6359 - RNA, 720 nt, synthetic construct; identical to SEQ ID NO: 6199
  misc_feature 1..720: note = derived and/or modified sequence opt5 fromPurine_Nucleoside_Phosphorylase_deoD__Escherichia_coli_ _ABV08767
  source 1..720: mol_type = other RNA

SEQ ID NO: 6360 - RNA, 720 nt, synthetic construct
  misc_feature 1..720: note = derived and/or modified sequence opt6 fromPurine_Nucleoside_Phosphorylase_deoD__Escherichia_coli_ _ABV08767
  source 1..720: mol_type = other RNA
atggcaacaccacatataaatgcagaaatgggagactttgcagacgtagtactaatgccaggagacccacttagagcaaaatacatagcagaaacatttctagaagacgctagagaagtaaataacgtaagaggaatgttaggatttacaggaacatataaaggaagaaaaatatcagtaatgggacatggaatgggaataccatcatgtagcatatatacaaaagaactaataacagactttggagtaaaaaaaataataagagtaggatcttgcggggcagtactaccacacgtaaaattaagagatgtagtaataggaatgggagcatgtacagattcaaaagtaaatagaatacgatttaaagatcacgatttcgcagcaatagcagactttgatatggtaagaaatgcagtagacgcggcaaaagctttaggaatagacgcaagagtaggaaatttatttagtgcagacttattctatagcccagatggagaaatgttcgatgtaatggaaaaatatggaatattaggcgtggaaatggaagcagcaggaatatatggagtagcagcagaatttggagcaaaagcattaacaatatgtacagtaagcgaccatatacgaacacacgaacaaacaacagcagccgaaagacaaacaacatttaatgatatgataaaaatagcattagaaagcgtactattaggagataaagaataa

SEQ ID NO: 6361 - protein, 239 aa, synthetic construct; identical to SEQ ID NO: 6201
  REGION 1..239: note Purine_Nucleoside_Phosphorylase_deoD__Escherichia_coli__B1I S35

SEQ ID NO: 6362 - RNA, 720 nt, synthetic construct
  misc_feature 1..720: note Purine_Nucleoside_Phosphorylase_deoD__Escherichia_coli__ACA 79283
  source 1..720: mol_type = other RNA
atggctaccccacacattaatgcagaaatgggcgatttcgctgacgtagttttgatgccaggcgacccgctgcgtgcgaagtatattgctgaaactttccttgaagatgcccgtgaagtgaacaacgttcgcggtatgctgggcttcaccggtacttacaaaggccgcaaaatttccgtaatgggtcacggtatgggtatcccgtcctgctccatctacaccaaagaactgatcaccgatttcggcgtaaagaaaattatccgcgtaggctcctgtggcgctgttctgccgcacgtaaaactgcgcgacgtcgttatcggtatgggtgcctgcaccgattccaaagttaaccgtatccgttttaaagaccatgactttgccgctatcgctgactttgacatggtgcgtaacgcggtagacgcggctaaagcactgggcgttgatgctcgcgttggtaacctgttctccgctgacctgttctactctccggacggcgaaatgttcgacgtgatggaaaaatacggcatcctcggcgtggaaatggaagcggctggtatctacggcgtcgctgcagaatttggcgcgaaagccctgaccatctgcaccgtgtctgaccacatccgcactcacgagcagaccactgccgctgagcgtcagaccaccttcaacgacatgatcaaaatcgcactggaatccgttctgctgggcgataaagagtaa

SEQ ID NO: 6363 - RNA, 720 nt, synthetic construct; identical to SEQ ID NO: 6203
  misc_feature 1..720: note = derived and/or modified sequence opt1 fromPurine_Nucleoside_Phosphorylase_deoD__Escherichia_coli_ _ACA79283
  source 1..720: mol_type = other RNA

SEQ ID NO: 6364 - RNA, 720 nt, synthetic construct; identical to SEQ ID NO: 6204
  misc_feature 1..720: note = derived and/or modified sequence opt2 fromPurine_Nucleoside_Phosphorylase_deoD__Escherichia_coli_ _ACA79283
  source 1..720: mol_type = other RNA

SEQ ID NO: 6365 - RNA, 720 nt, synthetic construct; identical to SEQ ID NO: 6205
  misc_feature 1..720: note = derived and/or modified sequence opt3 fromPurine_Nucleoside_Phosphorylase_deoD__Escherichia_coli_ _ACA79283
  source 1..720: mol_type = other RNA

SEQ ID NO: 6366 - RNA, 720 nt, synthetic construct; identical to SEQ ID NO: 6206
  misc_feature 1..720: note = derived and/or modified sequence opt4 fromPurine_Nucleoside_Phosphorylase_deoD__Escherichia_coli_ _ACA79283
  source 1..720: mol_type = other RNA

SEQ ID NO: 6367 - RNA, 720 nt, synthetic construct; identical to SEQ ID NO: 6207
  misc_feature 1..720: note = derived and/or modified sequence opt5 fromPurine_Nucleoside_Phosphorylase_deoD__Escherichia_coli_ _ACA79283
  source 1..720: mol_type = other RNA

SEQ ID NO: 6368 - RNA, 720 nt, synthetic construct
  misc_feature 1..720: note = derived and/or modified sequence opt6 fromPurine_Nucleoside_Phosphorylase_deoD__Escherichia_coli_ _ACA79283
  source 1..720: mol_type = other RNA
atggcaacaccacatataaatgcagaaatgggagactttgcagatgtagtactaatgccaggagacccactaagagcaaaatacattgcagaaacctttttagaagacgcaagagaagtaaataacgtaagaggaatgttaggatttacaggaacatataaaggaagaaaaataagtgtaatgggacatggaatgggaataccaagttgttcgatatatacaaaagaattaataacagactttggcgtaaaaaaaataataagagtaggaagctgcggagcagtactaccacacgtaaaattaagagatgtagtaataggaatgggagcctgtacagatagcaaagtaaatagaattagatttaaagatcacgattttgcggcaatagccgattttgatatggtaagaaatgcagtagacgcagcaaaagcattaggagtggacgcaagagtaggaaatctatttagtgcagacttattttatagcccagacggggaaatgttcgatgtaatggaaaaatacggaatattaggagtagaaatggaagcagcaggaatatatggagtggcagcggaatttggagcaaaagcactaacaatatgtacagtaagcgatcacataagaacacacgaacaaacaacagcagccgaaagacaaacaacgttcaatgacatgataaaaatagcactagaaagtgtattattaggagataaagaataa

SEQ ID NO: 6369 - protein, 239 aa, synthetic construct; identical to SEQ ID NO: 6193
  REGION 1..239: note Purine_Nucleoside_Phosphorylase_deoD__Escherichia_coli__B1L EI9

SEQ ID NO: 6370 - RNA, 720 nt, synthetic construct
  misc_feature 1..720: note Purine_Nucleoside_Phosphorylase_deoD__Escherichia_coli__ACB 16204
  source 1..720: mol_type = other RNA
atggctaccccacacattaatgcagaaatgggcgatttcgctgacgtagttttgatgccaggcgacccgctgcgtgcgaagtatattgctgaaactttccttgaagatgcccgtgaagtgaacaacgttcgcggtatgctgggcttcaccggtacttacaaaggccgcaaaatttccgtaatggggcacggtatgggtatcccgtcctgctccatctacaccaaagaactgatcaccgatttcggcgtgaagaaaattatccgcgtaggctcctgtggcgctgttctgccgcacgtaaaactgcgcgacgtcgttatcggtatgggtgcctgcaccgattccaaagttaaccgtatccgttttaaagaccatgactttgccgctatcgctgactttgacatggtgcgtaacgcggtagatgcagctaaagcactgggcattgatgctcgcgttggtaacctgttctccgctgacctgttttactctccggacggcgaaatgttcgacgtgatggaaaaatacggcatcctcggcgtggaaatggaagcagctggtatctacggcgtcgctgcagaatttggcgcgaaagccctgaccatctgcaccgtgtctgaccacatccgcactcacgagcagaccactgccgctgagcgtcagaccaccttcaacgacatgatcaaaatcgcactggaatccgttctgttgggcgataaagagtaa

SEQ ID NO: 6371 - RNA, 720 nt, synthetic construct; identical to SEQ ID NO: 6195
  misc_feature 1..720: note = derived and/or modified sequence opt1 fromPurine_Nucleoside_Phosphorylase_deoD__Escherichia_coli_ _ACB16204
  source 1..720: mol_type = other RNA

SEQ ID NO: 6372 - RNA, 720 nt, synthetic construct; identical to SEQ ID NO: 6196
  misc_feature 1..720: note = derived and/or modified sequence opt2 fromPurine_Nucleoside_Phosphorylase_deoD__Escherichia_coli_ _ACB16204
  source 1..720: mol_type = other RNA

SEQ ID NO: 6373 - RNA, 720 nt, synthetic construct; identical to SEQ ID NO: 6197
  misc_feature 1..720: note = derived and/or modified sequence opt3 fromPurine_Nucleoside_Phosphorylase_deoD__Escherichia_coli_ _ACB16204
  source 1..720: mol_type = other RNA

SEQ ID NO: 6374 - RNA, 720 nt, synthetic construct; identical to SEQ ID NO: 6198
  misc_feature 1..720: note = derived and/or modified sequence opt4 fromPurine_Nucleoside_Phosphorylase_deoD__Escherichia_coli_ _ACB16204
  source 1..720: mol_type = other RNA

SEQ ID NO: 6375 - RNA, 720 nt, synthetic construct; identical to SEQ ID NO: 6199
  misc_feature 1..720: note = derived and/or modified sequence opt5 fromPurine_Nucleoside_Phosphorylase_deoD__Escherichia_coli_ _ACB16204
  source 1..720: mol_type = other RNA

SEQ ID NO: 6376 - RNA, 720 nt, synthetic construct
  misc_feature 1..720: note = derived and/or modified sequence opt6 fromPurine_Nucleoside_Phosphorylase_deoD__Escherichia_coli_ _ACB16204
  source 1..720: mol_type = other RNA
atggcaacaccacatataaatgcagaaatgggagactttgcagatgtagtactaatgccaggagacccactaagagcaaaatacatagcagaaacatttctagaagacgcaagagaagtaaataacgtaagaggaatgttaggatttacaggaacatataaaggaagaaaaataagtgtaatgggacatggcatgggaataccatcatgttcaatttatacaaaagaattaataacagactttggagtaaaaaaaatcataagagtaggatcatgcggagcagtactaccacacgtaaaattaagagatgtcgtaattggaatgggagcatgcacagatagtaaagtaaatagaataagattcaaagatcatgatttcgcagcaatagcagatttcgatatggtaagaaatgcagtagacgcagcaaaagcactaggaatagacgcaagagtaggtaatctatttagcgcagacttattctatagtccagacggagaaatgttcgatgtaatggaaaaatacggaatattaggagtagaaatggaagcagcaggaatatatggcgtagcagcagaatttggcgcaaaagcactaacgatatgtaccgtaagcgatcatataagaacgcacgaacagacaacagcggcagagagacaaacaacattcaatgacatgataaaaatagcactagaaagtgtactattaggagataaagaataa

SEQ ID NO: 6377 - protein, 239 aa, synthetic construct; identical to SEQ ID NO: 6193
  REGION 1..239: note Purine_Nucleoside_Phosphorylase_deoD__Escherichia_coli__B1X FJ4

SEQ ID NO: 6378 - RNA, 720 nt, synthetic construct; identical to SEQ ID NO: 6338
  misc_feature 1..720: note Purine_Nucleoside_Phosphorylase_deoD__Escherichia_coli__ACB 05312
  source 1..720: mol_type = other RNA

SEQ ID NO: 6379 - RNA, 720 nt, synthetic construct; identical to SEQ ID NO: 6195
  misc_feature 1..720: note = derived and/or modified sequence opt1 fromPurine_Nucleoside_Phosphorylase_deoD__Escherichia_coli_ _ACB05312
  source 1..720: mol_type = other RNA

SEQ ID NO: 6380 - RNA, 720 nt, synthetic construct; identical to SEQ ID NO: 6196
  misc_feature 1..720: note = derived and/or modified sequence opt2 fromPurine_Nucleoside_Phosphorylase_deoD__Escherichia_coli_ _ACB05312
  source 1..720: mol_type = other RNA

SEQ ID NO: 6381 - RNA, 720 nt, synthetic construct; identical to SEQ ID NO: 6197
  misc_feature 1..720: note = derived and/or modified sequence opt3 fromPurine_Nucleoside_Phosphorylase_deoD__Escherichia_coli_ _ACB05312
  source 1..720: mol_type = other RNA

SEQ ID NO: 6382 - RNA, 720 nt, synthetic construct; identical to SEQ ID NO: 6198
  misc_feature 1..720: note = derived and/or modified sequence opt4 fromPurine_Nucleoside_Phosphorylase_deoD__Escherichia_coli_ _ACB05312
  source 1..720: mol_type = other RNA

SEQ ID NO: 6383 - RNA, 720 nt, synthetic construct; identical to SEQ ID NO: 6199
  misc_feature 1..720: note = derived and/or modified sequence opt5 fromPurine_Nucleoside_Phosphorylase_deoD__Escherichia_coli_ _ACB05312
  source 1..720: mol_type = other RNA

SEQ ID NO: 6384 - RNA, 720 nt, synthetic construct
  misc_feature 1..720: note = derived and/or modified sequence opt6 fromPurine_Nucleoside_Phosphorylase_deoD__Escherichia_coli_ _ACB05312
  source 1..720: mol_type = other RNA
atggcaacaccacatataaatgcagaaatgggagactttgcagatgtagtactaatgccaggagacccattaagagcaaaatacatagcagaaacatttctagaagacgcaagagaagtaaataacgtaagaggaatgttaggatttacaggaacgtataaaggaagaaaaatctcagtaatgggacatggaatgggaataccatcatgtagtatatataccaaagaattaataacagactttggagtaaaaaaaataataagagtaggatcatgcggagcagtactaccacacgtaaaattaagagatgtagtaataggaatgggagcatgtacagatagcaaagtaaatagaattagatttaaagatcacgacttcgcagcaatagcagatttcgatatggtaagaaatgcagtagatgcggcaaaagcattaggaatagacgcaagagtaggaaatttatttagtgcggacttattttatagcccagatggagaaatgttcgatgtaatggaaaaatacggaatactaggagtagaaatggaagcagcaggaatatacggagtagcagcggaatttggagcaaaagcattaacaatctgtacagtaagcgatcacataagaacacacgaacaaacaacagcagcagaaagacaaacaacgttcaatgacatgataaaaatagcactagaaagtgtactattaggcgataaagaataa

SEQ ID NO: 6385 - protein, 239 aa, synthetic construct; identical to SEQ ID NO: 6201
  REGION 1..239: note Purine_Nucleoside_Phosphorylase_deoD__Escherichia_coli__B3H EI4

SEQ ID NO: 6386 - RNA, 720 nt, synthetic construct; identical to SEQ ID NO: 6218
  misc_feature 1..720: note Purine_Nucleoside_Phosphorylase_deoD__Escherichia_coli__AIF 62240
  source 1..720: mol_type = other RNA

SEQ ID NO: 6387 - RNA, 720 nt, synthetic construct; identical to SEQ ID NO: 6203
  misc_feature 1..720: note = derived and/or modified sequence opt1 fromPurine_Nucleoside_Phosphorylase_deoD__Escherichia_coli_ _AIF62240
  source 1..720: mol_type = other RNA

SEQ ID NO: 6388 - RNA, 720 nt, synthetic construct; identical to SEQ ID NO: 6204
  misc_feature 1..720: note = derived and/or modified sequence opt2 fromPurine_Nucleoside_Phosphorylase_deoD__Escherichia_coli_ _AIF62240
  source 1..720: mol_type = other RNA

SEQ ID NO: 6389 - RNA, 720 nt, synthetic construct; identical to SEQ ID NO: 6205
  misc_feature 1..720: note = derived and/or modified sequence opt3 fromPurine_Nucleoside_Phosphorylase_deoD__Escherichia_coli_ _AIF62240
  source 1..720: mol_type = other RNA

SEQ ID NO: 6390 - RNA, 720 nt, synthetic construct; identical to SEQ ID NO: 6206
  misc_feature 1..720: note = derived and/or modified sequence opt4 fromPurine_Nucleoside_Phosphorylase_deoD__Escherichia_coli_ _AIF62240
  source 1..720: mol_type = other RNA

SEQ ID NO: 6391 - RNA, 720 nt, synthetic construct; identical to SEQ ID NO: 6207
  misc_feature 1..720: note = derived and/or modified sequence opt5 fromPurine_Nucleoside_Phosphorylase_deoD__Escherichia_coli_ _AIF62240
  source 1..720: mol_type = other RNA

SEQ ID NO: 6392 - RNA, 720 nt, synthetic construct
  misc_feature 1..720: note = derived and/or modified sequence opt6 fromPurine_Nucleoside_Phosphorylase_deoD__Escherichia_coli_ _AIF62240
  source 1..720: mol_type = other RNA
atggcaacaccacatataaatgcagaaatgggagactttgcagatgtagtattaatgccaggagacccactaagagcaaaatacatagcagaaacatttctagaagacgcaagagaagtaaataatgtaagaggaatgttaggatttacaggaacatataaagggagaaaaataagtgtaatgggccatggaatgggaataccatcatgctcaatatatacaaaagaattaataacagacttcggagtaaaaaagataataagagtaggatcatgcggagcagtactaccacacgtgaaattaagagatgtagtaataggaatgggtgcatgtacagacagcaaagtaaatagaataagatttaaagatcacgatttcgcagcaatagccgatttcgatatggtaagaaatgcagtagacgcagcaaaagcattaggagtagacgcaagagtaggaaatctatttagcgcagacttattctatagcccagacggagaaatgtttgatgtaatggaaaaatacggaatattaggagtagaaatggaagcagcaggaatatatggagtagcagcagaatttggagcaaaagcactaacaatctgtacagtaagcgatcacataagaacacacgaacaaacaacagcagcagaaagacaaacaacattcaatgacatgataaaaatagcattagaaagcgtattattaggagataaagaataa

SEQ ID NO: 6393 - protein, 239 aa, synthetic construct; identical to SEQ ID NO: 6193
  REGION 1..239: note Purine_Nucleoside_Phosphorylase_deoD__Escherichia_coli__B5Z 4R6

SEQ ID NO: 6394 - RNA, 720 nt, synthetic construct; identical to SEQ ID NO: 6258
  misc_feature 1..720: note Purine_Nucleoside_Phosphorylase_deoD__Escherichia_coli__ACI 39330
  source 1..720: mol_type = other RNA

SEQ ID NO: 6395 - RNA, 720 nt, synthetic construct; identical to SEQ ID NO: 6195
  misc_feature 1..720: note = derived and/or modified sequence opt1 fromPurine_Nucleoside_Phosphorylase_deoD__Escherichia_coli_ _ACI39330
  source 1..720: mol_type = other RNA

SEQ ID NO: 6396 - RNA, 720 nt, synthetic construct; identical to SEQ ID NO: 6196
  misc_feature 1..720: note = derived and/or modified sequence opt2 fromPurine_Nucleoside_Phosphorylase_deoD__Escherichia_coli_ _ACI39330
  source 1..720: mol_type = other RNA

SEQ ID NO: 6397 - RNA, 720 nt, synthetic construct; identical to SEQ ID NO: 6197
  misc_feature 1..720: note = derived and/or modified sequence opt3 fromPurine_Nucleoside_Phosphorylase_deoD__Escherichia_coli_ _ACI39330
  source 1..720: mol_type = other RNA

SEQ ID NO: 6398 - RNA, 720 nt, synthetic construct; identical to SEQ ID NO: 6198
  misc_feature 1..720: note = derived and/or modified sequence opt4 fromPurine_Nucleoside_Phosphorylase_deoD__Escherichia_coli_ _ACI39330
  source 1..720: mol_type = other RNA

SEQ ID NO: 6399 - RNA, 720 nt, synthetic construct; identical to SEQ ID NO: 6199
  misc_feature 1..720: note = derived and/or modified sequence opt5 fromPurine_Nucleoside_Phosphorylase_deoD__Escherichia_coli_ _ACI39330
  source 1..720: mol_type = other RNA

SEQ ID NO: 6400 - RNA, 720 nt, synthetic construct
  misc_feature 1..720: note = derived and/or modified sequence opt6 fromPurine_Nucleoside_Phosphorylase_deoD__Escherichia_coli_ _ACI39330
  source 1..720: mol_type = other RNA
atggcaacaccacatataaatgctgaaatgggagacttcgcagatgtagtactaatgccaggagacccactaagagcaaaatatatagcagaaacatttctagaagacgcaagagaagtaaataacgtaagagggatgttaggatttacaggaacatataaaggaagaaaaatatcagtaatgggacatggaatgggaataccaagctgctcaatctatacaaaggaactaataacagactttggagtgaaaaaaataataagagtaggaagttgcggagcagtattaccacacgtaaaattaagagatgtagtaataggaatgggagcatgtacagatagcaaagtaaatagaataagatttaaagatcacgatttcgcagcaatagcagattttgatatggtaagaaatgccgtagacgcagcaaaagcattggggatagacgcaagagtaggaaatctatttagcgcagacttattctatagcccagacggggaaatgttcgatgtaatggaaaaatacggaatattaggagtagaaatggaagcagcaggaatatatggagtagcagcagaatttggagcaaaagcattaacaatatgtacagtaagcgatcacataagaacacatgaacaaacaacagcagcagaaagacaaacaacattcaatgacatgataaaaatagcactagaaagcgtattattaggcgataaagaataa

SEQ ID NO: 6401 - protein, 239 aa, synthetic construct; identical to SEQ ID NO: 6193
  REGION 1..239: note Purine_Nucleoside_Phosphorylase_deoD__Escherichia_coli__B6I 6N1

SEQ ID NO: 6402 - RNA, 720 nt, synthetic construct; identical to SEQ ID NO: 6234
  misc_feature 1..720: note Purine_Nucleoside_Phosphorylase_deoD__Escherichia_coli__BAG 80183
  source 1..720: mol_type = other RNA

SEQ ID NO: 6403 - RNA, 720 nt, synthetic construct; identical to SEQ ID NO: 6195
  misc_feature 1..720: note = derived and/or modified sequence opt1 fromPurine_Nucleoside_Phosphorylase_deoD__Escherichia_coli_ _BAG80183
  source 1..720: mol_type = other RNA

SEQ ID NO: 6404 - RNA, 720 nt, synthetic construct; identical to SEQ ID NO: 6196
  misc_feature 1..720: note = derived and/or modified sequence opt2 fromPurine_Nucleoside_Phosphorylase_deoD__Escherichia_coli_ _BAG80183
  source 1..720: mol_type = other RNA

SEQ ID NO: 6405 - RNA, 720 nt, synthetic construct; identical to SEQ ID NO: 6197
  misc_feature 1..720: note = derived and/or modified sequence opt3 fromPurine_Nucleoside_Phosphorylase_deoD__Escherichia_coli_ _BAG80183
  source 1..720: mol_type = other RNA

SEQ ID NO: 6406 - RNA, 720 nt, synthetic construct; identical to SEQ ID NO: 6198
  misc_feature 1..720: note = derived and/or modified sequence opt4 fromPurine_Nucleoside_Phosphorylase_deoD__Escherichia_coli_ _BAG80183
  source 1..720: mol_type = other RNA

SEQ ID NO: 6407 - RNA, 720 nt, synthetic construct; identical to SEQ ID NO: 6199
  misc_feature 1..720: note = derived and/or modified sequence opt5 fromPurine_Nucleoside_Phosphorylase_deoD__Escherichia_coli_ _BAG80183
  source 1..720: mol_type = other RNA

SEQ ID NO: 6408 - RNA, 720 nt, synthetic construct
  misc_feature 1..720: note = derived and/or modified sequence opt6 fromPurine_Nucleoside_Phosphorylase_deoD__Escherichia_coli_ _BAG80183
  source 1..720: mol_type = other RNA
atggcaacaccacatatcaatgcagaaatgggagactttgcagatgtagtattaatgccaggagacccactaagagcaaaatacatagcagaaacatttctagaagacgcaagagaagtaaataacgtaagaggaatgttaggatttacaggaacatataaaggaagaaaaatatcagttatgggacatggaatgggaataccatcatgcagcatatatacaaaagaactgataacagactttggagtaaaaaaaataataagagtaggatcatgcggagcagtactaccacacgtaaaattaagagatgtagtaataggaatgggagcatgtacagatagcaaagtaaatagaataagatttaaagaccacgatttcgcagcaatagcagattttgatatggtaagaaatgcagttgacgcagcaaaagcattaggaatagacgcaagagttggaaatctatttagcgcagacttattctatagcccagacggggaaatgttcgatgtaatggaaaaatacggaatattaggagtagaaatggaagcagcagggatatatggagtagcagcagaatttggagcaaaagcattaacaatatgtacagtaagtgatcacataagaacgcacgaacaaacaacagcagcagaaagacaaacaacattcaatgacatgataaaaatagcattagaaagcgtactattaggcgataaagaataa

SEQ ID NO: 6409 - protein, 239 aa, synthetic construct; identical to SEQ ID NO: 6193
  REGION 1..239: note Purine_Nucleoside_Phosphorylase_deoD__Escherichia_coli__B7L EN0

SEQ ID NO: 6410 - RNA, 720 nt, synthetic construct; identical to SEQ ID NO: 6234
  misc_feature 1..720: note Purine_Nucleoside_Phosphorylase_deoD__Escherichia_coli__CAV 02186
  source 1..720: mol_type = other RNA

SEQ ID NO: 6411 - RNA, 720 nt, synthetic construct; identical to SEQ ID NO: 6195
  misc_feature 1..720: note = derived and/or modified sequence opt1 fromPurine_Nucleoside_Phosphorylase_deoD__Escherichia_coli_ _CAV02186
  source 1..720: mol_type = other RNA

SEQ ID NO: 6412 - RNA, 720 nt, synthetic construct; identical to SEQ ID NO: 6196
  misc_feature 1..720: note = derived and/or modified sequence opt2 fromPurine_Nucleoside_Phosphorylase_deoD__Escherichia_coli_ _CAV02186
  source 1..720: mol_type = other RNA

SEQ ID NO: 6413 - RNA, 720 nt, synthetic construct; identical to SEQ ID NO: 6197
  misc_feature 1..720: note = derived and/or modified sequence opt3 fromPurine_Nucleoside_Phosphorylase_deoD__Escherichia_coli_ _CAV02186
  source 1..720: mol_type = other RNA

SEQ ID NO: 6414 - RNA, 720 nt, synthetic construct; identical to SEQ ID NO: 6198
  misc_feature 1..720: note = derived and/or modified sequence opt4 fromPurine_Nucleoside_Phosphorylase_deoD__Escherichia_coli_ _CAV02186
  source 1..720: mol_type = other RNA

SEQ ID NO: 6415 - RNA, 720 nt, synthetic construct; identical to SEQ ID NO: 6199
  misc_feature 1..720: note = derived and/or modified sequence opt5 fromPurine_Nucleoside_Phosphorylase_deoD__Escherichia_coli_ _CAV02186
  source 1..720: mol_type = other RNA

SEQ ID NO: 6416 - RNA, 720 nt, synthetic construct
  misc_feature 1..720: note = derived and/or modified sequence opt6 fromPurine_Nucleoside_Phosphorylase_deoD__Escherichia_coli_ _CAV02186
  source 1..720: mol_type = other RNA
atggcaacaccacatataaatgcagaaatgggagactttgcagatgtagtactaatgccaggagacccactaagagcaaaatacatagcagaaacttttttagaagacgcaagagaagtaaataacgtaagaggaatgctaggatttacaggaacatataaaggacgaaaaataagtgtcatgggacatggaatgggaataccatcatgctcaatatatacaaaagaattaataacagactttggagtaaaaaaaataataagagtaggatcatgcggagcagtactaccacacgtaaaattaagagatgtcgtaataggaatgggagcatgtacagatagcaaagtaaatagaataagatttaaagatcacgatttcgcagcaatagccgatttcgatatggtaagaaatgcagtagacgcagcaaaagcactaggaatagacgcgagagtaggaaatctatttagcgcagacttattttatagcccggacggagaaatgttcgatgtaatggaaaaatacggaatattaggagtagaaatggaagcagcagggatatatggagtagcagcagaatttggagcaaaagcattaacaatatgtacagtatcagatcacataagaacacacgaacaaacaacagcagcagagagacaaacaacattcaatgacatgataaaaatagcattagaaagcgtactactaggcgataaagaataa

SEQ ID NO: 6417 - protein, 239 aa, synthetic construct; identical to SEQ ID NO: 6193
  REGION 1..239: note Purine_Nucleoside_Phosphorylase_deoD__Escherichia_coli__B7L XU6

SEQ ID NO: 6418 - RNA, 720 nt, synthetic construct; identical to SEQ ID NO: 6234
  misc_feature 1..720: note Purine_Nucleoside_Phosphorylase_deoD__Escherichia_coli__CAR 01347
  source 1..720: mol_type = other RNA

SEQ ID NO: 6419 - RNA, 720 nt, synthetic construct; identical to SEQ ID NO: 6195
  misc_feature 1..720: note = derived and/or modified sequence opt1 fromPurine_Nucleoside_Phosphorylase_deoD__Escherichia_coli_ _CAR01347
  source 1..720: mol_type = other RNA

SEQ ID NO: 6420 - RNA, 720 nt, synthetic construct; identical to SEQ ID NO: 6196
  misc_feature 1..720: note = derived and/or modified sequence opt2 fromPurine_Nucleoside_Phosphorylase_deoD__Escherichia_coli_ _CAR01347
  source 1..720: mol_type = other RNA

SEQ ID NO: 6421 - RNA, 720 nt, synthetic construct; identical to SEQ ID NO: 6197
  misc_feature 1..720: note = derived and/or modified sequence opt3 fromPurine_Nucleoside_Phosphorylase_deoD__Escherichia_coli_ _CAR01347
  source 1..720: mol_type = other RNA

SEQ ID NO: 6422 - RNA, 720 nt, synthetic construct; identical to SEQ ID NO: 6198
  misc_feature 1..720: note = derived and/or modified sequence opt4 fromPurine_Nucleoside_Phosphorylase_deoD__Escherichia_coli_ _CAR01347
  source 1..720: mol_type = other RNA

SEQ ID NO: 6423 - RNA, 720 nt, synthetic construct; identical to SEQ ID NO: 6199
  misc_feature 1..720: note = derived and/or modified sequence opt5 fromPurine_Nucleoside_Phosphorylase_deoD__Escherichia_coli_ _CAR01347
  source 1..720: mol_type = other RNA

SEQ ID NO: 6424 - RNA, 720 nt, synthetic construct
  misc_feature 1..720: note = derived and/or modified sequence opt6 fromPurine_Nucleoside_Phosphorylase_deoD__Escherichia_coli_ _CAR01347
  source 1..720: mol_type = other RNA
atggcaacaccacatataaatgcagaaatgggagattttgcagatgtagtattaatgccaggagacccattaagagcaaaatacatagcagaaacatttctagaagacgcaagagaagtaaataacgtaagaggaatgctaggatttaccggaacatataaagggagaaaaatatcagtaatgggacatggaatgggaataccaagctgcagtatatatacaaaagaattaataacagattttggagtaaaaaaaataataagagtaggaagttgtggagcagtattaccacatgtaaaattaagagatgtagtaataggaatgggagcatgtacagatagcaaagtaaatagaataagatttaaagatcacgatttcgctgcaatagcagatttcgatatggtacggaatgcagtggacgcagcaaaagcattaggaatagacgcgagagtaggaaatctatttagtgcagacctattctatagcccagacggagaaatgttcgacgtaatggaaaaatatggaatattaggagtagaaatggaagcagcaggaatatatggagtagcagcggaatttggagcaaaagcattaacgatatgtacagtaagtgatcacataagaacacacgaacaaacaacagcagcagaaagacaaacaacattcaatgacatgataaaaatagcattagaaagcgtactattaggagataaagaataa

SEQ ID NO: 6425 - protein, 239 aa, synthetic construct; identical to SEQ ID NO: 6193
  REGION 1..239: note Purine_Nucleoside_Phosphorylase_deoD__Escherichia_coli__B7M NJ1

SEQ ID NO: 6426 - RNA, 720 nt, synthetic construct; identical to SEQ ID NO: 6338
  misc_feature 1..720: note Purine_Nucleoside_Phosphorylase_deoD__Escherichia_coli__CAR 06204
  source 1..720: mol_type = other RNA

SEQ ID NO: 6427 - RNA, 720 nt, synthetic construct; identical to SEQ ID NO: 6195
  misc_feature 1..720: note = derived and/or modified sequence opt1 fromPurine_Nucleoside_Phosphorylase_deoD__Escherichia_coli_ _CAR06204
  source 1..720: mol_type = other RNA

SEQ ID NO: 6428 - RNA, 720 nt, synthetic construct; identical to SEQ ID NO: 6196
  misc_feature 1..720: note = derived and/or modified sequence opt2 fromPurine_Nucleoside_Phosphorylase_deoD__Escherichia_coli_ _CAR06204
  source 1..720: mol_type = other RNA

SEQ ID NO: 6429 - RNA, 720 nt, synthetic construct; identical to SEQ ID NO: 6197
  misc_feature 1..720: note = derived and/or modified sequence opt3 fromPurine_Nucleoside_Phosphorylase_deoD__Escherichia_coli_ _CAR06204
  source 1..720: mol_type = other RNA

SEQ ID NO: 6430 - RNA, 720 nt, synthetic construct; identical to SEQ ID NO: 6198
  misc_feature 1..720: note = derived and/or modified sequence opt4 fromPurine_Nucleoside_Phosphorylase_deoD__Escherichia_coli_ _CAR06204
  source 1..720: mol_type = other RNA

SEQ ID NO: 6431 - RNA, 720 nt, synthetic construct; identical to SEQ ID NO: 6199
  misc_feature 1..720: note = derived and/or modified sequence opt5 fromPurine_Nucleoside_Phosphorylase_deoD__Escherichia_coli_ _CAR06204
  source 1..720: mol_type = other RNA

SEQ ID NO: 6432 - RNA, 720 nt, synthetic construct
  misc_feature 1..720: note = derived and/or modified sequence opt6 fromPurine_Nucleoside_Phosphorylase_deoD__Escherichia_coli_ _CAR06204
  source 1..720: mol_type = other RNA
atggcaacaccacatataaatgcagaaatgggagactttgcagatgtagtgctaatgcccggagacccactaagggcaaaatacatagcagaaacatttttagaagacgcaagagaagtaaataacgtaagaggaatgttaggatttacaggaacatataaaggaagaaaaataagtgtaatgggacatggaatgggaataccaagttgctcaatatataccaaagaattaataacagattttggagttaaaaaaataataagagtaggaagttgcggagcagtactaccacacgtaaaattaagagatgtagtaataggaatgggagcatgtacagatagcaaagtaaatagaataagatttaaagatcacgatttcgcggcaatagcagattttgatatggtacgaaatgccgtagacgcagccaaagcactaggaattgacgcaagagttggaaatttatttagtgcagacttattttatagtccagacggagaaatgttcgatgtgatggaaaaatacggaatattaggagtggaaatggaagcagcaggaatatatggagtagcagcagaatttggagcaaaagcattaacaatatgtacagtaagcgatcacataagaacacacgaacaaactacagcagcagaaagacaaacaacattcaatgacatgataaaaatagcactagaaagcgtgctattaggagacaaagaataa

SEQ ID NO: 6433 - protein, 239 aa, synthetic construct; identical to SEQ ID NO: 6201
  REGION 1..239: note Purine_Nucleoside_Phosphorylase_deoD__Escherichia_coli__B7N 2V8

SEQ ID NO: 6434 - RNA, 720 nt, synthetic construct; identical to SEQ ID NO: 6282
  misc_feature 1..720: note Purine_Nucleoside_Phosphorylase_deoD__Escherichia_coli__CAV 18213
  source 1..720: mol_type = other RNA

SEQ ID NO: 6435 - RNA, 720 nt, synthetic construct; identical to SEQ ID NO: 6203
  misc_feature 1..720: note = derived and/or modified sequence opt1 fromPurine_Nucleoside_Phosphorylase_deoD__Escherichia_coli_ _CAV18213
  source 1..720: mol_type = other RNA

SEQ ID NO: 6436 - RNA, 720 nt, synthetic construct; identical to SEQ ID NO: 6204
  misc_feature 1..720: note = derived and/or modified sequence opt2 fromPurine_Nucleoside_Phosphorylase_deoD__Escherichia_coli_ _CAV18213
  source 1..720: mol_type = other RNA

SEQ ID NO: 6437 - RNA, 720 nt, synthetic construct; identical to SEQ ID NO: 6205
  misc_feature 1..720: note = derived and/or modified sequence opt3 fromPurine_Nucleoside_Phosphorylase_deoD__Escherichia_coli_ _CAV18213
  source 1..720: mol_type = other RNA

SEQ ID NO: 6438 - RNA, 720 nt, synthetic construct; identical to SEQ ID NO: 6206
  misc_feature 1..720: note = derived and/or modified sequence opt4 fromPurine_Nucleoside_Phosphorylase_deoD__Escherichia_coli_ _CAV18213
  source 1..720: mol_type = other RNA

SEQ ID NO: 6439 - RNA, 720 nt, synthetic construct; identical to SEQ ID NO: 6207
  misc_feature 1..720: note = derived and/or modified sequence opt5 fromPurine_Nucleoside_Phosphorylase_deoD__Escherichia_coli_ _CAV18213
  source 1..720: mol_type = other RNA

SEQ ID NO: 6440 - RNA, 720 nt, synthetic construct
  misc_feature 1..720: note = derived and/or modified sequence opt6 fromPurine_Nucleoside_Phosphorylase_deoD__Escherichia_coli_ _CAV18213
  source 1..720: mol_type = other RNA
atggccacaccacatatcaatgcagaaatgggagacttcgcagatgtagtgttaatgccaggagatccactacgagcaaaatacatagcagaaacatttctagaagatgcaagagaagtaaataacgtaagaggaatgttaggctttacaggaacatataaaggaagaaaaatatcagtaatgggacatggaatgggaataccatcatgcagtatatatacaaaagaattaataacagactttggagtaaaaaaaataataagagtaggatcatgcggagcagtattaccacacgtaaaattaagagatgtagtaataggaatgggagcatgtacagatagcaaagtaaatagaataagatttaaagatcacgatttcgcagcaatagcagatttcgatatggtaagaaatgcagtagacgcagcaaaagcattaggagtagacgcaagagtaggaaatctattttcagcagacttattttatagcccagacggagaaatgttcgatgtaatggaaaaatacgggatcctaggagtagaaatggaagcagcaggaatatatggagtagcagcagaatttggagcaaaagcactaacaatatgtacagtaagcgatcacataagaacacatgagcaaacaacagcagcagaaagacaaacaacatttaatgacatgataaaaatagccctagaaagtgtactattaggagataaagaataa

SEQ ID NO: 6441 - protein, 239 aa, synthetic construct; identical to SEQ ID NO: 6193
  REGION 1..239: note Purine_Nucleoside_Phosphorylase_deoD__Escherichia_coli__B7N H52

SEQ ID NO: 6442 - RNA, 720 nt, synthetic construct
  misc_feature 1..720: note Purine_Nucleoside_Phosphorylase_deoD__Escherichia_coli__CAR 16117
  source 1..720: mol_type = other RNA
atggctaccccacacattaatgcagaaatgggcgatttcgctgacgtagttttgatgccaggcgacccgctgcgtgcgaagtatattgctgaaactttccttgaagatgcccgtgaagtgaacaacgttcgcggtatgctgggcttcaccggtacttacaaaggccgcaaaatttccgtaatgggtcacggtatgggtatcccgtcctgctccatctacaccaaagaactgatcaccgatttcggcgtgaagaaaattatccgcgtaggctcctgtggcgctgttctgccacacgtaaaactgcgcgacgtcgttatcggtatgggtgcctgcaccgattccaaagttaaccgcatccgttttaaagaccatgactttgccgctatcgctgactttgacatggtgcgtaacgcagtagatgcagctaaagcactgggcattgatgctcgcgttggtaacctgttctccgctgacctgttctactctccggacggcgaaatgttcgacgtgatggaaaaatacggcatcctcggcgtggaaatggaagcggctggtatctacggcgtcgctgcagaatttggcgcgaaagccctgaccatctgcaccgtgtctgaccacatccgtactcacgagcagaccactgccgctgagcgtcagaccaccttcaacgacatgatcaaaatcgcactggaatccgttctgctgggcgataaagagtaa

SEQ ID NO: 6443 - RNA, 720 nt, synthetic construct; identical to SEQ ID NO: 6195
  misc_feature 1..720: note = derived and/or modified sequence opt1 fromPurine_Nucleoside_Phosphorylase_deoD__Escherichia_coli_ _CAR16117
  source 1..720: mol_type = other RNA

SEQ ID NO: 6444 - RNA, 720 nt, synthetic construct; identical to SEQ ID NO: 6196
  misc_feature 1..720: note = derived and/or modified sequence opt2 fromPurine_Nucleoside_Phosphorylase_deoD__Escherichia_coli_ _CAR16117
  source 1..720: mol_type = other RNA

SEQ ID NO: 6445 - RNA, 720 nt, synthetic construct; identical to SEQ ID NO: 6197
  misc_feature 1..720: note = derived and/or modified sequence opt3 fromPurine_Nucleoside_Phosphorylase_deoD__Escherichia_coli_ _CAR16117
  source 1..720: mol_type = other RNA

SEQ ID NO: 6446 - RNA, 720 nt, synthetic construct; identical to SEQ ID NO: 6198
  misc_feature 1..720: note = derived and/or modified sequence opt4 fromPurine_Nucleoside_Phosphorylase_deoD__Escherichia_coli_ _CAR16117
  source 1..720: mol_type = other RNA

SEQ ID NO: 6447 - RNA, 720 nt, synthetic construct; identical to SEQ ID NO: 6199
  misc_feature 1..720: note = derived and/or modified sequence opt5 fromPurine_Nucleoside_Phosphorylase_deoD__Escherichia_coli_ _CAR16117
  source 1..720: mol_type = other RNA

SEQ ID NO: 6448 - RNA, 720 nt, synthetic construct
  misc_feature 1..720: note = derived and/or modified sequence opt6 fromPurine_Nucleoside_Phosphorylase_deoD__Escherichia_coli_ _CAR16117
  source 1..720: mol_type = other RNA
atggcaacaccacatataaatgcagaaatgggagactttgcagatgtagtactaatgccaggagacccattaagagcaaaatacatagcagaaacattcctagaagacgcaagagaagtaaataacgtaagaggaatgttagggtttacaggaacatataaaggaagaaaaatatcagtaatgggacatggaatgggaataccaagttgttcaatatatacaaaagaattaataacagactttggagtaaaaaaaataataagagtgggaagttgcggagcagtactaccgcacgtaaaattaagagatgtagtaataggaatgggagcatgtacagattcaaaagtaaatagaataagatttaaagatcacgatttcgcagcaatagcagatttcgatatggtaagaaatgcagtggacgcagcaaaagcattaggaatagacgcaagagtaggaaatctatttagtgcagacttattctattcaccagacggagaaatgttcgatgtaatggaaaaatatggaatattaggagtagaaatggaagcagcaggaatatacggagtagcagcagaatttggagcaaaagcactaactatatgtactgtaagtgatcacataagaacacacgaacaaacaacagcagcagaaagacaaacaacattcaacgacatgataaaaatagcactagaaagtgtactattaggagataaagaataa

SEQ ID NO: 6449 - protein, 239 aa, synthetic construct; identical to SEQ ID NO: 6201
  REGION 1..239: note Purine_Nucleoside_Phosphorylase_deoD__Escherichia_coli__B7N W64

SEQ ID NO: 6450 - RNA, 720 nt, synthetic construct; identical to SEQ ID NO: 6226
  misc_feature 1..720: note Purine_Nucleoside_Phosphorylase_deoD__Escherichia_coli__CAR 21012
  source 1..720: mol_type = other RNA

SEQ ID NO: 6451 - RNA, 720 nt, synthetic construct; identical to SEQ ID NO: 6203
  misc_feature 1..720: note = derived and/or modified sequence opt1 fromPurine_Nucleoside_Phosphorylase_deoD__Escherichia_coli_ _CAR21012
  source 1..720: mol_type = other RNA

SEQ ID NO: 6452 - RNA, 720 nt, synthetic construct; identical to SEQ ID NO: 6204
  misc_feature 1..720: note = derived and/or modified sequence opt2 fromPurine_Nucleoside_Phosphorylase_deoD__Escherichia_coli_ _CAR21012
  source 1..720: mol_type = other RNA

SEQ ID NO: 6453 - RNA, 720 nt, synthetic construct; identical to SEQ ID NO: 6205
  misc_feature 1..720: note = derived and/or modified sequence opt3 fromPurine_Nucleoside_Phosphorylase_deoD__Escherichia_coli_ _CAR21012
  source 1..720: mol_type = other RNA

SEQ ID NO: 6454 - RNA, 720 nt, synthetic construct; identical to SEQ ID NO: 6206
  misc_feature 1..720: note = derived and/or modified sequence opt4 fromPurine_Nucleoside_Phosphorylase_deoD__Escherichia_coli_ _CAR21012
  source 1..720: mol_type = other RNA

SEQ ID NO: 6455 - RNA, 720 nt, synthetic construct; identical to SEQ ID NO: 6207
  misc_feature 1..720: note = derived and/or modified sequence opt5 fromPurine_Nucleoside_Phosphorylase_deoD__Escherichia_coli_ _CAR21012
  source 1..720: mol_type = other RNA

SEQ ID NO: 6456 - RNA, 720 nt, synthetic construct
  misc_feature 1..720: note = derived and/or modified sequence opt6 fromPurine_Nucleoside_Phosphorylase_deoD__Escherichia_coli_ _CAR21012
  source 1..720: mol_type = other RNA
atggcaacaccacatataaatgcagaaatgggtgactttgcagatgtcgtactaatgccaggagacccattaagagccaaatacattgcagaaacattcttagaagacgcaagagaagtaaataacgtaagaggaatgttgggatttacaggaacatataaaggaagaaaaatatcagtaatgggacatggaatgggcataccatcatgctcaatatatacaaaagaattaataacagactttggagtaaaaaaaataataagagtaggatcatgcggagcagtattaccacacgtaaaattaagagatgtagtaatcggaatgggagcctgtacagatagcaaagtaaatagaataagatttaaagatcatgatttcgcggcaatagcagatttcgatatggtacgaaatgcagtagacgcagcaaaagcattgggagtagacgcaagagtaggaaacctattttcagcagatttattttatagcccagatggagaaatgttcgatgtaatggaaaaatacggaatattaggagtagaaatggaagcagcaggtatatatggagtagcagcagaatttggagcaaaagcactaacaatatgtacagtaagcgatcacataaggacacacgaacaaacaacagcagcagaaaggcaaactacatttaatgacatgataaaaatagcactagaaagcgtattattgggcgataaagaataa

SEQ ID NO: 6457 - protein, 239 aa, synthetic construct; identical to SEQ ID NO: 6201
  REGION 1..239: note Purine_Nucleoside_Phosphorylase_deoD__Escherichia_coli__B7U R12

SEQ ID NO: 6458 - RNA, 720 nt, synthetic construct
  misc_feature 1..720: note Purine_Nucleoside_Phosphorylase_deoD__Escherichia_coli__CAS 12230
  source 1..720: mol_type = other RNA
atggctactccacacattaatgcagaaatgggcgattttgctgacgtagttttgatgccaggcgacccgctgcgtgcgaagtatattgctgaaactttccttgaagatgcccgtgaagtgaacaacgttcgcggtatgctgggcttcactggtacttacaaaggccgcaaaatttccgtaatgggccacggtatgggtatcccgtcctgctccatctacaccaaagaactgatcactgatttcggcgtgaagaaaattatccgcgtgggttcctgtggcgctgttctgccgcacgtaaaactgcgcgacgtcgttatcggtatgggggcctgcaccgattccaaagttaaccgcatccgttttaaagaccatgactttgccgctatcgctgacttcgacatggtgcgtaacgcggtagacgcggcaaaagcactgggcgttgatgctcgcgttggtaacctgttctccgctgacctgttctactctccggacggcgaaatgttcgacgtgatggaaaaatacggcatcctcggcgtggaaatggaagcggctggtatctacggcgtcgctgcagaatttggcgcgaaagccctgaccatctgcaccgtgtctgaccacatccgcactcacgagcagaccactgccgctgagcgtcagaccaccttcaacgacatgatcaaaatcgcgctggaatccgttctactgggcgataaagagtaa

SEQ ID NO: 6459 - RNA, 720 nt, synthetic construct; identical to SEQ ID NO: 6203
  misc_feature 1..720: note = derived and/or modified sequence opt1 fromPurine_Nucleoside_Phosphorylase_deoD__Escherichia_coli_ _CAS12230
  source 1..720: mol_type = other RNA

SEQ ID NO: 6460 - RNA, 720 nt, synthetic construct; identical to SEQ ID NO: 6204
  misc_feature 1..720: note = derived and/or modified sequence opt2 fromPurine_Nucleoside_Phosphorylase_deoD__Escherichia_coli_ _CAS12230
  source 1..720: mol_type = other RNA

SEQ ID NO: 6461 - RNA, 720 nt, synthetic construct; identical to SEQ ID NO: 6205
  misc_feature 1..720: note = derived and/or modified sequence opt3 fromPurine_Nucleoside_Phosphorylase_deoD__Escherichia_coli_ _CAS12230
  source 1..720: mol_type = other RNA

SEQ ID NO: 6462 - RNA, 720 nt, synthetic construct; identical to SEQ ID NO: 6206
  misc_feature 1..720: note = derived and/or modified sequence opt4 fromPurine_Nucleoside_Phosphorylase_deoD__Escherichia_coli_ _CAS12230
  source 1..720: mol_type = other RNA

SEQ ID NO: 6463 - RNA, 720 nt, synthetic construct; identical to SEQ ID NO: 6207
  misc_feature 1..720: note = derived and/or modified sequence opt5 fromPurine_Nucleoside_Phosphorylase_deoD__Escherichia_coli_ _CAS12230
  source 1..720: mol_type = other RNA

SEQ ID NO: 6464 - RNA, 720 nt, synthetic construct
  misc_feature 1..720: note = derived and/or modified sequence opt6 fromPurine_Nucleoside_Phosphorylase_deoD__Escherichia_coli_ _CAS12230
  source 1..720: mol_type = other RNA
atggcaacaccacatataaacgcagaaatgggagactttgcagatgtagtactaatgccaggagacccactcagagcaaaatacatagcagagacctttctggaagacgcaagagaagtaaataatgtaagaggaatgttaggatttacaggaacatataaaggaagaaaaatatcagtcatgggacatggaatgggaataccatcatgctcaatatataccaaagaattaataacagactttggagtaaaaaaaataataagagtaggatcgtgcggagcagtattaccacacgtaaaattaagagatgtagtaataggaatgggagcatgtacagatagcaaagtaaatcgaataagatttaaagatcacgattttgcagcaatagcagatttcgatatggtaagaaatgcagtagacgcagcaaaagcattaggagtagacgcaagagtaggaaatctattcagcgctgacttattctatagcccagacggagaaatgttcgatgtaatggaaaaatacggaatattaggagtggaaatggaagctgcaggaatatatggagtagcagcagaatttggcgcaaaagcactaacaatatgtacagtaagcgatcacatacgaacacacgaacaaacaacagcagcagaaagacaaacaacattcaatgacatgataaaaatagcattagaaagtgtactattaggagataaagaataa

SEQ ID NO: 6465 - protein, 239 aa, synthetic construct; identical to SEQ ID NO: 6193
  REGION 1..239: note Purine_Nucleoside_Phosphorylase_deoD__Escherichia_coli__C3S E47

SEQ ID NO: 6466 - RNA, 720 nt, synthetic construct; identical to SEQ ID NO: 6258
  misc_feature 1..720: note Purine_Nucleoside_Phosphorylase_deoD__Escherichia_coli__ACI 72751
  source 1..720: mol_type = other RNA

SEQ ID NO: 6467 - RNA, 720 nt, synthetic construct; identical to SEQ ID NO: 6195
  misc_feature 1..720: note = derived and/or modified sequence opt1 fromPurine_Nucleoside_Phosphorylase_deoD__Escherichia_coli_ _ACI72751
  source 1..720: mol_type = other RNA

SEQ ID NO: 6468 - RNA, 720 nt, synthetic construct; identical to SEQ ID NO: 6196
  misc_feature 1..720: note = derived and/or modified sequence opt2 fromPurine_Nucleoside_Phosphorylase_deoD__Escherichia_coli_ _ACI72751
  source 1..720: mol_type = other RNA

SEQ ID NO: 6469 - RNA, 720 nt, synthetic construct; identical to SEQ ID NO: 6197
  misc_feature 1..720: note = derived and/or modified sequence opt3 fromPurine_Nucleoside_Phosphorylase_deoD__Escherichia_coli_ _ACI72751
  source 1..720: mol_type = other RNA

SEQ ID NO: 6470 - RNA, 720 nt, synthetic construct; identical to SEQ ID NO: 6198
  misc_feature 1..720: note = derived and/or modified sequence opt4 fromPurine_Nucleoside_Phosphorylase_deoD__Escherichia_coli_ _ACI72751
  source 1..720: mol_type = other RNA

SEQ ID NO: 6471 - RNA, 720 nt, synthetic construct; identical to SEQ ID NO: 6199
  misc_feature 1..720: note = derived and/or modified sequence opt5 fromPurine_Nucleoside_Phosphorylase_deoD__Escherichia_coli_ _ACI72751
  source 1..720: mol_type = other RNA

SEQ ID NO: 6472 - RNA, 720 nt, synthetic construct
  misc_feature 1..720: note = derived and/or modified sequence opt6 fromPurine_Nucleoside_Phosphorylase_deoD__Escherichia_coli_ _ACI72751
  source 1..720: mol_type = other RNA
atggcaacaccacatataaatgcagaaatgggagacttcgcggacgtagtactaatgccaggagacccactaagagcaaaatacatagcagaaacatttttagaagacgcaagagaagtaaataacgtgagaggaatgttaggatttacaggaacatataaaggaagaaaaataagtgtaatgggacatggaatgggtataccatcatgcagtatatatacaaaagaattaataacagactttggagtaaaaaaaataataagagtaggaagttgcggagcagtactaccacacgtaaaattaagagatgtagtaataggaatgggggcatgtacagatagcaaagtaaatagaataagatttaaagatcacgatttcgcagcaatagcagatttcgatatggtacgaaatgcagtagacgcagcaaaggcattaggaatagacgcaagagtaggaaacctatttagcgcagacttattctacagtccagacggagaaatgttcgatgtaatggaaaaatacggaatattaggagtagaaatggaagcagcaggaatatatggagtagcagcagaatttggagctaaagcactaacaatatgcacagtgagtgatcacataagaacacacgaacaaacaacagcagcagaaagacaaacaacattcaatgacatgataaaaatagcactagaaagtgtactattaggagataaagaataa

SEQ ID NO: 6473 - protein, 239 aa, synthetic construct; identical to SEQ ID NO: 6193
  REGION 1..239: note Purine_Nucleoside_Phosphorylase_deoD__Escherichia_coli__C4Z T66

SEQ ID NO: 6474 - RNA, 720 nt, synthetic construct; identical to SEQ ID NO: 6338
  misc_feature 1..720: note Purine_Nucleoside_Phosphorylase_deoD__Escherichia_coli__ACR 65334
  source 1..720: mol_type = other RNA

SEQ ID NO: 6475 - RNA, 720 nt, synthetic construct; identical to SEQ ID NO: 6195
  misc_feature 1..720: note = derived and/or modified sequence opt1 fromPurine_Nucleoside_Phosphorylase_deoD__Escherichia_coli_ _ACR65334
  source 1..720: mol_type = other RNA

SEQ ID NO: 6476 - RNA, 720 nt, synthetic construct; identical to SEQ ID NO: 6196
  misc_feature 1..720: note = derived and/or modified sequence opt2 fromPurine_Nucleoside_Phosphorylase_deoD__Escherichia_coli_ _ACR65334
  source 1..720: mol_type = other RNA

SEQ ID NO: 6477 - RNA, 720 nt, synthetic construct; identical to SEQ ID NO: 6197
  misc_feature 1..720: note = derived and/or modified sequence opt3 fromPurine_Nucleoside_Phosphorylase_deoD__Escherichia_coli_ _ACR65334
  source 1..720: mol_type = other RNA

SEQ ID NO: 6478 - RNA, 720 nt, synthetic construct; identical to SEQ ID NO: 6198
  misc_feature 1..720: note = derived and/or modified sequence opt4 fromPurine_Nucleoside_Phosphorylase_deoD__Escherichia_coli_ _ACR65334
  source 1..720: mol_type = other RNA

SEQ ID NO: 6479 - RNA, 720 nt, synthetic construct; identical to SEQ ID NO: 6199
  misc_feature 1..720: note = derived and/or modified sequence opt5 fromPurine_Nucleoside_Phosphorylase_deoD__Escherichia_coli_ _ACR65334
  source 1..720: mol_type = other RNA

SEQ ID NO: 6480 - RNA, 720 nt, synthetic construct
  misc_feature 1..720: note = derived and/or modified sequence opt6 fromPurine_Nucleoside_Phosphorylase_deoD__Escherichia_coli_ _ACR65334
  source 1..720: mol_type = other RNA
atggcaacaccacatataaatgcggaaatgggagattttgcagacgtagtattaatgccaggtgacccactaagagcaaaatacatagcagaaacatttttagaagatgcaagagaagtaaataacgtaaggggaatgttaggatttacaggaacatataaaggaagaaaaatatcagtaatgggacatggaatgggaataccatcctgctcaatatatacaaaagaattaataacagacttcggagtaaaaaaaataataagagtaggcagttgtggagctgtattaccacacgtaaaactaagagatgtagtaataggaatgggagcatgtacagatagcaaagtaaatagaataagatttaaagatcacgatttcgcagcaatagcagatttcgatatggtaagaaatgcagttgacgcagccaaagccttaggaatagatgcaagagtaggaaacttattcagcgcagatctattctatagcccagacggagaaatgttcgatgtaatggaaaaatacggaatattaggagtagaaatggaagcagccggaatatatggagtagcagcagaatttggagcaaaagcactgacaatatgtacagtatcagatcacatacgaacacatgaacaaacaacagcagcagaaagacaaacaacattcaatgacatgataaaaatagcactagaaagcgtactattaggagataaagaataa

SEQ ID NO: 6481 - protein, 239 aa, synthetic construct; identical to SEQ ID NO: 6201
  REGION 1..239: note Purine_Nucleoside_Phosphorylase_deoD__Escherichia_coli__C8T QD7

SEQ ID NO: 6482 - RNA, 720 nt, synthetic construct
  misc_feature 1..720: note Purine_Nucleoside_Phosphorylase_deoD__Escherichia_coli__BAI 28709
  source 1..720: mol_type = other RNA
atggctaccccacacattaatgcagaaatgggcgatttcgctgacgtagttttgatgccaggcgacccgctgcgtgcaaagtatattgctgaaactttccttgaagatgcccgtgaagtgaacaacgttcgcggtatgctgggcttcaccggtacttacaaaggccgcaaaatttccgtaatgggtcacggtatgggtatcccgtcctgctccatctacaccaaagaactgatcaccgatttcggcgtgaagaaaattatccgcgtgggttcctgtggcgcagttctgccgcacgtaaaactgcgcgacgtcgttatcggtatgggtgcctgcaccgattccaaagttaaccgcatccgttttaaagatcatgactttgccgctatcgctgactttgacatggtgcgtaacgcggtagacgcggctaaagcactgggcgttgatgctcgcgtgggtaacctgttctccgctgacctgttctactctccggacggcgaaatgttcgacgtgatggaaaaatacggcatcctcggcgtggaaatggaagcggctggtatctacggcgtggctgcagagtttggcgcgaaagccctgaccatctgcaccgtgtctgaccacatccgcactcacgagcagaccactgccgctgagcgtcagaccaccttcaacgacatgatcaaaatcgcactggaatccgttctgctgggcgataaagagtaa

SEQ ID NO: 6483 - RNA, 720 nt, synthetic construct; identical to SEQ ID NO: 6203
  misc_feature 1..720: note = derived and/or modified sequence opt1 fromPurine_Nucleoside_Phosphorylase_deoD__Escherichia_coli_ _BAI28709
  source 1..720: mol_type = other RNA

SEQ ID NO: 6484 - RNA, 720 nt, synthetic construct; identical to SEQ ID NO: 6204
  misc_feature 1..720: note = derived and/or modified sequence opt2 fromPurine_Nucleoside_Phosphorylase_deoD__Escherichia_coli_ _BAI28709
  source 1..720: mol_type = other RNA

SEQ ID NO: 6485 - RNA, 720 nt, synthetic construct; identical to SEQ ID NO: 6205
  misc_feature 1..720: note = derived and/or modified sequence opt3 fromPurine_Nucleoside_Phosphorylase_deoD__Escherichia_coli_ _BAI28709
  source 1..720: mol_type = other RNA

SEQ ID NO: 6486 - RNA, 720 nt, synthetic construct; identical to SEQ ID NO: 6206
  misc_feature 1..720: note = derived and/or modified sequence opt4 fromPurine_Nucleoside_Phosphorylase_deoD__Escherichia_coli_ _BAI28709
  source 1..720: mol_type = other RNA

SEQ ID NO: 6487 - RNA, 720 nt, synthetic construct; identical to SEQ ID NO: 6207
  misc_feature 1..720: note = derived and/or modified sequence opt5 fromPurine_Nucleoside_Phosphorylase_deoD__Escherichia_coli_ _BAI28709
  source 1..720: mol_type = other RNA

SEQ ID NO: 6488 - RNA, 720 nt, synthetic construct
  misc_feature 1..720: note = derived and/or modified sequence opt6 fromPurine_Nucleoside_Phosphorylase_deoD__Escherichia_coli_ _BAI28709
  source 1..720: mol_type = other RNA
atggcaacgccacatataaatgcagaaatgggagactttgcagatgtagttttaatgccaggagacccactaagagcaaaatacatagcagaaacatttttagaagacgcaagagaagtaaataacgtaagaggaatgttaggatttacagggacatataaaggtagaaaaatatcagtaatgggacatggaatgggaataccatcatgctcaatatatacaaaagaattaataactgactttggagtaaaaaaaataataagagtaggatcatgcggagcagtactaccacacgtaaaattaagagatgtagtaataggaatgggagcatgtacagatagcaaagtaaatagaataagatttaaagatcacgattttgcagcaatagcagatttcgatatggtaagaaatgcagtagacgcagcaaaagcattgggagtagacgcaagagtaggaaatctatttagtgcagacttattctatagcccggacggagaaatgttcgatgtaatggaaaaatacggaatattaggcgtagaaatggaagcagcaggaatatatggagtagccgcagaatttggagcaaaagcattaacaatatgtacagtaagcgatcacataagaacacacgagcaaacaacagcggcagaaagacaaacaacattcaatgacatgataaaaatagcactagaaagcgtactattaggagataaagaataa

SEQ ID NO: 6489 - protein, 239 aa, synthetic construct; identical to SEQ ID NO: 6193
  REGION 1..239: note Purine_Nucleoside_Phosphorylase_deoD__Escherichia_coli__C8U 157

SEQ ID NO: 6490 - RNA, 720 nt, synthetic construct; identical to SEQ ID NO: 6234
  misc_feature 1..720: note Purine_Nucleoside_Phosphorylase_deoD__Escherichia_coli__BAI 33919
  source 1..720: mol_type = other RNA

SEQ ID NO: 6491 - RNA, 720 nt, synthetic construct; identical to SEQ ID NO: 6195
  misc_feature 1..720: note = derived and/or modified sequence opt1 fromPurine_Nucleoside_Phosphorylase_deoD__Escherichia_coli_ _BAI33919
  source 1..720: mol_type = other RNA

SEQ ID NO: 6492 - RNA, 720 nt, synthetic construct; identical to SEQ ID NO: 6196
  misc_feature 1..720: note = derived and/or modified sequence opt2 fromPurine_Nucleoside_Phosphorylase_deoD__Escherichia_coli_ _BAI33919
  source 1..720: mol_type = other RNA

SEQ ID NO: 6493 - RNA, 720 nt, synthetic construct; identical to SEQ ID NO: 6197
  misc_feature 1..720: note = derived and/or modified sequence opt3 fromPurine_Nucleoside_Phosphorylase_deoD__Escherichia_coli_ _BAI33919
  source 1..720: mol_type = other RNA

SEQ ID NO: 6494 - RNA, 720 nt, synthetic construct; identical to SEQ ID NO: 6198
  misc_feature 1..720: note = derived and/or modified sequence opt4 fromPurine_Nucleoside_Phosphorylase_deoD__Escherichia_coli_ _BAI33919
  source 1..720: mol_type = other RNA

SEQ ID NO: 6495 - RNA, 720 nt, synthetic construct; identical to SEQ ID NO: 6199
  misc_feature 1..720: note = derived and/or modified sequence opt5 fromPurine_Nucleoside_Phosphorylase_deoD__Escherichia_coli_ _BAI33919
  source 1..720: mol_type = other RNA

SEQ ID NO: 6496 - RNA, 720 nt, synthetic construct
  misc_feature 1..720: note = derived and/or modified sequence opt6 fromPurine_Nucleoside_Phosphorylase_deoD__Escherichia_coli_ _BAI33919
  source 1..720: mol_type = other RNA
atggcaacaccacatataaatgccgaaatgggagactttgcagatgtagtattaatgccaggggacccattaagagcaaaatacatagcagaaacatttctagaagacgcaagagaagtaaataacgtaagaggaatgttaggatttacaggaacatacaaaggaagaaaaatatcagtaatgggacatggaatgggaataccctcatgcagtatatatacaaaagaattaatcacagactttggagtaaaaaaaataataagagtaggatcatgcggagcagtactaccacacgtaaaattaagagatgtagtaataggaatgggagcatgtacagatagtaaagtaaacagaatacgatttaaagatcatgatttcgcagcaatagcagatttcgatatggtaagaaatgcagtagacgcagcaaaagcattaggcatagacgcaagagtaggaaatctttttagcgcagacttattctatagtccagacggagaaatgttcgatgtaatggaaaaatacggaatattaggagtagaaatggaagcagcaggaatatatggagtagcagcagaatttggagcaaaagcattaacaatatgtacagtaagcgatcatataagaacacacgaacaaacaacagcagcagaaagacaaacaacattcaatgacatgataaaaatcgcactagaaagcgtattattaggagataaagaataa

SEQ ID NO: 6497 - protein, 239 aa, synthetic construct; identical to SEQ ID NO: 6193
  REGION 1..239: note Purine_Nucleoside_Phosphorylase_deoD__Escherichia_coli__C8U N92

SEQ ID NO: 6498 - RNA, 720 nt, synthetic construct
  misc_feature 1..720: note Purine_Nucleoside_Phosphorylase_deoD__Escherichia_coli__BAI 38958
  source 1..720: mol_type = other RNA
atggctaccccacacattaatgcagaaatgggcgatttcgctgacgtagttttgatgccaggcgacccgctgcgtgcgaagtatattgctgaaactttccttgaagatgcccgtgaagtgaacaacgttcgcggtatgctgggcttcaccggtacttacaaaggccgcaaaatttccgtaatgggtcacggtatgggtatcccgtcctgctccatctacaccaaagaactgatcaccgatttcggcgtgaagaaaattatccgcgtgggttcctgtggcgcagttctgccgcacgtaaaactgcgcgacgtcgttatcggtatgggtgcctgcaccgattccaaagttaaccgcatccgttttaaagatcatgactttgccgctatcgctgactttgacatggtacgtaacgcggtagacgcggctaaagcactgggcattgatgctcgcgttggtaacctgttctccgctgacctgttctactctccggacggcgaaatgttcgacgtgatggaaaaatacggcatcctcggcgtggaaatggaagcagctggtatctacggcgtcgctgcagaatttggcgcgaaagccctgaccatctgcaccgtgtctgaccacatccgcactcacgagcagaccactgccgctgagcgtcagaccaccttcaacgacatgatcaaaatcgcactggaatccgttctgctgggcgataaagagtaa

SEQ ID NO: 6499 - RNA, 720 nt, synthetic construct; identical to SEQ ID NO: 6195
  misc_feature 1..720: note = derived and/or modified sequence opt1 fromPurine_Nucleoside_Phosphorylase_deoD__Escherichia_coli_ _BAI38958
  source 1..720: mol_type = other RNA

SEQ ID NO: 6500 - RNA, 720 nt, synthetic construct; identical to SEQ ID NO: 6196
  misc_feature 1..720: note = derived and/or modified sequence opt2 fromPurine_Nucleoside_Phosphorylase_deoD__Escherichia_coli_ _BAI38958
  source 1..720: mol_type = other RNA

SEQ ID NO: 6501 - RNA, 720 nt, synthetic construct; identical to SEQ ID NO: 6197
  misc_feature 1..720: note = derived and/or modified sequence opt3 fromPurine_Nucleoside_Phosphorylase_deoD__Escherichia_coli_ _BAI38958
  source 1..720: mol_type = other RNA

SEQ ID NO: 6502 - RNA, 720 nt, synthetic construct; identical to SEQ ID NO: 6198
  misc_feature 1..720: note = derived and/or modified sequence opt4 fromPurine_Nucleoside_Phosphorylase_deoD__Escherichia_coli_ _BAI38958
  source 1..720: mol_type = other RNA

SEQ ID NO: 6503 - RNA, 720 nt, synthetic construct; identical to SEQ ID NO: 6199
  misc_feature 1..720: note = derived and/or modified sequence opt5 fromPurine_Nucleoside_Phosphorylase_deoD__Escherichia_coli_ _BAI38958
  source 1..720: mol_type = other RNA

SEQ ID NO: 6504 - RNA, 720 nt, synthetic construct
  misc_feature 1..720: note = derived and/or modified sequence opt6 fromPurine_Nucleoside_Phosphorylase_deoD__Escherichia_coli_ _BAI38958
  source 1..720: mol_type = other RNA
atggcaacaccacatataaatgcagaaatgggtgactttgcagatgtagtattaatgccaggagatccgctaagagcaaaatacatagcagaaacatttttagaagacgcaagagaagtaaataacgtaagaggaatgctaggatttacaggaacctataaaggaagaaaaatctcagtaatgggacatggaatgggaataccatcatgctcaatatatacaaaagaattaataacagactttggagtaaaaaaaataataagagtaggatcatgtggagcagtattaccacatgtaaaattaagagatgtagtgataggaatgggagcatgtacagattcaaaagtcaatagaataagatttaaagatcacgatttcgcagcaatagccgatttcgatatggtgcgaaatgcagtagacgcagcaaaagcattaggaatagacgcaagagtaggaaatctatttagtgcagacttattctatagcccagacggagaaatgttcgatgtaatggaaaaatacggaatactaggagtagaaatggaagcagcaggaatatatggagtagcagcagaatttggagcaaaagcactaacaatatgtacagtaagcgatcacataagaacacacgaacaaacaacagcagctgaaagacaaacaacattcaatgacatgataaaaatagcattagaaagtgtgctactaggagataaagaataa

SEQ ID NO: 6505 - protein, 239 aa, synthetic construct; identical to SEQ ID NO: 6201
  REGION 1..239: note Purine_Nucleoside_Phosphorylase_deoD__Escherichia_coli__D3G Y24

SEQ ID NO: 6506 - RNA, 720 nt, synthetic construct; identical to SEQ ID NO: 6202
  misc_feature 1..720: note Purine_Nucleoside_Phosphorylase_deoD__Escherichia_coli__CBG 37702
  source 1..720: mol_type = other RNA

SEQ ID NO: 6507 - RNA, 720 nt, synthetic construct; identical to SEQ ID NO: 6203
  misc_feature 1..720: note = derived and/or modified sequence opt1 fromPurine_Nucleoside_Phosphorylase_deoD__Escherichia_coli_ _CBG37702
  source 1..720: mol_type = other RNA

SEQ ID NO: 6508 - RNA, 720 nt, synthetic construct; identical to SEQ ID NO: 6204
  misc_feature 1..720: note = derived and/or modified sequence opt2 fromPurine_Nucleoside_Phosphorylase_deoD__Escherichia_coli_ _CBG37702
  source 1..720: mol_type = other RNA

SEQ ID NO: 6509 - RNA, 720 nt, synthetic construct; identical to SEQ ID NO: 6205
  misc_feature 1..720: note = derived and/or modified sequence opt3 fromPurine_Nucleoside_Phosphorylase_deoD__Escherichia_coli_ _CBG37702
  source 1..720: mol_type = other RNA

SEQ ID NO: 6510 - RNA, 720 nt, synthetic construct; identical to SEQ ID NO: 6206
  misc_feature 1..720: note = derived and/or modified sequence opt4 fromPurine_Nucleoside_Phosphorylase_deoD__Escherichia_coli_ _CBG37702
  source 1..720: mol_type = other RNA

SEQ ID NO: 6511 - RNA, 720 nt, synthetic construct; identical to SEQ ID NO: 6207
  misc_feature 1..720: note = derived and/or modified sequence opt5 fromPurine_Nucleoside_Phosphorylase_deoD__Escherichia_coli_ _CBG37702
  source 1..720: mol_type = other RNA

SEQ ID NO: 6512 - RNA, 720 nt, synthetic construct
  misc_feature 1..720: note = derived and/or modified sequence opt6 fromPurine_Nucleoside_Phosphorylase_deoD__Escherichia_coli_ _CBG37702
  source 1..720: mol_type = other RNA
atggcaacaccacatatcaatgcagaaatgggagactttgcagatgtagtactaatgccaggagacccactaagagcaaaatacatagcagaaacatttctagaagacgcaagagaagtaaataacgtaagaggaatgttaggatttacaggaacatataaaggaagaaaaataagtgtaatgggacatggaatgggaataccaagttgctcaatatatacaaaagaattaataacagactttggagtaaaaaaaataataagagtaggatcatgcggagcagtattaccacacgtaaaattgagagatgtagtaataggaatgggagcatgtacagatagcaaagtaaatagaataagatttaaagatcatgatttcgcagcaatagcagatttcgacatggtaagaaatgcagtagacgcagcaaaagcattaggagtagatgcaagagtaggaaatctatttagcgcggacttattctatagtccagacggagaaatgttcgatgtaatggaaaaatatggaatactgggagtagaaatggaagcagcaggaatatatggagtagcagcagaatttggagcgaaagcactaacaatatgtaccgtaagtgatcatataagaacacacgaacaaacaacagcagcagaaagacaaacaacattcaatgacatgataaaaatagcactagaaagcgtattattaggagataaagaataa

SEQ ID NO: 6513 - protein, 239 aa, synthetic construct; identical to SEQ ID NO: 6193
  REGION 1..239: note Purine_Nucleoside_Phosphorylase_deoD__Escherichia_coli__D3Q NE6

SEQ ID NO: 6514 - RNA, 720 nt, synthetic construct; identical to SEQ ID NO: 6258
  misc_feature 1..720: note Purine_Nucleoside_Phosphorylase_deoD__Escherichia_coli__ADD 59655
  source 1..720: mol_type = other RNA

SEQ ID NO: 6515 - RNA, 720 nt, synthetic construct; identical to SEQ ID NO: 6195
  misc_feature 1..720: note = derived and/or modified sequence opt1 fromPurine_Nucleoside_Phosphorylase_deoD__Escherichia_coli_ _ADD59655
  source 1..720: mol_type = other RNA

SEQ ID NO: 6516 - RNA, 720 nt, synthetic construct; identical to SEQ ID NO: 6196
  misc_feature 1..720: note = derived and/or modified sequence opt2 fromPurine_Nucleoside_Phosphorylase_deoD__Escherichia_coli_ _ADD59655
  source 1..720: mol_type = other RNA

SEQ ID NO: 6517 - RNA, 720 nt, synthetic construct; identical to SEQ ID NO: 6197
  misc_feature 1..720: note = derived and/or modified sequence opt3 fromPurine_Nucleoside_Phosphorylase_deoD__Escherichia_coli_ _ADD59655
  source 1..720: mol_type = other RNA

SEQ ID NO: 6518 - RNA, 720 nt, synthetic construct; identical to SEQ ID NO: 6198
  misc_feature 1..720: note = derived and/or modified sequence opt4 fromPurine_Nucleoside_Phosphorylase_deoD__Escherichia_coli_ _ADD59655
  source 1..720: mol_type = other RNA

SEQ ID NO: 6519 - RNA, 720 nt, synthetic construct; identical to SEQ ID NO: 6199
  misc_feature 1..720: note = derived and/or modified sequence opt5 fromPurine_Nucleoside_Phosphorylase_deoD__Escherichia_coli_ _ADD59655
  source 1..720: mol_type = other RNA

SEQ ID NO: 6520 - RNA, 720 nt, synthetic construct
  misc_feature 1..720: note = derived and/or modified sequence opt6 fromPurine_Nucleoside_Phosphorylase_deoD__Escherichia_coli_ _ADD59655
  source 1..720: mol_type = other RNA
atggcaacacctcatataaatgcagaaatgggagactttgcagatgtagtactaatgccaggagacccattaagagcaaaatacatagcagaaacatttctagaagacgcaagagaagtaaataatgtaagaggaatgttaggatttacaggaacatataaaggaagaaaaatatcagtaatgggacatggaatgggaataccatcatgctcaatatataccaaagaattaataacagactttggagtaaaaaaaataataagagtaggatcatgcggggcagtattaccacacgtaaaattaagagatgtagtaataggaatgggagcatgtacagatagcaaagtaaatagaataagatttaaagatcacgatttcgcagcaatagcagatttcgatatggtaagaaatgccgtagacgcagcaaaagcattaggaatagacgcaagagtaggaaatctatttagcgcagatttattctatagtccagatggagaaatgttcgatgtaatggaaaaatacggaatattaggagtagagatggaagcagcaggaatatatggagtagcagcagaatttggagcaaaagcactaacaatatgtacagtgagtgatcacataagaacacatgaacaaacaacagcggcagaaagacaaacaacattcaatgacatgataaaaatagcgctagaaagtgtattattaggagataaagaataa

SEQ ID NO: 6521 - protein, 239 aa, synthetic construct; identical to SEQ ID NO: 6193
  REGION 1..239: note Purine_Nucleoside_Phosphorylase_deoD__Escherichia_coli__D6I 4N2

SEQ ID NO: 6522 - RNA, 720 nt, synthetic construct; identical to SEQ ID NO: 6234
  misc_feature 1..720: note Purine_Nucleoside_Phosphorylase_deoD__Escherichia_coli__EFE 60543
  source 1..720: mol_type = other RNA

SEQ ID NO: 6523 - RNA, 720 nt, synthetic construct; identical to SEQ ID NO: 6195
  misc_feature 1..720: note = derived and/or modified sequence opt1 fromPurine_Nucleoside_Phosphorylase_deoD__Escherichia_coli_ _EFE60543
  source 1..720: mol_type = other RNA

SEQ ID NO: 6524 - RNA, 720 nt, synthetic construct; identical to SEQ ID NO: 6196
  misc_feature 1..720: note = derived and/or modified sequence opt2 fromPurine_Nucleoside_Phosphorylase_deoD__Escherichia_coli_ _EFE60543
  source 1..720: mol_type = other RNA

SEQ ID NO: 6525 - RNA, 720 nt, synthetic construct; identical to SEQ ID NO: 6197
  misc_feature 1..720: note = derived and/or modified sequence opt3 fromPurine_Nucleoside_Phosphorylase_deoD__Escherichia_coli_ _EFE60543
  source 1..720: mol_type = other RNA

SEQ ID NO: 6526 - RNA, 720 nt, synthetic construct; identical to SEQ ID NO: 6198
  misc_feature 1..720: note = derived and/or modified sequence opt4 fromPurine_Nucleoside_Phosphorylase_deoD__Escherichia_coli_ _EFE60543
  source 1..720: mol_type = other RNA

SEQ ID NO: 6527 - RNA, 720 nt, synthetic construct; identical to SEQ ID NO: 6199
  misc_feature 1..720: note = derived and/or modified sequence opt5 fromPurine_Nucleoside_Phosphorylase_deoD__Escherichia_coli_ _EFE60543
  source 1..720: mol_type = other RNA

SEQ ID NO: 6528 - RNA, 720 nt, synthetic construct
  misc_feature 1..720: note = derived and/or modified sequence opt6 fromPurine_Nucleoside_Phosphorylase_deoD__Escherichia_coli_ _EFE60543
  source 1..720: mol_type = other RNA
atggcaacaccacatataaatgcagaaatgggagactttgcagatgtagtattaatgccaggagacccactaagagcaaaatatatagcagaaacatttctagaagacgcaagagaagtaaataacgtaagaggaatgctaggttttacaggaacatataaaggaagaaaaataagtgtaatggggcatggaatgggaataccatcatgcagtatatatactaaagaactaataacagactttggagtgaaaaaaataataagagtaggaagttgcggagcagtactaccacacgtaaaattaagagatgtagtaataggaatgggagcatgtacagatagtaaagtaaatagaataagatttaaagatcacgatttcgcagcaatagcagatttcgatatggtaagaaatgcagtagacgcagcaaaagcactaggaatagatgcaagagtaggaaatctatttagcgcagacctattctatagtcctgacggtgaaatgttcgatgtaatggaaaaatacggaatattaggggtagaaatggaagcagcaggaatatatggagtagcagcagaatttggggcaaaagcattaacaatatgtacagtaagtgatcacataagaacacacgaacaaacaaccgcagcagaaagacaaacaacattcaatgacatgataaaaatagcactagaaagtgtactactaggagataaagagtaa

SEQ ID NO: 6529 - protein, 239 aa, synthetic construct; identical to SEQ ID NO: 6201
  REGION 1..239: note Purine_Nucleoside_Phosphorylase_deoD__Escherichia_coli__D6I HU2

SEQ ID NO: 6530 - RNA, 720 nt, synthetic construct
  misc_feature 1..720: note Purine_Nucleoside_Phosphorylase_deoD__Escherichia_coli__EFF 03573
  source 1..720: mol_type = other RNA
atggctaccccacacattaatgcagaaatgggcgatttcgctgacgtagttttgatgccaggcgacccgctgcgtgcgaagtatattgctgaaactttccttgaagatgcccgtgaagtgaacaacgttcgcggtatgctgggcttcaccggtacttacaaaggccgcaaaatttccgtaatgggtcacggtatgggtatcccgtcctgctccatctacaccaaagaactgatcaccgatttcggcgtgaagaaaattatccgcgtgggttcctgtggcgcagttctgccgcacgtaaaactgcgcgacgtcgttatcggtatgggtgcctgcaccgattccaaagttaaccgcatccgttttaaagatcatgactttgccgctatcgctgactttgacatggtgcgtaacgcggtagacgcggctaaagcactgggcgttgatgctcgcgtgggtaacctgttctccgctgacctgttctactctccggacggcgaaatgttcgacgtgatggaaaaatacggcatcctcggcgtggaaatggaagcggctggtatctacggcgtcgctgcagaatttggcgcgaaagccctgaccatctgcaccgtatctgatcacatccgcactcacgagcagaccactgccgctgagcgtcagaccaccttcaacgacatgatcaaaatcgcactggaatccgttctgctgggcgataaagagtaa

SEQ ID NO: 6531 - RNA, 720 nt, synthetic construct; identical to SEQ ID NO: 6203
  misc_feature 1..720: note = derived and/or modified sequence opt1 fromPurine_Nucleoside_Phosphorylase_deoD__Escherichia_coli_ _EFF03573
  source 1..720: mol_type = other RNA

SEQ ID NO: 6532 - RNA, 720 nt, synthetic construct; identical to SEQ ID NO: 6204
  misc_feature 1..720: note = derived and/or modified sequence opt2 fromPurine_Nucleoside_Phosphorylase_deoD__Escherichia_coli_ _EFF03573
  source 1..720: mol_type = other RNA

SEQ ID NO: 6533 - RNA, 720 nt, synthetic construct; identical to SEQ ID NO: 6205
  misc_feature 1..720: note = derived and/or modified sequence opt3 fromPurine_Nucleoside_Phosphorylase_deoD__Escherichia_coli_ _EFF03573
  source 1..720: mol_type = other RNA

SEQ ID NO: 6534 - RNA, 720 nt, synthetic construct; identical to SEQ ID NO: 6206
  misc_feature 1..720: note = derived and/or modified sequence opt4 fromPurine_Nucleoside_Phosphorylase_deoD__Escherichia_coli_ _EFF03573
  source 1..720: mol_type = other RNA

SEQ ID NO: 6535 - RNA, 720 nt, synthetic construct; identical to SEQ ID NO: 6207
  misc_feature 1..720: note = derived and/or modified sequence opt5 fromPurine_Nucleoside_Phosphorylase_deoD__Escherichia_coli_ _EFF03573
  source 1..720: mol_type = other RNA

SEQ ID NO: 6536 - RNA, 720 nt, synthetic construct
  misc_feature 1..720: note = derived and/or modified sequence opt6 fromPurine_Nucleoside_Phosphorylase_deoD__Escherichia_coli_ _EFF03573
  source 1..720: mol_type = other RNA
atggcaacaccacatataaatgcagaaatgggagactttgcagatgtagtactaatgccaggagatccactaagagcaaaatacatagcagaaacatttctagaagacgcaagagaagtaaataatgtaagaggaatgttaggcttcacaggaacatataaaggaaggaaaataagcgtaatgggacatggcatgggaataccatcatgttcaatatatacaaaagaattaataacagactttggagtaaaaaaaataataagagtaggctcatgcggagcagtactacctcatgtaaaattaagggatgtagtaataggaatgggagcctgtacagatagcaaagtaaatcgaataagatttaaagatcacgatttcgcagcaatagcagatttcgatatggtaagaaatgcagtagacgcagcaaaagcattaggagtagacgcaagagtaggaaatttatttagcgcagatttattttatagtccagacggagaaatgttcgatgtaatggaaaaatacgggatattaggagtagaaatggaagcagcaggaatatatggagtagcagcagaatttggagcaaaagcactaacaatatgtacagtaagcgatcatataagaacacatgaacaaacaacagcagccgaaagacaaacaacattcaatgacatgataaaaatcgcactagaaagcgtattattaggagataaagaataa

SEQ ID NO: 6537 - protein, 239 aa, synthetic construct; identical to SEQ ID NO: 6201
  REGION 1..239: note Purine_Nucleoside_Phosphorylase_deoD__Escherichia_coli__D6J 6A4

SEQ ID NO: 6538 - RNA, 720 nt, synthetic construct
  misc_feature 1..720: note Purine_Nucleoside_Phosphorylase_deoD__Escherichia_coli__EFF 14801
  source 1..720: mol_type = other RNA
atggctaccccacacattaatgcagaaatgggcgatttcgctgacgtagttttgatgccaggcgacccgctgcgtgcgaagtatattgctgaaactttccttgaagatgcccgtgaagtgaacaacgttcgcggtatgctgggcttcaccggtacttacaaaggccgcaaaatttccgtaatgggtcacggtatgggtatcccgtcctgctccatctacaccaaagaactgatcaccgatttcggcgtgaagaaaattatccgcgtaggctcttgtggcgctgttctgccacacgtaaaactgcgcgacgtagttatcggtatgggtgcctgcaccgattccaaagttaaccgcatccgttttaaagaccatgactttgccgctatcgctgactttgacatggtgcgtaacgcggtagatgcggctaaagcactgggcgttgatgctcgcgttggtaacctgttctccgctgacctgttctactctccggacggcgaaatgttcgacgtgatggaaaaatacggcatcctcggcgtggaaatggaagcggctggtatctacggcgtggctgcagagtttggcgcgaaagccctgaccatctgcaccgtgtctgaccacatccgcactcacgagcagaccactgccgctgagcgtcagaccaccttcaacgacatgatcaaaatcgcactggaatccgttctgctgggcgataaagagtaa

SEQ ID NO: 6539 - RNA, 720 nt, synthetic construct; identical to SEQ ID NO: 6203
  misc_feature 1..720: note = derived and/or modified sequence opt1 fromPurine_Nucleoside_Phosphorylase_deoD__Escherichia_coli_ _EFF14801
  source 1..720: mol_type = other RNA

SEQ ID NO: 6540 - RNA, 720 nt, synthetic construct; identical to SEQ ID NO: 6204
  misc_feature 1..720: note = derived and/or modified sequence opt2 fromPurine_Nucleoside_Phosphorylase_deoD__Escherichia_coli_ _EFF14801
  source 1..720: mol_type = other RNA

SEQ ID NO: 6541 - RNA, 720 nt, synthetic construct; identical to SEQ ID NO: 6205
  misc_feature 1..720: note = derived and/or modified sequence opt3 fromPurine_Nucleoside_Phosphorylase_deoD__Escherichia_coli_ _EFF14801
  source 1..720: mol_type = other RNA

SEQ ID NO: 6542 - RNA, 720 nt, synthetic construct; identical to SEQ ID NO: 6206
  misc_feature 1..720: note = derived and/or modified sequence opt4 fromPurine_Nucleoside_Phosphorylase_deoD__Escherichia_coli_ _EFF14801
  source 1..720: mol_type = other RNA

SEQ ID NO: 6543 - RNA, 720 nt, synthetic construct; identical to SEQ ID NO: 6207
  misc_feature 1..720: note = derived and/or modified sequence opt5 fromPurine_Nucleoside_Phosphorylase_deoD__Escherichia_coli_ _EFF14801
  source 1..720: mol_type = other RNA

SEQ ID NO: 6544 - RNA, 720 nt, synthetic construct
  misc_feature 1..720: note = derived and/or modified sequence opt6 fromPurine_Nucleoside_Phosphorylase_deoD__Escherichia_coli_ _EFF14801
  source 1..720: mol_type = other RNA
atggcgacaccacatataaacgcagaaatgggagactttgcagatgtagtactaatgccaggggacccattaagagcaaaatacatagccgaaacatttttagaagacgcaagagaagtaaataacgtaagaggaatgttaggatttacaggaacatataaaggaagaaaaataagtgtaatgggacatggaatgggaataccctcatgctcaatatatacaaaagaattaataacagactttggagtaaaaaagataataagagtaggatcatgcggagccgtattaccacacgtaaaattaagagatgtagtaataggaatgggagcatgtacagatagcaaagtaaatagaataagatttaaagatcacgatttcgcagcaatagcagatttcgatatggtaagaaatgcagtagatgcagcaaaagcactaggagtagacgcaagagtaggaaatctatttagcgcagacttattctatagtccagatggagaaatgtttgatgtaatggaaaaatacggaatattaggagtagaaatggaagcagcagggatatatggagtggcagcagaattcggagcaaaagcactaacaatatgtacagtgtcagatcatataagaacacacgaacaaacaacagcagcagaaagacaaacaacattcaatgacatgataaaaatagcactagaaagcgtactattaggagataaagaataa

SEQ ID NO: 6545 - protein, 239 aa, synthetic construct; identical to SEQ ID NO: 6193
  REGION 1..239: note Purine_Nucleoside_Phosphorylase_deoD__Escherichia_coli__E0J 437

SEQ ID NO: 6546 - RNA, 720 nt, synthetic construct
  misc_feature 1..720: note Purine_Nucleoside_Phosphorylase_deoD__Escherichia_coli__AFH 14259
  source 1..720: mol_type = other RNA
atggctaccccacacattaatgcagaaatgggcgatttcgctgacgtagttttgatgccaggcgacccgctgcgtgcgaagtatattgctgaaactttccttgaagatgcccgtgaagtgaacaacgttcgcggtatgctgggcttcaccggtacttacaaaggccgcaaaatttccgtaatgggtcacggtatgggtatcccgtcctgctccatctacaccaaagaactgatcaccgatttcggcgtgaagaaaattatccgcgtgggttcctgtggcgcagttctgccgcacgtaaaactgcgcgacgtcgttatcggtatgggtgcctgcaccgattccaaagttaaccgcatccgttttaaagatcatgactttgccgctatcgctgactttgacatggtgcgtaacgcggtagacgcggctaaagcactgggcattgatgctcgcgttggtaacctgttctccgctgacctgttctactctccggacggcgaaatgttcgacgtgatggaaaaatacggcatcctcggcgtggaaatggaagcagctggtatctacggcgtcgctgcagaatttggcgcgaaagccctgaccatctgcaccgtgtctgaccacatccgcactcacgagcagaccactgccgctgagcgtcagaccaccttcaacgacatgatcaaaatcgcactggaatccgttctgctgggcgataaagagtaa

SEQ ID NO: 6547 - RNA, 720 nt, synthetic construct; identical to SEQ ID NO: 6195
  misc_feature 1..720: note = derived and/or modified sequence opt1 fromPurine_Nucleoside_Phosphorylase_deoD__Escherichia_coli_ _AFH14259
  source 1..720: mol_type = other RNA

SEQ ID NO: 6548 - RNA, 720 nt, synthetic construct; identical to SEQ ID NO: 6196
  misc_feature 1..720: note = derived and/or modified sequence opt2 fromPurine_Nucleoside_Phosphorylase_deoD__Escherichia_coli_ _AFH14259
  source 1..720: mol_type = other RNA

SEQ ID NO: 6549 - RNA, 720 nt, synthetic construct; identical to SEQ ID NO: 6197
  misc_feature 1..720: note = derived and/or modified sequence opt3 fromPurine_Nucleoside_Phosphorylase_deoD__Escherichia_coli_ _AFH14259
  source 1..720: mol_type = other RNA

SEQ ID NO: 6550 - RNA, 720 nt, synthetic construct; identical to SEQ ID NO: 6198
  misc_feature 1..720: note = derived and/or modified sequence opt4 fromPurine_Nucleoside_Phosphorylase_deoD__Escherichia_coli_ _AFH14259
  source 1..720: mol_type = other RNA

SEQ ID NO: 6551 - RNA, 720 nt, synthetic construct; identical to SEQ ID NO: 6199
  misc_feature 1..720: note = derived and/or modified sequence opt5 fromPurine_Nucleoside_Phosphorylase_deoD__Escherichia_coli_ _AFH14259
  source 1..720: mol_type = other RNA

SEQ ID NO: 6552 - RNA, 720 nt, synthetic construct
  misc_feature 1..720: note = derived and/or modified sequence opt6 fromPurine_Nucleoside_Phosphorylase_deoD__Escherichia_coli_ _AFH14259
  source 1..720: mol_type = other RNA
atggcaacaccacatataaatgcagaaatgggagactttgcagacgtagtattaatgccaggagacccattaagagcaaaatacatagcagaaacatttctagaagatgcaagagaagtaaataacgtaagaggaatgttaggctttacaggaacatataaaggaagaaaaatatcagtaatgggacatggaatgggaataccaagctgctcaatatatacaaaagaactgataacagactttggagtaaaaaaaataataagagtgggatcatgcggagcagtactaccacacgtaaaattaagagatgtagtaataggaatgggagcatgtaccgatagtaaagtaaatagaataagatttaaagatcacgatttcgcagcaatagcagattttgatatggtaagaaatgcagtggacgcagcaaaagcattaggaatagatgcaagagtgggaaatctctttagtgcggacctattctatagcccagacggagaaatgttcgatgtaatggaaaaatacgggatattaggagtagaaatggaagcagcaggaatatatggagtagccgcagaatttggcgcaaaagcattaacaatatgtacagtaagcgatcacataagaacacacgaacaaacaacagcagcagaaagacaaacaacattcaatgatatgataaaaatagcactagaaagtgtactattaggagataaagaataa

SEQ ID NO: 6553 - protein, 239 aa, synthetic construct; identical to SEQ ID NO: 6201
  REGION 1..239: note Purine_Nucleoside_Phosphorylase_deoD__Escherichia_coli__E2Q LE4

SEQ ID NO: 6554 - RNA, 720 nt, synthetic construct
  misc_feature 1..720: note Purine_Nucleoside_Phosphorylase_deoD__Escherichia_coli__AJO 86506
  source 1..720: mol_type = other RNA
atggctactccacacattaatgcagaaatgggcgattttgctgacgtagttttgatgccaggcgacccgctgcgtgcgaagtatattgctgaaactttccttgaagatgcccgtgaagtgaacaacgttcgcggtatgctgggcttcactggtacttacaaaggccgcaaaatttccgtaatgggccacggtatgggtatcccgtcctgctccatctacaccaaagaactgatcactgatttcggcgtgaagaaaattatccgcgtgggttcctgtggcgctgttctgccgcacgtaaaactgcgcgacgtcgttatcggtatgggtgcctgcaccgattccaaagttaaccgcatccgttttaaagaccatgactttgccgctatcgctgacttcgacatggtgcgtaacgcggtagacgcggcaaaagcactgggcgttgatgctcgcgttggtaacctgttctccgctgacctgttctactctccggacggcgaaatgttcgacgtgatggaaaaatacggcatcctcggcgtggaaatggaagcggcgggtatctacggcgtcgctgcagaatttggcgcgaaagccctgaccatctgcaccgtgtctgaccacatccgcactcacgagcagaccactgccgctgagcgtcagaccaccttcaacgacatgatcaaaatcgcgctggaatccgttctgctgggcgataaagagtaa

SEQ ID NO: 6555 - RNA, 720 nt, synthetic construct; identical to SEQ ID NO: 6203
  misc_feature 1..720: note = derived and/or modified sequence opt1 fromPurine_Nucleoside_Phosphorylase_deoD__Escherichia_coli_ _AJO86506
  source 1..720: mol_type = other RNA

SEQ ID NO: 6556 - RNA, 720 nt, synthetic construct; identical to SEQ ID NO: 6204
  misc_feature 1..720: note = derived and/or modified sequence opt2 fromPurine_Nucleoside_Phosphorylase_deoD__Escherichia_coli_ _AJO86506
  source 1..720: mol_type = other RNA

SEQ ID NO: 6557 - RNA, 720 nt, synthetic construct; identical to SEQ ID NO: 6205
  misc_feature 1..720: note = derived and/or modified sequence opt3 fromPurine_Nucleoside_Phosphorylase_deoD__Escherichia_coli_ _AJO86506
  source 1..720: mol_type = other RNA

SEQ ID NO: 6558 - RNA, 720 nt, synthetic construct; identical to SEQ ID NO: 6206
  misc_feature 1..720: note = derived and/or modified sequence opt4 fromPurine_Nucleoside_Phosphorylase_deoD__Escherichia_coli_ _AJO86506
  source 1..720: mol_type = other RNA

SEQ ID NO: 6559 - RNA, 720 nt, synthetic construct; identical to SEQ ID NO: 6207
  misc_feature 1..720: note = derived and/or modified sequence opt5 fromPurine_Nucleoside_Phosphorylase_deoD__Escherichia_coli_ _AJO86506
  source 1..720: mol_type = other RNA

SEQ ID NO: 6560 - RNA, 720 nt, synthetic construct
  misc_feature 1..720: note = derived and/or modified sequence opt6 fromPurine_Nucleoside_Phosphorylase_deoD__Escherichia_coli_ _AJO86506
  source 1..720: mol_type = other RNA
atggcaacaccacatataaatgcagaaatgggagacttcgcagatgtagtactaatgccaggagacccactaagagcaaaatatatagcagaaacatttctagaagacgcaagagaagtaaacaacgtaagaggtatgttaggatttacaggaacatataaaggaagaaaaataagtgtaatgggacatggaatgggaataccatcatgtagtatatatacaaaagaattaataacagactttggagtaaaaaaaataataagagtaggatcatgcggagccgtactaccacacgtaaaactaagagatgtagtaataggaatgggagcctgtacagatagcaaagtaaatagaataagatttaaagatcatgatttcgcagcaatagcagatttcgacatggtaagaaatgcagtagacgcagcaaaagcattaggagtagacgcgagagtaggaaatttatttagcgcagacttattctattcaccagacggagaaatgttcgatgtaatggaaaaatatggaatattaggagtagaaatggaagcagcaggaatatatggagtagcagcagaatttggagcaaaagcactaacaatatgtacagtaagcgatcacataagaacacacgaacaaacaacagcagcagaaagacaaacaacattcaatgacatgataaaaatagcactagaaagcgtactattaggagataaagaataa

SEQ ID NO: 6561 - protein, 239 aa, synthetic construct; identical to SEQ ID NO: 6193
  REGION 1..239: note Purine_Nucleoside_Phosphorylase_deoD__Escherichia_coli__E3P FG7

SEQ ID NO: 6562 - RNA, 720 nt, synthetic construct
  misc_feature 1..720: note Purine_Nucleoside_Phosphorylase_deoD__Escherichia_coli__CBJ 04246
  source 1..720: mol_type = other RNA
atggctaccccacacattaatgcagaaatgggcgatttcgctgacgtagttttgatgccaggcgacccgctgcgtgcgaagtatattgctgaaactttccttgaagatgcccgtgaagtgaacaacgttcgcggtatgctgggcttcaccggtacttacaaaggccgcaaaatttccgtaatgggtcacggtatgggtatcccgtcctgctccatctacaccaaagaactgatcaccgatttcggcgtgaagaaaattatccgcgtgggttcctgtggcgcagttctgccgcacgtaaaactacgcgacgtcgttatcggtatgggtgcctgcaccgattccaaagttaaccgcatccgttttaaagatcatgactttgccgctatcgctgactttgacatggtgcgtaacgcggtagacgcggctaaagcactgggcattgatgctcgcgttggtaacctgttctccgctgacctgttctactctccggacggcgaaatgttcgacgtgatggaaaaatacggcatcctcggcgtggaaatggaagcggctggtatctacggcgtcgctgcagaatttggcgcgaaagccctgaccatctgtaccgtgtctgaccacatccgcactcacgagcagaccactgccgctgagcgtcagaccaccttcaacgacatgatcaaaatcgcactggaatccgttctgctgggcgataaagagtaa

SEQ ID NO: 6563 - RNA, 720 nt, synthetic construct; identical to SEQ ID NO: 6195
  misc_feature 1..720: note = derived and/or modified sequence opt1 fromPurine_Nucleoside_Phosphorylase_deoD__Escherichia_coli_ _CBJ04246
  source 1..720: mol_type = other RNA

SEQ ID NO: 6564 - RNA, 720 nt, synthetic construct; identical to SEQ ID NO: 6196
  misc_feature 1..720: note = derived and/or modified sequence opt2 fromPurine_Nucleoside_Phosphorylase_deoD__Escherichia_coli_ _CBJ04246
  source 1..720: mol_type = other RNA

SEQ ID NO: 6565 - RNA, 720 nt, synthetic construct; identical to SEQ ID NO: 6197
  misc_feature 1..720: note = derived and/or modified sequence opt3 fromPurine_Nucleoside_Phosphorylase_deoD__Escherichia_coli_ _CBJ04246
  source 1..720: mol_type = other RNA

SEQ ID NO: 6566 - RNA, 720 nt, synthetic construct; identical to SEQ ID NO: 6198
  misc_feature 1..720: note = derived and/or modified sequence opt4 fromPurine_Nucleoside_Phosphorylase_deoD__Escherichia_coli_ _CBJ04246
  source 1..720: mol_type = other RNA

SEQ ID NO: 6567 - RNA, 720 nt, synthetic construct; identical to SEQ ID NO: 6199
  misc_feature 1..720: note = derived and/or modified sequence opt5 fromPurine_Nucleoside_Phosphorylase_deoD__Escherichia_coli_ _CBJ04246
  source 1..720: mol_type = other RNA

SEQ ID NO: 6568 - RNA, 720 nt, synthetic construct
  misc_feature 1..720: note = derived and/or modified sequence opt6 fromPurine_Nucleoside_Phosphorylase_deoD__Escherichia_coli_ _CBJ04246
  source 1..720: mol_type = other RNA
atggcaacaccacatataaatgcagaaatgggagactttgcagatgtagtattaatgccaggagatccattaagagcaaaatatatagcagaaacatttctagaagacgcaagagaagtaaataacgtaagaggaatgctaggatttacaggaacatataaaggtagaaaaatatcagtaatgggacatggaatgggaataccctcatgcagcatatatacaaaagaattaataacagacttcggagtgaaaaaaataataagagtaggatcatgtggagcagtactaccacacgtgaaattaagagatgtagtaataggaatgggagcatgtacagatagcaaagtaaatagaataagatttaaagatcacgattttgcagccatagcagatttcgatatggtaagaaacgcagtagacgcagcaaaagcattaggaatagacgcaagagtaggaaatctatttagcgcagacttgttctattcaccagacggggaaatgttcgatgtaatggaaaaatacggaattttaggcgtagaaatggaagcagcaggaatatatggagtagcagcagaatttggagcaaaagcactaacaatatgtacagtaagcgatcacattagaacacatgaacaaacaacagcagctgaacgacaaacaacattcaatgacatgataaaaatagcactagagagtgtactattaggagataaagaataa

SEQ ID NO: 6569 - protein, 239 aa, synthetic construct; identical to SEQ ID NO: 6193
  REGION 1..239: note Purine_Nucleoside_Phosphorylase_deoD__Escherichia_coli__E8Y EH0

SEQ ID NO: 6570 - RNA, 720 nt, synthetic construct; identical to SEQ ID NO: 6546
  misc_feature 1..720: note Purine_Nucleoside_Phosphorylase_deoD__Escherichia_coli__ADX 52500
  source 1..720: mol_type = other RNA

SEQ ID NO: 6571 - RNA, 720 nt, synthetic construct; identical to SEQ ID NO: 6195
  misc_feature 1..720: note = derived and/or modified sequence opt1 fromPurine_Nucleoside_Phosphorylase_deoD__Escherichia_coli_ _ADX52500
  source 1..720: mol_type = other RNA

SEQ ID NO: 6572 - RNA, 720 nt, synthetic construct; identical to SEQ ID NO: 6196
  misc_feature 1..720: note = derived and/or modified sequence opt2 fromPurine_Nucleoside_Phosphorylase_deoD__Escherichia_coli_ _ADX52500
  source 1..720: mol_type = other RNA

SEQ ID NO: 6573 - RNA, 720 nt, synthetic construct; identical to SEQ ID NO: 6197
  misc_feature 1..720: note = derived and/or modified sequence opt3 fromPurine_Nucleoside_Phosphorylase_deoD__Escherichia_coli_ _ADX52500
  source 1..720: mol_type = other RNA

SEQ ID NO: 6574 - RNA, 720 nt, synthetic construct; identical to SEQ ID NO: 6198
  misc_feature 1..720: note = derived and/or modified sequence opt4 fromPurine_Nucleoside_Phosphorylase_deoD__Escherichia_coli_ _ADX52500
  source 1..720: mol_type = other RNA

SEQ ID NO: 6575 - RNA, 720 nt, synthetic construct; identical to SEQ ID NO: 6199
  misc_feature 1..720: note = derived and/or modified sequence opt5 fromPurine_Nucleoside_Phosphorylase_deoD__Escherichia_coli_ _ADX52500
  source 1..720: mol_type = other RNA

SEQ ID NO: 6576 - RNA, 720 nt, synthetic construct
  misc_feature 1..720: note = derived and/or modified sequence opt6 fromPurine_Nucleoside_Phosphorylase_deoD__Escherichia_coli_ _ADX52500
  source 1..720: mol_type = other RNA
atggcaacaccacatataaatgcagaaatgggagactttgcagatgtagtgctaatgccaggggacccactaagagcgaaatacatagcagaaacatttctagaagacgcgagagaagtaaataacgtaagaggaatgttaggatttacaggaacatataaaggaagaaaaatatcagtaatgggacatggaatgggaataccatcgtgctcaatatatacaaaagaattaataacagactttggagtaaaaaaaataataagagtaggatcatgcggagcagtactaccacacgtaaaactaagagatgtagtaatagggatgggagcatgtacagatagcaaagtaaatagaatacgatttaaagatcacgatttcgcagcaatagcagatttcgatatggtacgaaatgcagtagacgcagcaaaagcattaggaatagacgcaagagtaggaaatttatttagcgcagatttattctatagcccagacggagaaatgttcgatgtaatggaaaaatacgggatattaggagtagaaatggaagcagcaggaatatatggagtagcagcagaatttggagcaaaagcactaacaatatgtacagtaagcgatcacataagaacacacgaacaaacaacagcggcagaaagacaaacaacgtttaatgacatgataaaaatagcactcgaaagcgtgctattaggagataaagaataa

SEQ ID NO: 6577 - protein, 239 aa, synthetic construct; identical to SEQ ID NO: 6193
  REGION 1..239: note Purine_Nucleoside_Phosphorylase_deoD__Escherichia_coli__F4N LK2

SEQ ID NO: 6578 - RNA, 720 nt, synthetic construct; identical to SEQ ID NO: 6546
  misc_feature 1..720: note Purine_Nucleoside_Phosphorylase_deoD__Escherichia_coli__EGJ 07033
  source 1..720: mol_type = other RNA

SEQ ID NO: 6579 - RNA, 720 nt, synthetic construct; identical to SEQ ID NO: 6195
  misc_feature 1..720: note = derived and/or modified sequence opt1 fromPurine_Nucleoside_Phosphorylase_deoD__Escherichia_coli_ _EGJ07033
  source 1..720: mol_type = other RNA

SEQ ID NO: 6580 - RNA, 720 nt, synthetic construct; identical to SEQ ID NO: 6196
  misc_feature 1..720: note = derived and/or modified sequence opt2 fromPurine_Nucleoside_Phosphorylase_deoD__Escherichia_coli_ _EGJ07033
  source 1..720: mol_type = other RNA

SEQ ID NO: 6581 - RNA, 720 nt, synthetic construct; identical to SEQ ID NO: 6197
  misc_feature 1..720: note = derived and/or modified sequence opt3 fromPurine_Nucleoside_Phosphorylase_deoD__Escherichia_coli_ _EGJ07033
  source 1..720: mol_type = other RNA

SEQ ID NO: 6582 - RNA, 720 nt, synthetic construct; identical to SEQ ID NO: 6198
  misc_feature 1..720: note = derived and/or modified sequence opt4 fromPurine_Nucleoside_Phosphorylase_deoD__Escherichia_coli_ _EGJ07033
  source 1..720: mol_type = other RNA

SEQ ID NO: 6583 - RNA, 720 nt, synthetic construct; identical to SEQ ID NO: 6199
  misc_feature 1..720: note = derived and/or modified sequence opt5 fromPurine_Nucleoside_Phosphorylase_deoD__Escherichia_coli_ _EGJ07033
  source 1..720: mol_type = other RNA

SEQ ID NO: 6584 - RNA, 720 nt, synthetic construct
  misc_feature 1..720: note = derived and/or modified sequence opt6 fromPurine_Nucleoside_Phosphorylase_deoD__Escherichia_coli_ _EGJ07033
  source 1..720: mol_type = other RNA
atggcaacaccacatataaatgcagaaatgggagattttgcagatgtagtactaatgccaggagatccactaagggccaaatatattgcagaaacatttctagaagatgcaagagaagtaaataacgtacgaggaatgctaggatttaccggaacatataaaggaagaaaaatctcagtaatgggacatggaatgggcataccatcatgctcaatatatacaaaagaattaataacagactttggagtaaaaaaaataatacgagtaggatcgtgtggagcagtactccctcacgtaaaattaagagatgtagttataggaatgggagcctgtacagatagcaaagtaaatagaataagatttaaagatcacgatttcgcagcaatagcagatttcgatatggtaaggaatgcagtggacgcagcaaaagcattaggaatagacgcaagagtaggaaacttatttagtgcagacttattctatagtccagacggagaaatgttcgatgtaatggaaaaatacggaatattaggagtagaaatggaagcagcaggaatatatggagtagcagcggaatttggagcaaaagcactaacaatatgtaccgtgagtgatcacataagaacacacgaacaaacaactgcagcagaaagacaaacaacatttaatgatatgataaaaatagcactagaaagtgtactattaggagataaagaataa

SEQ ID NO: 6585 - protein, 239 aa, synthetic construct; identical to SEQ ID NO: 6201
  REGION 1..239: note Purine_Nucleoside_Phosphorylase_deoD__Escherichia_coli__F4S EX7

SEQ ID NO: 6586 - RNA, 720 nt, synthetic construct
  misc_feature 1..720: note Purine_Nucleoside_Phosphorylase_deoD__Escherichia_coli__EGI 12380
  source 1..720: mol_type = other RNA
atggctaccccacacattaatgcagaaatgggcgatttcgctgacgtagttttgatgccaggcgacccgctgcgtgcgaagtatattgctgaaactttccttgaagatgcccgtgaagtgaacaacgttcgcggtatgctgggcttcaccggtacttacaaaggccgcaaaatttccgtaatgggtcacggtatgggtatcccgtcctgctccatctacaccaaagaactgatcaccgatttcggcgtgaagaaaattatccgcgtgggttcctgtggcgcagttctgccgcacgtaaaactgcgcgacgtcgttatcggtatgggtgcctgcaccgattccaaagttaaccgcatccgttttaaagaccatgactttgccgctatcgctgactttgacatggtgcgtaacgcggtagacgcggctaaagcactgggcgttgatgctcgcgttggtaacctgttctccgctgacctgttctactctccggacggcgaaatgttcgacgtgatggaaaaatacggcatcctcggcgtggaaatggaagcggctggtatctacggcgtcgctgcagaatttggcgcgaaagccctgaccatctgcaccgtgtctgaccacatccgcactcacgagcagaccactgccgctgagcgtcagaccaccttcaacgacatgatcaaaatcgcactggaatccgttctgctgggcgataaagagtaa

SEQ ID NO: 6587 - RNA, 720 nt, synthetic construct; identical to SEQ ID NO: 6203
  misc_feature 1..720: note = derived and/or modified sequence opt1 fromPurine_Nucleoside_Phosphorylase_deoD__Escherichia_coli_ _EGI12380
  source 1..720: mol_type = other RNA

SEQ ID NO: 6588 - RNA, 720 nt, synthetic construct; identical to SEQ ID NO: 6204
  misc_feature 1..720: note = derived and/or modified sequence opt2 fromPurine_Nucleoside_Phosphorylase_deoD__Escherichia_coli_ _EGI12380
  source 1..720: mol_type = other RNA

SEQ ID NO: 6589 - RNA, 720 nt, synthetic construct; identical to SEQ ID NO: 6205
  misc_feature 1..720: note = derived and/or modified sequence opt3 fromPurine_Nucleoside_Phosphorylase_deoD__Escherichia_coli_ _EGI12380
  source 1..720: mol_type = other RNA

SEQ ID NO: 6590 - RNA, 720 nt, synthetic construct; identical to SEQ ID NO: 6206
  misc_feature 1..720: note = derived and/or modified sequence opt4 fromPurine_Nucleoside_Phosphorylase_deoD__Escherichia_coli_ _EGI12380
  source 1..720: mol_type = other RNA

SEQ ID NO: 6591 - RNA, 720 nt, synthetic construct; identical to SEQ ID NO: 6207
  misc_feature 1..720: note = derived and/or modified sequence opt5 fromPurine_Nucleoside_Phosphorylase_deoD__Escherichia_coli_ _EGI12380
  source 1..720: mol_type = other RNA

SEQ ID NO: 6592 - RNA, 720 nt, synthetic construct
  misc_feature 1..720: note = derived and/or modified sequence opt6 fromPurine_Nucleoside_Phosphorylase_deoD__Escherichia_coli_ _EGI12380
  source 1..720: mol_type = other RNA
atggcaacaccacatataaatgcagaaatgggagactttgcagatgtagtactaatgccaggagacccattaagagcaaaatatatagcagaaacatttctagaagacgcaagagaagtaaataacgtaagaggaatgttgggattcacaggaacatataaaggaagaaaaatatcagtaatgggacacggcatgggaataccatcatgctcaatatatacaaaagaattaataacagactttggagtaaaaaaaataatacgagtaggatcatgcggagccgtactaccacacgtaaaattaagagacgtagtaataggaatgggagcatgtacagatagtaaagtaaacagaatacgatttaaagatcatgatttcgcagcaatagcagattttgatatggtaagaaatgcagtagacgctgcaaaagcactaggagtagacgcaagagtaggaaatctatttagtgcagacttattctatagcccagacggagaaatgttcgatgtaatggaaaaatacgggatattaggagtagaaatggaagcagcaggaatatatggagtagcagcagaatttggagcaaaagcactaacgatatgtacagtgagcgatcacataagaacacacgaacaaacgacagcagccgaacgacaaacaacattcaatgacatgataaaaatagcactagaaagcgtactattaggagataaagaataa

SEQ ID NO: 6593 - protein, 258 aa, synthetic construct
  REGION 1..258: note Purine_Nucleoside_Phosphorylase_deoD__Escherichia_coli__F4S TB8
MDLGGAVTPPLICHKKDKTMATPHINAEMGDFADVVLMPGDPLRAKYIAETFLEDAREVNNVRGMLGFTGTYKGRKISVMGHGMGIPSCSIYTKELITDFGVKKIIRVGSCGAVLPHVKLRDVVIGMGACTDSKVNRIRFKDHDFAAIADFDMVRNAVDAAKALGVDARVGNLFSADLFYSPDGEMFDVMEKYGILGVEMEAAGIYGVAAEFGAKALTICTVSDHIRTHEQTTAAERQTTFNDMIKIALESVLLGDKE

SEQ ID NO: 6594 - RNA, 777 nt, synthetic construct
  misc_feature 1..777: note Purine_Nucleoside_Phosphorylase_deoD__Escherichia_coli__EGI 17958
  source 1..777: mol_type = other RNA
atggatttgggcggagcagtgactccgcctttaatatgtcacaaaaaggataaaacgatggctactccacacattaatgcagaaatgggcgattttgctgacgtagttttgatgccaggcgacccgctgcgtgcgaagtatattgctgaaactttccttgaagatgcccgtgaagtgaacaacgttcgcggtatgctgggcttcactggtacttacaaaggccgcaaaatttccgtaatgggccacggtatgggtatcccgtcctgctccatctacaccaaagaactgatcactgatttcggcgtgaagaaaattatccgcgtgggttcctgtggcgctgttctgccgcacgtaaaactgcgcgacgtcgttatcggtatgggtgcctgcaccgattccaaagttaaccgcatccgttttaaagaccatgactttgccgctatcgctgacttcgacatggtgcgtaacgcggtagacgcggcaaaagcactgggcgttgatgctcgcgttggtaacctgttctccgctgacctgttctactctccggacggcgaaatgttcgacgtgatggaaaaatacggcatcctcggcgtggaaatggaagcggcgggtatctacggcgtcgctgcagaatttggcgcgaaagccctgaccatctgcaccgtgtctgaccacatccgcactcacgagcagaccactgccgctgagcgtcagaccaccttcaacgacatgatcaaaatcgcgctggaatccgttctgctgggcgataaagagtaa

SEQ ID NO: 6595 - RNA, 777 nt, synthetic construct
  misc_feature 1..777: note = derived and/or modified sequence opt1 fromPurine_Nucleoside_Phosphorylase_deoD__Escherichia_coli_ _EGI17958
  source 1..777: mol_type = other RNA
atggacctgggcggggccgtgaccccgcccctcatctgccacaagaaggacaagaccatggccacgccccacatcaacgcggagatgggcgacttcgccgacgtcgtgctgatgcccggggaccccctgcgcgccaagtacatcgccgagaccttcctcgaggacgcccgggaggtgaacaacgtccgcggcatgctggggttcaccggcacctacaagggccggaagatcagcgtgatggggcacggcatggggatcccgtcctgcagcatctacacgaaggagctgatcaccgacttcggcgtgaagaagatcatccgcgtcgggtcctgcggcgcggtgctcccccacgtgaagctgcgggacgtcgtgatcggcatgggggcctgcaccgacagcaaggtgaaccgcatccggttcaaggaccacgacttcgccgccatcgcggacttcgacatggtccgcaacgccgtggacgccgccaaggccctgggcgtggacgcgcgggtcgggaacctcttctccgccgacctgttctacagccccgacggcgagatgttcgacgtgatggagaagtacggcatcctgggggtggagatggaggccgccggcatctacggggtcgccgcggagttcggcgccaaggccctcaccatctgcacggtgtccgaccacatccgcacccacgagcagaccaccgccgccgagcggcagacgaccttcaacgacatgatcaagatcgcgctggagagcgtgctgctcggggacaaggagtga

SEQ ID NO: 6596 - RNA, 777 nt, synthetic construct
  misc_feature 1..777: note = derived and/or modified sequence opt2 fromPurine_Nucleoside_Phosphorylase_deoD__Escherichia_coli_ _EGI17958
  source 1..777: mol_type = other RNA
atggacctcggcggcgccgtcaccccccccctcatctgccacaagaaggacaagaccatggccaccccccacatcaacgccgagatgggcgacttcgccgacgtcgtcctcatgcccggcgaccccctccgcgccaagtacatcgccgagaccttcctcgaggacgcccgcgaggtcaacaacgtccgcggcatgctcggcttcaccggcacctacaagggccgcaagatctccgtcatgggccacggcatgggcatcccctcctgctccatctacaccaaggagctcatcaccgacttcggcgtcaagaagatcatccgcgtcggctcctgcggcgccgtcctcccccacgtcaagctccgcgacgtcgtcatcggcatgggcgcctgcaccgactccaaggtcaaccgcatccgcttcaaggaccacgacttcgccgccatcgccgacttcgacatggtccgcaacgccgtcgacgccgccaaggccctcggcgtcgacgcccgcgtcggcaacctcttctccgccgacctcttctactcccccgacggcgagatgttcgacgtcatggagaagtacggcatcctcggcgtcgagatggaggccgccggcatctacggcgtcgccgccgagttcggcgccaaggccctcaccatctgcaccgtctccgaccacatccgcacccacgagcagaccaccgccgccgagcgccagaccaccttcaacgacatgatcaagatcgccctcgagtccgtcctcctcggcgacaaggagtga

SEQ ID NO: 6597 - RNA, 777 nt, synthetic construct
  misc_feature 1..777: note = derived and/or modified sequence opt3 fromPurine_Nucleoside_Phosphorylase_deoD__Escherichia_coli_ _EGI17958
  source 1..777: mol_type = other RNA
atggacctgggcggggccgtgacaccccctctcatctgccacaagaaagataagaccatggctactccacatattaacgcagagatgggagacttcgccgatgtcgttcttatgccgggtgaccccctgagagcgaaatacatagctgaaacgtttttggaggatgccagggaagtgaataacgtacggggcatgttagggttcaccggaacatataagggccgcaaaatcagcgtgatgggtcacgggatgggcattccttcctgttctatctacactaaggagctgattaccgactttggagtcaagaaaatcatacgagtgggctcatgcggggcagttctaccacatgtgaagctccgtgatgtcgtgatcggaatgggtgcctgtacagacagtaaagtaaatagaattaggttcaaggatcacgactttgctgcaatcgccgatttcgacatggttcggaacgctgtggatgccgcgaaagcactgggcgtcgacgcccgcgtggggaatctttttagcgctgacctgttctattcccccgatggagaaatgtttgacgtgatggagaagtacggcattttgggtgtcgagatggaagccgcagggatctatggagttgctgccgagttcggcgcgaaggccctcaccatatgcactgtgtctgatcatattagaacacacgaacagaccacggcagctgagaggcaaactacctttaacgacatgatcaaaattgccctggagtcggtactgctcggcgataaggaatga

SEQ ID NO: 6598 - RNA, 777 nt, synthetic construct
  misc_feature 1..777: note = derived and/or modified sequence opt4 fromPurine_Nucleoside_Phosphorylase_deoD__Escherichia_coli_ _EGI17958
  source 1..777: mol_type = other RNA
atggacctgggcggcgccgtgaccccccccctgatctgccacaagaaggacaagaccatggccaccccccacatcaacgccgagatgggcgacttcgccgacgtggtgctgatgcccggcgaccccctgagagccaagtacatcgccgagaccttcctggaggacgccagagaggtgaacaacgtgagaggcatgctgggcttcaccggcacctacaagggcagaaagatcagcgtgatgggccacggcatgggcatccccagctgcagcatctacaccaaggagctgatcaccgacttcggcgtgaagaagatcatcagagtgggcagctgcggcgccgtgctgccccacgtgaagctgagagacgtggtgatcggcatgggcgcctgcaccgacagcaaggtgaacagaatcagattcaaggaccacgacttcgccgccatcgccgacttcgacatggtgagaaacgccgtggacgccgccaaggccctgggcgtggacgccagagtgggcaacctgttcagcgccgacctgttctacagccccgacggcgagatgttcgacgtgatggagaagtacggcatcctgggcgtggagatggaggccgccggcatctacggcgtggccgccgagttcggcgccaaggccctgaccatctgcaccgtgagcgaccacatcagaacccacgagcagaccaccgccgccgagagacagaccaccttcaacgacatgatcaagatcgccctggagagcgtgctgctgggcgacaaggagtga

SEQ ID NO: 6599 - RNA, 777 nt, synthetic construct
  misc_feature 1..777: note = derived and/or modified sequence opt5 fromPurine_Nucleoside_Phosphorylase_deoD__Escherichia_coli_ _EGI17958
  source 1..777: mol_type = other RNA
atggacctgggcggggccgtgacaccccctctcatctgccacaagaaagataagaccatggctacgccgcatattaacgccgagatgggagacttcgcggatgtcgttctgatgcccggcgaccctcttagagctaaatacatcgccgaaacctttctggaggatgcccgggaagtgaataacgtgcgcgggatgctcggattcacaggcacctataaggggagaaaaattagcgtcatgggacacggcatgggcatcccctcctgttctatttacacaaaggagctgatcaccgactttggggtgaagaaaatcattcgggttggaagctgcggcgctgtgcttcctcatgtcaagctgcgcgatgtggttatcgggatgggagcctgtacagactccaaagtgaatcggattagattcaaggatcacgactttgctgccatcgcggatttcgacatggtccgcaacgccgtggatgctgccaaagctctcggcgtggacgccagagtcgggaatctgttttctgcggacctgttctatagccccgatggagaaatgtttgacgttatggagaagtacggcattctcggcgtggagatggaagccgctgggatctatggagtggccgctgagttcggcgccaaggccctgaccatttgcacggtctccgatcatatccggacccacgaacagacaaccgctgcggagcgccaaacaacctttaacgacatgatcaaaattgcccttgagtctgtgctgctcggggataaggaatga

SEQ ID NO: 6600 - RNA, 777 nt, synthetic construct
  misc_feature 1..777: note = derived and/or modified sequence opt6 fromPurine_Nucleoside_Phosphorylase_deoD__Escherichia_coli_ _EGI17958
  source 1..777: mol_type = other RNA
atggatctaggaggagcagtaacaccaccattaatatgccataaaaaagacaaaactatggcaacaccacatataaatgcagaaatgggagactttgcagatgtagtattaatgccaggagacccactaagagcaaaatacatagcagaaacatttctagaagacgcaagagaagtaaataacgtaagaggaatgctaggatttacaggaacttataaaggaagaaaaatatcagtaatgggacatggaatgggaataccatcatgctcgatatatacaaaagaattaataacagattttggagtaaaaaaaataataagagtaggatcatgcggagcagtactacctcatgtaaaactaagagatgtagtaataggaatgggagcatgtacagatagtaaagtaaatagaataaggtttaaagatcacgacttcgcagcaatagcagatttcgatatggttagaaatgcagttgatgcagcaaaagccttaggagtagacgcaagagtaggaaatttatttagtgcagacttattctatagtccagacggagaaatgttcgacgtaatggaaaaatacggaatattaggagtagaaatggaagcagcaggaatatatggagtagcagcagaatttggagcaaaagcacttactatttgtacagtaagcgatcacataagaacacatgaacaaacaacagcagcagaaagacaaacaacgttcaatgacatgataaaaatagcattagaaagcgtattattaggagataaagaataa

SEQ ID NO: 6601 - protein, 239 aa, synthetic construct; identical to SEQ ID NO: 6193
  REGION 1..239: note Purine_Nucleoside_Phosphorylase_deoD__Escherichia_coli__F4T 9F1

SEQ ID NO: 6602 - RNA, 720 nt, synthetic construct
  misc_feature 1..720: note Purine_Nucleoside_Phosphorylase_deoD__Escherichia_coli__EGI 23374
  source 1..720: mol_type = other RNA
atggctaccccacacattaatgcagaaatgggcgatttcgctgacgtagttttgatgccaggcgacccgctgcgtgcgaagtatattgctgaaactttccttgaagatgcccgtgaagtgaacaacgttcgcggtatgctgggcttcaccggtacttacaaaggccgcaaaatttccgtaatgggtcacggtatgggtatcccgtcctgctccatctacaccaaagaactgatcaccgatttcggcgtgaagaaaattatccgcgtaggctcctgtggcgctgttctgccgcacgtaaaactgcgcgacgtcgttatcggtatgggtgcctgcaccgattccaaagttaaccgtatccgttttaaagaccatgactttgccgctatcgctgactttgacatggtgcgtaacgcggtagacgcggctaaagcactgggcattgatgctcgcgttggtaacctgttctccgctgacctgttctactctccggacggcgaaatgttcgacgtgatggaaaaatacggcatcctcggcgtggaaatggaagcggctggtatctacggcgtcgctgcagaatttggcgcgaaagccctgaccatctgtaccgtgtctgaccacatccgcactcacgagcagaccactgccgctgagcgtcagaccaccttcaacgacatgatcaaaattgcactggaatccgttctgctgggcgataaagagtaa

SEQ ID NO: 6603 - RNA, 720 nt, synthetic construct; identical to SEQ ID NO: 6195
  misc_feature 1..720: note = derived and/or modified sequence opt1 fromPurine_Nucleoside_Phosphorylase_deoD__Escherichia_coli_ _EGI23374
  source 1..720: mol_type = other RNA

SEQ ID NO: 6604 - RNA, 720 nt, synthetic construct; identical to SEQ ID NO: 6196
  misc_feature 1..720: note = derived and/or modified sequence opt2 fromPurine_Nucleoside_Phosphorylase_deoD__Escherichia_coli_ _EGI23374
  source 1..720: mol_type = other RNA

SEQ ID NO: 6605 - RNA, 720 nt, synthetic construct; identical to SEQ ID NO: 6197
  misc_feature 1..720: note = derived and/or modified sequence opt3 fromPurine_Nucleoside_Phosphorylase_deoD__Escherichia_coli_ _EGI23374
  source 1..720: mol_type = other RNA

SEQ ID NO: 6606 - RNA, 720 nt, synthetic construct; identical to SEQ ID NO: 6198
  misc_feature 1..720: note = derived and/or modified sequence opt4 fromPurine_Nucleoside_Phosphorylase_deoD__Escherichia_coli_ _EGI23374
  source 1..720: mol_type = other RNA

SEQ ID NO: 6607 - RNA, 720 nt, synthetic construct; identical to SEQ ID NO: 6199
  misc_feature 1..720: note = derived and/or modified sequence opt5 fromPurine_Nucleoside_Phosphorylase_deoD__Escherichia_coli_ _EGI23374
  source 1..720: mol_type = other RNA

SEQ ID NO: 6608 - RNA, 720 nt, synthetic construct
  misc_feature 1..720: note = derived and/or modified sequence opt6 fromPurine_Nucleoside_Phosphorylase_deoD__Escherichia_coli_ _EGI23374
  source 1..720: mol_type = other RNA
atggcaacaccacatataaatgcggaaatgggagactttgccgatgtagtattaatgccaggagacccattaagggcaaaatacatagcagaaacatttctagaagacgcaagagaagtaaataacgtaagaggaatgttgggatttacaggaacatataaaggaaggaaaataagtgtaatgggacatggaatgggaataccaagttgctcaatatatacaaaagaactaataacagattttggagtaaaaaaaataataagagtaggatcatgtggagcagtactaccacacgtaaaattaagagatgtagtaataggaatgggagcatgtacagatagtaaagtaaatagaataagatttaaagatcacgatttcgcagcaatagcagacttcgatatggtaagaaatgcagtagacgcagccaaagcattaggaatagacgcaagagtaggaaatttatttagcgcagacttattctatagtcctgacggagaaatgttcgatgtaatggaaaaatacggaatattaggagtagaaatggaagcagcaggaatatatggagtagcagcagaatttggagcaaaagcactaacaatatgtacagtgagcgatcacattagaacacacgaacaaacaacagcagcagaaagacaaacaacatttaatgacatgataaaaatagcattagaaagtgtattattaggagataaagaataa

SEQ ID NO: 6609 - protein, 258 aa, synthetic construct
  REGION 1..258: note Purine_Nucleoside_Phosphorylase_deoD__Escherichia_coli__F4U XB7
MDLGGALTPPLLCHKKDKTMATPHINAEMGDFADVVLMPGDPLRAKYIAETFLEDAREVNNVRGMLGFTGTYKGRKISVMGHGMGIPSCSIYTKELITDFGVKKIIRVGSCGAVLPHVKLRDVVIGMGACTDSKVNRIRFKDHDFAAIADFDMVRNAVDAAKALGVDARVGNLFSADLFYSPDGEMFDVMEKYGILGVEMEAAGIYGVAAEFGAKALTICTVSDHIRTHEQTTAAERQTTFNDMIKIALESVLLGDKE

SEQ ID NO: 6610 - RNA, 777 nt, synthetic construct
  misc_feature 1..777: note Purine_Nucleoside_Phosphorylase_deoD__Escherichia_coli__EGI 42706
  source 1..777: mol_type = other RNA
atggatttgggcggagcgttgactccgcctttgttatgtcacaaaaaggataaaacaatggctaccccacacattaatgcagaaatgggcgatttcgctgacgtagttttgatgccaggcgacccgctgcgtgcgaagtatattgctgaaactttccttgaagatgcccgtgaagtgaataacgttcgcggtatgctgggcttcactggtacttacaaaggccgcaaaatttccgtaatgggtcacggtatgggtatcccgtcctgctccatctacaccaaagaactgatcaccgatttcggcgtgaagaaaattatccgcgtaggctcctgtggcgctgttctaccacacgtaaaactgcgcgacgtcgttatcggtatgggtgcctgcaccgattccaaagttaaccgtatccgttttaaagaccatgactttgccgctatcgctgactttgacatggtgcgtaacgcggtagacgcggctaaagcactgggcgttgatgctcgcgttggtaacctgttctccgctgacctgttctactctccggacggcgaaatgttcgacgtgatggaaaaatacggcatcctcggcgtggaaatggaagcagctggtatctacggcgtcgctgcagaatttggcgcgaaagccctgaccatctgcaccgtgtctgaccacatccgcactcacgagcagaccactgccgctgagcgtcagaccaccttcaacgacatgatcaaaatcgcactggaatccgttctgttgggcgataaagagtaa

SEQ ID NO: 6611 - RNA, 777 nt, synthetic construct
  misc_feature 1..777: note = derived and/or modified sequence opt1 fromPurine_Nucleoside_Phosphorylase_deoD__Escherichia_coli_ _EGI42706
  source 1..777: mol_type = other RNA
atggacctgggcggggccctcaccccgcccctgctgtgccacaagaaggacaagaccatggccacgccccacatcaacgcggagatgggcgacttcgccgacgtggtcctcatgcccggggaccccctgcgcgccaagtacatcgccgagaccttcctggaggacgcccgggaggtgaacaacgtgcgcggcatgctcgggttcaccggcacctacaagggccggaagatcagcgtcatggggcacggcatggggatcccgtcctgcagcatctacacgaaggagctgatcaccgacttcggcgtgaagaagatcatccgcgtggggtcctgcggcgcggtcctgccccacgtgaagctccgggacgtggtcatcggcatgggggcctgcaccgacagcaaggtgaaccgcatccggttcaaggaccacgacttcgccgccatcgcggacttcgacatggtgcgcaacgccgtcgacgccgccaaggccctgggcgtggacgcgcgggtggggaacctgttctccgccgacctcttctacagccccgacggcgagatgttcgacgtcatggagaagtacggcatcctgggggtggagatggaggccgccggcatctacggggtggccgcggagttcggcgccaaggccctgaccatctgcacggtctccgaccacatccgcacccacgagcagaccaccgccgccgagcggcagacgaccttcaacgacatgatcaagatcgcgctcgagagcgtgctgctgggggacaaggagtga

SEQ ID NO: 6612 - RNA, 777 nt, synthetic construct
  misc_feature 1..777: note = derived and/or modified sequence opt2 fromPurine_Nucleoside_Phosphorylase_deoD__Escherichia_coli_ _EGI42706
  source 1..777: mol_type = other RNA
atggacctcggcggcgccctcaccccccccctcctctgccacaagaaggacaagaccatggccaccccccacatcaacgccgagatgggcgacttcgccgacgtcgtcctcatgcccggcgaccccctccgcgccaagtacatcgccgagaccttcctcgaggacgcccgcgaggtcaacaacgtccgcggcatgctcggcttcaccggcacctacaagggccgcaagatctccgtcatgggccacggcatgggcatcccctcctgctccatctacaccaaggagctcatcaccgacttcggcgtcaagaagatcatccgcgtcggctcctgcggcgccgtcctcccccacgtcaagctccgcgacgtcgtcatcggcatgggcgcctgcaccgactccaaggtcaaccgcatccgcttcaaggaccacgacttcgccgccatcgccgacttcgacatggtccgcaacgccgtcgacgccgccaaggccctcggcgtcgacgcccgcgtcggcaacctcttctccgccgacctcttctactcccccgacggcgagatgttcgacgtcatggagaagtacggcatcctcggcgtcgagatggaggccgccggcatctacggcgtcgccgccgagttcggcgccaaggccctcaccatctgcaccgtctccgaccacatccgcacccacgagcagaccaccgccgccgagcgccagaccaccttcaacgacatgatcaagatcgccctcgagtccgtcctcctcggcgacaaggagtga

SEQ ID NO: 6613 - RNA, 777 nt, synthetic construct
  misc_feature 1..777: note = derived and/or modified sequence opt3 fromPurine_Nucleoside_Phosphorylase_deoD__Escherichia_coli_ _EGI42706
  source 1..777: mol_type = other RNA
atggacctgggcggggccctcacaccccctcttctgtgccacaagaaagataagaccatggctactccacatatcaacgcagagatgggagacttcgccgatgtggtcttgatgccgggtgaccccttaagagcgaaatacattgctgaaacgtttctggaggatgccagggaagttaataacgtgcggggcatgctagggttcaccggaacatataagggccgcaaaataagcgtaatgggtcacgggatgggaatcccttcctgttctatttacactaaggagctcatcaccgactttggcgtgaagaaaattatccgagtcggctcatgcggggcagtgctgccacatgttaaacttcgtgatgtggtcataggaatgggtgcctgtacagacagtaaggtgaatagaatcaggttcaaggatcacgactttgctgcaattgccgatttcgacatggtacggaacgctgttgatgccgcgaaagcactgggcgtggacgcccgcgtcgggaatttgtttagcgctgacctcttctattcccccgatggagaaatgtttgacgtgatggagaagtacggcatcctgggtgtggagatggaagccgcagggatttatggagtcgctgccgagttcggcgcgaaggccctgaccatctgcactgtttctgatcatataagaacacacgaacagaccacggcagctgagaggcaaactacctttaacgacatgattaaaatcgccctcgagtcggtgttactgggcgataaggaatga

SEQ ID NO: 6614 - RNA, 777 nt, synthetic construct
  misc_feature 1..777: note = derived and/or modified sequence opt4 fromPurine_Nucleoside_Phosphorylase_deoD__Escherichia_coli_ _EGI42706
  source 1..777: mol_type = other RNA
atggacctgggcggcgccctgaccccccccctgctgtgccacaagaaggacaagaccatggccaccccccacatcaacgccgagatgggcgacttcgccgacgtggtgctgatgcccggcgaccccctgagagccaagtacatcgccgagaccttcctggaggacgccagagaggtgaacaacgtgagaggcatgctgggcttcaccggcacctacaagggcagaaagatcagcgtgatgggccacggcatgggcatccccagctgcagcatctacaccaaggagctgatcaccgacttcggcgtgaagaagatcatcagagtgggcagctgcggcgccgtgctgccccacgtgaagctgagagacgtggtgatcggcatgggcgcctgcaccgacagcaaggtgaacagaatcagattcaaggaccacgacttcgccgccatcgccgacttcgacatggtgagaaacgccgtggacgccgccaaggccctgggcgtggacgccagagtgggcaacctgttcagcgccgacctgttctacagccccgacggcgagatgttcgacgtgatggagaagtacggcatcctgggcgtggagatggaggccgccggcatctacggcgtggccgccgagttcggcgccaaggccctgaccatctgcaccgtgagcgaccacatcagaacccacgagcagaccaccgccgccgagagacagaccaccttcaacgacatgatcaagatcgccctggagagcgtgctgctgggcgacaaggagtga

SEQ ID NO: 6615 - RNA, 777 nt, synthetic construct
  misc_feature 1..777: note = derived and/or modified sequence opt5 fromPurine_Nucleoside_Phosphorylase_deoD__Escherichia_coli_ _EGI42706
  source 1..777: mol_type = other RNA
atggacctgggcggggccctcacaccccctctgctttgccacaagaaagataagaccatggctacgccgcatatcaacgccgagatgggagacttcgcggatgtggtcctgatgcccggcgaccctctcagagctaaatacattgccgaaacctttctggaggatgcccgggaagttaataacgtgcgcgggatgcttggattcacaggcacctataaggggagaaaaatcagcgtgatgggacacggcatgggcattccctcctgttctatctacacaaaggagctgattaccgactttggggtcaagaaaatcatccgggtgggaagctgcggcgctgttctccctcatgtgaagctgcgcgatgtcgtgattgggatgggagcctgtacagactccaaagttaatagaatccggttcaaggatcacgactttgctgccattgcggatttcgacatggtgcgcaacgccgtcgatgctgccaaagctctgggcgtggacgccagagtggggaatctcttttctgcggacctgttctatagccccgatggagaaatgtttgacgtcatggagaagtacggcatccttggcgttgagatggaagccgctgggatttatggagtggccgctgagttcggcgccaaggccctgaccatctgcacggtgtccgatcatattcggacccacgaacagacaaccgctgcggagcgccaaacaacctttaacgacatgatcaaaatcgccctcgagtctgtcctgcttggggataaggaatga

SEQ ID NO: 6616 - RNA, 777 nt, synthetic construct
  misc_feature 1..777: note = derived and/or modified sequence opt6 fromPurine_Nucleoside_Phosphorylase_deoD__Escherichia_coli_ _EGI42706
  source 1..777: mol_type = other RNA
atggacctaggaggagcactaacaccaccactattatgccataaaaaagacaaaacaatggcaacaccacatataaatgcagaaatgggagactttgcagatgtagtactaatgccaggagacccactaagagcaaaatacatagccgaaacatttctagaagacgcaagagaagtaaataacgtaagaggaatgttaggatttacagggacatataaaggaagaaaaataagtgtaatgggacatggaatgggaataccatcatgcagtatatatacaaaagaattaataacggactttggagtaaaaaagatcataagagtaggctcatgcggagcagtactaccacatgtaaaattaagagatgtagtaataggaatgggagcatgtaccgattcaaaagtcaatagaataagatttaaagatcacgatttcgcggcaatagcagactttgatatggtaagaaatgcagtagacgcagcaaaagcattaggagtagacgcaagagtaggaaatctatttagcgcagacttattctatagcccagacggagaaatgttcgatgtaatggaaaaatacggaatattaggagtagaaatggaagcggcaggaatatatggagtagcagcagaatttggagcaaaagcattaacaatatgtacagtaagcgatcacataagaacacacgaacaaacaacagctgcagaaagacaaacaacattcaatgacatgataaaaatagcactagaaagcgtactactaggagataaagaataa

SEQ ID NO: 6617 - protein, 239 aa, synthetic construct; identical to SEQ ID NO: 6193
  REGION 1..239: note Purine_Nucleoside_Phosphorylase_deoD__Escherichia_coli__F4V N60

SEQ ID NO: 6618 - RNA, 720 nt, synthetic construct; identical to SEQ ID NO: 6234
  misc_feature 1..720: note Purine_Nucleoside_Phosphorylase_deoD__Escherichia_coli__EGI 43348
  source 1..720: mol_type = other RNA

SEQ ID NO: 6619 - RNA, 720 nt, synthetic construct; identical to SEQ ID NO: 6195
  misc_feature 1..720: note = derived and/or modified sequence opt1 fromPurine_Nucleoside_Phosphorylase_deoD__Escherichia_coli_ _EGI43348
  source 1..720: mol_type = other RNA

SEQ ID NO: 6620 - RNA, 720 nt, synthetic construct; identical to SEQ ID NO: 6196
  misc_feature 1..720: note = derived and/or modified sequence opt2 fromPurine_Nucleoside_Phosphorylase_deoD__Escherichia_coli_ _EGI43348
  source 1..720: mol_type = other RNA

SEQ ID NO: 6621 - RNA, 720 nt, synthetic construct; identical to SEQ ID NO: 6197
  misc_feature 1..720: note = derived and/or modified sequence opt3 fromPurine_Nucleoside_Phosphorylase_deoD__Escherichia_coli_ _EGI43348
  source 1..720: mol_type = other RNA

SEQ ID NO: 6622 - RNA, 720 nt, synthetic construct; identical to SEQ ID NO: 6198
  misc_feature 1..720: note = derived and/or modified sequence opt4 fromPurine_Nucleoside_Phosphorylase_deoD__Escherichia_coli_ _EGI43348
  source 1..720: mol_type = other RNA

SEQ ID NO: 6623 - RNA, 720 nt, synthetic construct; identical to SEQ ID NO: 6199
  misc_feature 1..720: note = derived and/or modified sequence opt5 fromPurine_Nucleoside_Phosphorylase_deoD__Escherichia_coli_ _EGI43348
  source 1..720: mol_type = other RNA

SEQ ID NO: 6624 - RNA, 720 nt, synthetic construct
  misc_feature 1..720: note = derived and/or modified sequence opt6 fromPurine_Nucleoside_Phosphorylase_deoD__Escherichia_coli_ _EGI43348
  source 1..720: mol_type = other RNA
atggcaacaccacatattaatgcagaaatgggagactttgcagatgtagtactaatgccaggagacccattaagagcaaaatatatagcagaaacatttttagaagacgcaagagaagtaaataacgtaagagggatgttaggatttacaggaacatataaaggaagaaaaatatcagtaatgggacatggaatgggaataccaagttgctcaatatatacaaaagaattaataacagactttggagtaaaaaagataataagagtaggatcatgcggagcagtattaccacacgtaaaattaagagatgtagtgataggaatgggagcatgtacagatagtaaagtcaatcgaataagattcaaagatcacgatttcgcagcaatagcagatttcgatatggtaagaaatgcagtagacgcagcaaaagcattaggaatagatgcaagagtaggaaatctattttcagcagacttattctatagcccagacggagaaatgttcgatgtaatggaaaaatacggaatactaggagtagaaatggaagcagcaggaatatatggagtagcagcagaatttggagcaaaagcactcacaatatgtacagtaagcgatcacataagaacgcacgaacaaacaacagcagcagaaagacaaacaacattcaacgacatgataaaaatagcattagaaagcgtactactaggagacaaagaataa

SEQ ID NO: 6625 - protein, 239 aa, synthetic construct; identical to SEQ ID NO: 6201
  REGION 1..239: note Purine_Nucleoside_Phosphorylase_deoD__Escherichia_coli__F4V QF8

SEQ ID NO: 6626 - RNA, 720 nt, synthetic construct; identical to SEQ ID NO: 6290
  misc_feature 1..720: note Purine_Nucleoside_Phosphorylase_deoD__Escherichia_coli__EGI 52751
  source 1..720: mol_type = other RNA

SEQ ID NO: 6627 - RNA, 720 nt, synthetic construct; identical to SEQ ID NO: 6203
  misc_feature 1..720: note = derived and/or modified sequence opt1 fromPurine_Nucleoside_Phosphorylase_deoD__Escherichia_coli_ _EGI52751
  source 1..720: mol_type = other RNA

SEQ ID NO: 6628 - RNA, 720 nt, synthetic construct; identical to SEQ ID NO: 6204
  misc_feature 1..720: note = derived and/or modified sequence opt2 fromPurine_Nucleoside_Phosphorylase_deoD__Escherichia_coli_ _EGI52751
  source 1..720: mol_type = other RNA

SEQ ID NO: 6629 - RNA, 720 nt, synthetic construct; identical to SEQ ID NO: 6205
  misc_feature 1..720: note = derived and/or modified sequence opt3 fromPurine_Nucleoside_Phosphorylase_deoD__Escherichia_coli_ _EGI52751
  source 1..720: mol_type = other RNA

SEQ ID NO: 6630 - RNA, 720 nt, synthetic construct; identical to SEQ ID NO: 6206
  misc_feature 1..720: note = derived and/or modified sequence opt4 fromPurine_Nucleoside_Phosphorylase_deoD__Escherichia_coli_ _EGI52751
  source 1..720: mol_type = other RNA

SEQ ID NO: 6631 - RNA, 720 nt, synthetic construct; identical to SEQ ID NO: 6207
  misc_feature 1..720: note = derived and/or modified sequence opt5 fromPurine_Nucleoside_Phosphorylase_deoD__Escherichia_coli_ _EGI52751
  source 1..720: mol_type = other RNA

SEQ ID NO: 6632 - RNA, 720 nt, synthetic construct
  misc_feature 1..720: note = derived and/or modified sequence opt6 fromPurine_Nucleoside_Phosphorylase_deoD__Escherichia_coli_ _EGI52751
  source 1..720: mol_type = other RNA
atggcaacaccacatataaatgcagaaatgggagactttgccgatgtagtgctaatgccaggagacccactaagagcaaaatacatagcagaaacatttctagaagacgcaagagaagtaaataacgtaagaggaatgttaggatttacaggaacctataaaggaagaaaaatatcagtaatgggacatggaatgggaataccatcatgttcaatatatacaaaagaattgataacagactttggagtaaaaaaaataataagagtaggatcatgcggagcagtattaccacacgtaaaattaagagatgtagtaataggaatgggagcatgtaccgacagcaaagtaaatagaataagatttaaagatcatgatttcgcagcaatagcagatttcgatatggtaagaaatgcagtagacgcggcaaaagcattaggagtagacgcaagagtaggaaacctatttagcgcagacttgttttatagcccagacggagaaatgtttgatgtaatggaaaaatacggaatattaggagtagaaatggaagcagcaggaatatatggagtagcagcagaatttggagcaaaagcgttaacaatatgtacagtaagtgatcacataagaacacacgaacaaacaacagcagcagaaagacaaacaacattcaatgacatgataaagatagcactagaaagcgtactattgggagataaagaataa

SEQ ID NO: 6633 - protein, 239 aa, synthetic construct; identical to SEQ ID NO: 6201
  REGION 1..239: note Purine_Nucleoside_Phosphorylase_deoD__Escherichia_coli__H9V 0H4

SEQ ID NO: 6634 - RNA, 720 nt, synthetic construct
  misc_feature 1..720: note Purine_Nucleoside_Phosphorylase_deoD__Escherichia_coli__AFG 43267
  source 1..720: mol_type = other RNA
atggctaccccacacattaatgcagaaatgggcgatttcgctgacgtagttttgatgccaggcgacccgctgcgtgcgaagtatattgctgaaactttccttgaagatgcccgtgaagtgaacaacgttcgcggtatgctgggcttcaccggtacttacaaaggccgcaaaatttccgtaatgggtcacggtatgggtatcccgtcctgctccatctacaccaaagaactgatcaccgatttcggcgtgaagaaaattatccgcgtaggctcctgtggcgctgttctgccacacgtaaaactgcgcgacgtcgttatcggtatgggtgcctgcaccgattccaaagttaaccgtatccgttttaaagaccatgactttgccgctatcgctgactttgacatggtgcgtaacgcggtagacgcggctaaagcactgggcgttgatgctcgcgttggtaacctgttctccgctgacctgttctactctccggacggcgaaatgttcgacgtgatggaaaaatacggcatcctcggcgtggaaatggaagcagctggtatctacggcgtcgctgcagaatttggcgcgaaagccctgaccatctgcaccgtgtctgaccacatccgcactcacgagcagaccactgccgctgagcgtcagaccaccttcaacgacatgatcaaaatcgcactggaatccgttctgttgggcgataaagagtaa

SEQ ID NO: 6635 - RNA, 720 nt, synthetic construct; identical to SEQ ID NO: 6203
  misc_feature 1..720: note = derived and/or modified sequence opt1 fromPurine_Nucleoside_Phosphorylase_deoD__Escherichia_coli_ _AFG43267
  source 1..720: mol_type = other RNA

SEQ ID NO: 6636 - RNA, 720 nt, synthetic construct; identical to SEQ ID NO: 6204
  misc_feature 1..720: note = derived and/or modified sequence opt2 fromPurine_Nucleoside_Phosphorylase_deoD__Escherichia_coli_ _AFG43267
  source 1..720: mol_type = other RNA

SEQ ID NO: 6637 - RNA, 720 nt, synthetic construct; identical to SEQ ID NO: 6205
  misc_feature 1..720: note = derived and/or modified sequence opt3 fromPurine_Nucleoside_Phosphorylase_deoD__Escherichia_coli_ _AFG43267
  source 1..720: mol_type = other RNA

SEQ ID NO: 6638 - RNA, 720 nt, synthetic construct; identical to SEQ ID NO: 6206
  misc_feature 1..720: note = derived and/or modified sequence opt4 fromPurine_Nucleoside_Phosphorylase_deoD__Escherichia_coli_ _AFG43267
  source 1..720: mol_type = other RNA

SEQ ID NO: 6639 - RNA, 720 nt, synthetic construct; identical to SEQ ID NO: 6207
  misc_feature 1..720: note = derived and/or modified sequence opt5 fromPurine_Nucleoside_Phosphorylase_deoD__Escherichia_coli_ _AFG43267
  source 1..720: mol_type = other RNA

SEQ ID NO: 6640 - RNA, 720 nt, synthetic construct
  misc_feature 1..720: note = derived and/or modified sequence opt6 fromPurine_Nucleoside_Phosphorylase_deoD__Escherichia_coli_ _AFG43267
  source 1..720: mol_type = other RNA
atggcaacaccacatattaatgcagaaatgggagactttgcagatgtagtattaatgccaggggacccattaagagcaaaatacatagcagaaacatttctagaagacgcaagagaagtaaacaatgtaagaggaatgttaggatttacaggaacatataaaggaagaaaaatatcagtaatgggacatggaatgggaataccatcatgctcaatatatacaaaagaattaataacagactttggagtaaaaaaaataataagagttggatcatgcggagcagtactaccacacgtaaaattaagagatgtagtaataggaatgggggcatgtacagatagcaaagtaaatagaataagatttaaagatcacgattttgcagcaatagcagatttcgatatggtacgaaatgccgtggacgcagcaaaagcattaggagtagacgcaagagtaggaaatctatttagcgcagacttattctatagtccagacggagaaatgttcgatgtaatggaaaaatacggaatattaggagtagaaatggaagcagcaggaatatacggagtagcagcagaatttggagcaaaagcgctaacaatatgcacagtaagtgatcacataagaacgcacgaacaaacaacagcagcagaaagacaaacaacattcaatgacatgataaaaatagcactagaaagcgtattattaggcgataaagaataa

SEQ ID NO: 6641 - protein, 239 aa, synthetic construct; identical to SEQ ID NO: 6193
  REGION 1..239: note Purine_Nucleoside_Phosphorylase_deoD__Escherichia_coli__J7Q V83

SEQ ID NO: 6642 - RNA, 720 nt, synthetic construct; identical to SEQ ID NO: 6330
  misc_feature 1..720: note Purine_Nucleoside_Phosphorylase_deoD__Escherichia_coli__CCK 49767
  source 1..720: mol_type = other RNA

SEQ ID NO: 6643 - RNA, 720 nt, synthetic construct; identical to SEQ ID NO: 6195
  misc_feature 1..720: note = derived and/or modified sequence opt1 fromPurine_Nucleoside_Phosphorylase_deoD__Escherichia_coli_ _CCK49767
  source 1..720: mol_type = other RNA

SEQ ID NO: 6644 - RNA, 720 nt, synthetic construct; identical to SEQ ID NO: 6196
  misc_feature 1..720: note = derived and/or modified sequence opt2 fromPurine_Nucleoside_Phosphorylase_deoD__Escherichia_coli_ _CCK49767
  source 1..720: mol_type = other RNA

SEQ ID NO: 6645 - RNA, 720 nt, synthetic construct; identical to SEQ ID NO: 6197
  misc_feature 1..720: note = derived and/or modified sequence opt3 fromPurine_Nucleoside_Phosphorylase_deoD__Escherichia_coli_ _CCK49767
  source 1..720: mol_type = other RNA

SEQ ID NO: 6646 - RNA, 720 nt, synthetic construct; identical to SEQ ID NO: 6198
  misc_feature 1..720: note = derived and/or modified sequence opt4 fromPurine_Nucleoside_Phosphorylase_deoD__Escherichia_coli_ _CCK49767
  source 1..720: mol_type = other RNA

SEQ ID NO: 6647 - RNA, 720 nt, synthetic construct; identical to SEQ ID NO: 6199
  misc_feature 1..720: note = derived and/or modified sequence opt5 fromPurine_Nucleoside_Phosphorylase_deoD__Escherichia_coli_ _CCK49767
  source 1..720: mol_type = other RNA

SEQ ID NO: 6648 - RNA, 720 nt, synthetic construct
  misc_feature 1..720: note = derived and/or modified sequence opt6 fromPurine_Nucleoside_Phosphorylase_deoD__Escherichia_coli_ _CCK49767
  source 1..720: mol_type = other RNA
atggcaacaccacatataaatgctgaaatgggagattttgcagatgtagtactgatgccaggtgatccactaagagcaaaatacatagcagaaacatttttagaagacgcaagagaagtgaataacgtaagaggaatgttgggatttacagggacatataaaggaagaaaaatatcagtaatgggacatggaatgggaataccatcatgtagtatatatacaaaagaattaataacagactttggagtaaaaaaaataataagagtaggaagttgcggagcagtattaccacacgtaaaattaagagatgtcgtaataggaatgggagcatgtacagatagtaaagtaaatagaataagatttaaagatcacgattttgcagccatagcagattttgatatggtaagaaatgcagtagacgcagcaaaagcattaggaatagacgcaagagtaggaaatttatttagtgcagacttattctatagtccagacggagaaatgttcgatgtaatggaaaaatacggaatactaggagtagaaatggaagcagcaggaatatatggagtagcagcagaatttggagcaaaagcactaacaatatgtacagtaagcgatcacataagaacacacgaacaaacaacagcagcagaaagacaaacaacattcaatgacatgataaaaatagcattagaaagcgtactattaggagataaagaataa

SEQ ID NO: 6649 - protein, 239 aa, synthetic construct; identical to SEQ ID NO: 6193
  REGION 1..239: note Purine_Nucleoside_Phosphorylase_deoD__Escherichia_coli__P0A BP8

SEQ ID NO: 6650 - RNA, 720 nt, synthetic construct; identical to SEQ ID NO: 6338
  misc_feature 1..720: note Purine_Nucleoside_Phosphorylase_deoD__Escherichia_coli__AAA 24401
  source 1..720: mol_type = other RNA

SEQ ID NO: 6651 - RNA, 720 nt, synthetic construct; identical to SEQ ID NO: 6195
  misc_feature 1..720: note = derived and/or modified sequence opt1 fromPurine_Nucleoside_Phosphorylase_deoD__Escherichia_coli_ _AAA24401
  source 1..720: mol_type = other RNA

SEQ ID NO: 6652 - RNA, 720 nt, synthetic construct; identical to SEQ ID NO: 6196
  misc_feature 1..720: note = derived and/or modified sequence opt2 fromPurine_Nucleoside_Phosphorylase_deoD__Escherichia_coli_ _AAA24401
  source 1..720: mol_type = other RNA

SEQ ID NO: 6653 - RNA, 720 nt, synthetic construct; identical to SEQ ID NO: 6197
  misc_feature 1..720: note = derived and/or modified sequence opt3 fromPurine_Nucleoside_Phosphorylase_deoD__Escherichia_coli_ _AAA24401
  source 1..720: mol_type = other RNA

SEQ ID NO: 6654 - RNA, 720 nt, synthetic construct; identical to SEQ ID NO: 6198
  misc_feature 1..720: note = derived and/or modified sequence opt4 fromPurine_Nucleoside_Phosphorylase_deoD__Escherichia_coli_ _AAA24401
  source 1..720: mol_type = other RNA

SEQ ID NO: 6655 - RNA, 720 nt, synthetic construct; identical to SEQ ID NO: 6199
  misc_feature 1..720: note = derived and/or modified sequence opt5 fromPurine_Nucleoside_Phosphorylase_deoD__Escherichia_coli_ _AAA24401
  source 1..720: mol_type = other RNA

SEQ ID NO: 6656 - RNA, 720 nt, synthetic construct
  misc_feature 1..720: note = derived and/or modified sequence opt6 fromPurine_Nucleoside_Phosphorylase_deoD__Escherichia_coli_ _AAA24401
  source 1..720: mol_type = other RNA
atggcaacaccacatataaatgcagaaatgggggactttgcagatgtagtattaatgcctggggacccactaagagcaaaatacatagcagaaacatttctagaagacgcaagagaagtaaataatgtaagaggaatgttaggatttacaggaacatataaaggacgaaaaatatcagtaatgggccatggaatgggaataccctcatgcagtatatatacaaaagaattaataacagactttggagtaaaaaaaatcataagagtaggaagctgcggagcagtactaccgcacgtaaaactacgagatgtagtaataggaatgggggcatgtacagatagtaaagtaaatagaataagatttaaagatcacgatttcgcagcaatagcagatttcgatatggtaagaaatgcagtagacgcagcaaaagcattaggaatagacgcaagggtaggaaatttatttagcgcagacttattctatagcccagacggagaaatgttcgatgtaatggaaaaatatggaatactaggagtagaaatggaagcagcaggaatatatggagtagcagcagaatttggtgcaaaagcactaacaatatgtacagtaagcgatcacataagaacacacgaacaaacaacagcagcagaaagacaaacaacattcaatgacatgataaaaatagcactagaaagcgtattattaggagataaagaataa

SEQ ID NO: 6657 - protein, 239 aa, synthetic construct; identical to SEQ ID NO: 6201
  REGION 1..239: note Purine_Nucleoside_Phosphorylase_deoD__Escherichia_coli__Q0T 8S9

SEQ ID NO: 6658 - RNA, 720 nt, synthetic construct
  misc_feature 1..720: note Purine_Nucleoside_Phosphorylase_deoD__Escherichia_coli__ABG 72650
  source 1..720: mol_type = other RNA
atggctactccacacattaatgcagaaatgggcgattttgctgacgtagttttgatgccaggcgacccgctgcgtgcgaagtatattgctgaaactttccttgaagatgcccgtgaagtgaacaacgttcgcggtatgctgggcttcactggtacttacaaaggccgcaaaatttccgtaatgggccacggtatgggtatcccgtcctgctccatctacaccaaagaactgatcactgatttcggcgtgaagaaaattatccgcgttggttcctgtggcgctgttctgccgcacgtaaaactgcgcgacgtcgttatcggtatgggtgcctgcaccgattccaaagttaaccgcatccgttttaaagaccatgactttgccgctatcgctgacttcgacatggtgcgtaacgcggtagacgcggcaaaagcactgggcgttgatgctcgcgttggtaacctgttctccgctgacctgttctactctccggacggcgaaatgttcgacgtgatggaaaaatacggcatcctcggcgtggaaatggaagcggctggtatctacggcgtcgctgcagaatttggcgcgaaagccctgaccatctgcaccgtgtctgaccacatccgcactcacgagcagaccactgccgctgagcgtcagaccaccttcaacgacatgatcaaaatcgcgctggaatccgttctgctgggcgataaagagtaa

SEQ ID NO: 6659 - RNA, 720 nt, synthetic construct; identical to SEQ ID NO: 6203
  misc_feature 1..720: note = derived and/or modified sequence opt1 fromPurine_Nucleoside_Phosphorylase_deoD__Escherichia_coli_ _ABG72650
  source 1..720: mol_type = other RNA

SEQ ID NO: 6660 - RNA, 720 nt, synthetic construct; identical to SEQ ID NO: 6204
  misc_feature 1..720: note = derived and/or modified sequence opt2 fromPurine_Nucleoside_Phosphorylase_deoD__Escherichia_coli_ _ABG72650
  source 1..720: mol_type = other RNA

SEQ ID NO: 6661 - RNA, 720 nt, synthetic construct; identical to SEQ ID NO: 6205
  misc_feature 1..720: note = derived and/or modified sequence opt3 fromPurine_Nucleoside_Phosphorylase_deoD__Escherichia_coli_ _ABG72650
  source 1..720: mol_type = other RNA

SEQ ID NO: 6662 - RNA, 720 nt, synthetic construct; identical to SEQ ID NO: 6206
  misc_feature 1..720: note = derived and/or modified sequence opt4 fromPurine_Nucleoside_Phosphorylase_deoD__Escherichia_coli_ _ABG72650
  source 1..720: mol_type = other RNA

SEQ ID NO: 6663 - RNA, 720 nt, synthetic construct; identical to SEQ ID NO: 6207
  misc_feature 1..720: note = derived and/or modified sequence opt5 fromPurine_Nucleoside_Phosphorylase_deoD__Escherichia_coli_ _ABG72650
  source 1..720: mol_type = other RNA

SEQ ID NO: 6664 - RNA, 720 nt, synthetic construct
  misc_feature 1..720: note = derived and/or modified sequence opt6 fromPurine_Nucleoside_Phosphorylase_deoD__Escherichia_coli_ _ABG72650
  source 1..720: mol_type = other RNA
atggcaacaccacatataaatgcagaaatgggagactttgcagatgtagtattaatgccaggagacccactaagagcaaaatacatagcagaaacatttctagaagacgcaagagaagtaaataacgtaagaggaatgctaggatttacaggaacatataaaggaagaaaaatatcagtcatgggacatggaatgggaataccatcatgctcaatatacaccaaagaattaataacagactttggagtaaaaaaaataataagagtaggcagttgcggagcagtactaccacacgtaaaattacgagatgtcgtaataggaatgggagcatgtacagattcaaaagtaaatagaataagatttaaagatcacgatttcgcagcaatagcagatttcgatatggtaagaaatgctgtagacgcagcaaaagcattaggagtagacgcaagagtaggaaatctatttagcgcagacttattctatagcccagacggagaaatgttcgatgtaatggaaaaatatggaatattaggagtagaaatggaagcagcaggaatatatggagtagccgcagaatttggagcaaaagcactaacaatatgtacagtaagcgatcacataagaacacacgaacaaacaaccgcagcagaaagacaaacaacattcaatgacatgataaaaatagcactagaaagtgtactattgggagataaagaatga

SEQ ID NO: 6665 - protein, 258 aa, synthetic construct; identical to SEQ ID NO: 6313
  REGION 1..258: note Purine_Nucleoside_Phosphorylase_deoD__Escherichia_coli__Q1R 259

SEQ ID NO: 6666 - RNA, 777 nt, synthetic construct; identical to SEQ ID NO: 6314
  misc_feature 1..777: note Purine_Nucleoside_Phosphorylase_deoD__Escherichia_coli__ABE 10555
  source 1..777: mol_type = other RNA

SEQ ID NO: 6667 - RNA, 777 nt, synthetic construct; identical to SEQ ID NO: 6315
  misc_feature 1..777: note = derived and/or modified sequence opt1 fromPurine_Nucleoside_Phosphorylase_deoD__Escherichia_coli_ _ABE10555
  source 1..777: mol_type = other RNA

SEQ ID NO: 6668 - RNA, 777 nt, synthetic construct; identical to SEQ ID NO: 6316
  misc_feature 1..777: note = derived and/or modified sequence opt2 fromPurine_Nucleoside_Phosphorylase_deoD__Escherichia_coli_ _ABE10555
  source 1..777: mol_type = other RNA

SEQ ID NO: 6669 - RNA, 777 nt, synthetic construct; identical to SEQ ID NO: 6317
  misc_feature 1..777: note = derived and/or modified sequence opt3 fromPurine_Nucleoside_Phosphorylase_deoD__Escherichia_coli_ _ABE10555
  source 1..777: mol_type = other RNA

SEQ ID NO: 6670 - RNA, 777 nt, synthetic construct; identical to SEQ ID NO: 6318
  misc_feature 1..777: note = derived and/or modified sequence opt4 fromPurine_Nucleoside_Phosphorylase_deoD__Escherichia_coli_ _ABE10555
  source 1..777: mol_type = other RNA

SEQ ID NO: 6671 - RNA, 777 nt, synthetic construct; identical to SEQ ID NO: 6319
  misc_feature 1..777: note = derived and/or modified sequence opt5 fromPurine_Nucleoside_Phosphorylase_deoD__Escherichia_coli_ _ABE10555
  source 1..777: mol_type = other RNA

SEQ ID NO: 6672 - RNA, 777 nt, synthetic construct
  misc_feature 1..777: note = derived and/or modified sequence opt6 fromPurine_Nucleoside_Phosphorylase_deoD__Escherichia_coli_ _ABE10555
  source 1..777: mol_type = other RNA
atggatctaggaggagcagtaacaccaccattaatatgccataaaaaagacaaaatgatggctacaccccatataaatgcagaaatgggagacttcgccgatgtagtactaatgccaggagacccactaagagcaaaatacatagcagaaacattcttagaagacgcaagagaagtaaataacgtaagaggaatgctaggatttacaggaacatataaaggaagaaaaatatcagtaatgggacatggaatgggaataccatcatgctcaatatatacaaaagaattgataacagactttggagtaaaaaaaataataagagtaggaagttgcggagcagtgctaccgcacgtaaaattaagagatgtagtaataggaatgggagcatgtacagatagcaaagtaaatagaataagatttaaagatcacgatttcgcagcaatagcagattttgatatggtaagaaatgcagtagacgctgcaaaagcattaggagtagacgcaagagtaggaaatctatttagcgcagacttattctatagtccagacggagaaatgtttgacgtaatggaaaaatacggaatattaggtgtagaaatggaagcagcaggaatatatggtgtagcagcagaatttggagcaaaagcactaacaatatgtacagtaagcgatcacataagaacacacgaacaaacaacagcagcagaaaggcaaacaacatttaatgacatgataaaaatagcattagaaagtgtactattaggagataaagaataa

SEQ ID NO: 6673 - protein, 258 aa, synthetic construct; identical to SEQ ID NO: 6593
  REGION 1..258: note Purine_Nucleoside_Phosphorylase_deoD__Escherichia_coli__W8Z SE4

SEQ ID NO: 6674 - RNA, 777 nt, synthetic construct; identical to SEQ ID NO: 6594
  misc_feature 1..777: note Purine_Nucleoside_Phosphorylase_deoD__Escherichia_coli__CDN 85331
  source 1..777: mol_type = other RNA

SEQ ID NO: 6675 - RNA, 777 nt, synthetic construct; identical to SEQ ID NO: 6595
  misc_feature 1..777: note = derived and/or modified sequence opt1 fromPurine_Nucleoside_Phosphorylase_deoD__Escherichia_coli_ _CDN85331
  source 1..777: mol_type = other RNA

SEQ ID NO: 6676 - RNA, 777 nt, synthetic construct; identical to SEQ ID NO: 6596
  misc_feature 1..777: note = derived and/or modified sequence opt2 fromPurine_Nucleoside_Phosphorylase_deoD__Escherichia_coli_ _CDN85331
  source 1..777: mol_type = other RNA

SEQ ID NO: 6677 - RNA, 777 nt, synthetic construct; identical to SEQ ID NO: 6597
  misc_feature 1..777: note = derived and/or modified sequence opt3 fromPurine_Nucleoside_Phosphorylase_deoD__Escherichia_coli_ _CDN85331
  source 1..777: mol_type = other RNA

SEQ ID NO: 6678 - RNA, 777 nt, synthetic construct; identical to SEQ ID NO: 6598
  misc_feature 1..777: note = derived and/or modified sequence opt4 fromPurine_Nucleoside_Phosphorylase_deoD__Escherichia_coli_ _CDN85331
  source 1..777: mol_type = other RNA

SEQ ID NO: 6679 - RNA, 777 nt, synthetic construct; identical to SEQ ID NO: 6599
  misc_feature 1..777: note = derived and/or modified sequence opt5 fromPurine_Nucleoside_Phosphorylase_deoD__Escherichia_coli_ _CDN85331
  source 1..777: mol_type = other RNA

SEQ ID NO: 6680 - RNA, 777 nt, synthetic construct
  misc_feature 1..777: note = derived and/or modified sequence opt6 fromPurine_Nucleoside_Phosphorylase_deoD__Escherichia_coli_ _CDN85331
  source 1..777: mol_type = other RNA
atggatttaggaggagcagtaacaccaccactaatatgccataaaaaagataaaacaatggcgacaccacatatcaatgcagagatgggtgactttgcagatgtagtactaatgccaggagatccactaagggcaaaatatatagcagaaacatttctagaagacgcaagagaagtaaataatgtaagaggaatgttaggatttacaggaacatataaaggtagaaaaatatcagtaatgggacatggaatgggaataccaagttgcagtatatatacaaaagaattaataacagactttggagtaaaaaaaataataagagtaggaagttgcggagcagtattaccacacgtaaaattaagagatgtagtaataggaatgggggcgtgtacagatagcaaagtcaacagaataagatttaaagatcacgatttcgcagcaatagcagacttcgatatggtaagaaatgcagtagacgcagcaaaagcattaggagtagacgcaagagtaggcaatctatttagcgcagacctattctattcaccagacggagaaatgttcgatgtaatggaaaaatacggaatattaggagtagaaatggaagcagcaggaatatatggagtagcagcagaatttggagcaaaagcactaacaatatgtacagttagcgatcatattagaacacacgaacaaacaacagcagcagaaagacaaacaacattcaatgacatgataaagatagcactagaaagtgtattattaggagataaagaataa

SEQ ID NO: 6681 - protein, 221 aa, synthetic construct
  REGION 1..221: note Purine_Nucleoside_Phosphorylase_deoD__Escherichia_coli__X5F DR9
MKKDMDINIDALLRDTFLTVVELRQGTTVRHGIELYRHCQRQVELVRERLKDAGFSRENVEHITYAQCALLDETVLSRSGMDDGQAIWMKNPLQSHFFNTLQAGELLYERMKQVLQEPAPAQAVLTCFHRVLLLGFRGRYQDPAAPERDQLISTLNGQVAPFGVLPETAVLNVPLSTRQHPLLHSPFFWLVTLALLLAGVWWGLHHWLNVLVDELLPQSLR

SEQ ID NO: 6682 - RNA, 666 nt, synthetic construct
  misc_feature 1..666: note Purine_Nucleoside_Phosphorylase_deoD__Escherichia_coli__AHW 84482
  source 1..666: mol_type = other RNA
atgaaaaaagatatggatatcaatatcgatgcgctgctgcgcgacacgtttctgacggtggtggaactgcgtcagggaaccaccgtgcgtcacggtatcgagctgtatcgccactgtcagcggcaggtggaactggtccgcgaacgtctgaaagatgccggattcagtcgggagaacgtggagcacataacttacgcgcagtgcgccctgctggacgaaacggtgctcagccgtagtggcatggacgacggtcaggccatctggatgaaaaacccactccagtcgcatttcttcaacaccctgcaggccggtgagctgctgtacgagcggatgaagcaggtgctacaggaacccgcccccgcgcaggccgtgctgacctgctttcaccgtgtcctgctgctgggatttcgcgggcgttatcaggatccggcagccccggagcgcgaccagcttatttcgacgctcaacgggcaggtcgcgccatttggtgtgctgccggaaacggcggtactgaacgtgccgttatccacccgtcagcaccctttgctgcattcgccatttttctggctggtaacactggcgctgctactggcgggcgtctggtgggggctacaccactggctgaatgtactggtggatgaactgctgccgcaaagcctgcgttaa

SEQ ID NO: 6683 - RNA, 666 nt, synthetic construct
  misc_feature 1..666: note = derived and/or modified sequence opt1 fromPurine_Nucleoside_Phosphorylase_deoD__Escherichia_coli_ _AHW84482
  source 1..666: mol_type = other RNA
atgaagaaggacatggacatcaacatcgacgccctgctccgcgacaccttcctgaccgtggtcgagctgcggcagggcacgaccgtgcgccacgggatcgagctctaccggcactgccagcgccaggtggagctggtccgggagcgcctgaaggacgccggcttcagccgggagaacgtggagcacatcacctacgcgcagtgcgccctcctggacgagaccgtgctgtcccgcagcgggatggacgacggccaggccatctggatgaagaaccccctccagtcccacttcttcaacacgctgcaggccggggagctgctctacgagcggatgaagcaggtcctgcaggagccggcccccgcgcaggccgtgctgacctgcttccaccgcgtgctcctgctgggcttccggggccgctaccaggaccccgccgcccccgagcgggaccagctcatcagcaccctgaacgggcaggtcgcgccgttcggcgtgctgcccgagaccgccgtgctcaacgtccccctgtccacgcgccagcaccccctgctccacagcccgttcttctggctggtgaccctggccctcctgctggccggggtgtggtggggcctccaccactggctgaacgtcctggtggacgagctcctgccccagtccctgcggtga

SEQ ID NO: 6684 - RNA, 666 nt, synthetic construct
  misc_feature 1..666: note = derived and/or modified sequence opt2 fromPurine_Nucleoside_Phosphorylase_deoD__Escherichia_coli_ _AHW84482
  source 1..666: mol_type = other RNA
atgaagaaggacatggacatcaacatcgacgccctcctccgcgacaccttcctcaccgtcgtcgagctccgccagggcaccaccgtccgccacggcatcgagctctaccgccactgccagcgccaggtcgagctcgtccgcgagcgcctcaaggacgccggcttctcccgcgagaacgtcgagcacatcacctacgcccagtgcgccctcctcgacgagaccgtcctctcccgctccggcatggacgacggccaggccatctggatgaagaaccccctccagtcccacttcttcaacaccctccaggccggcgagctcctctacgagcgcatgaagcaggtcctccaggagcccgcccccgcccaggccgtcctcacctgcttccaccgcgtcctcctcctcggcttccgcggccgctaccaggaccccgccgcccccgagcgcgaccagctcatctccaccctcaacggccaggtcgcccccttcggcgtcctccccgagaccgccgtcctcaacgtccccctctccacccgccagcaccccctcctccactcccccttcttctggctcgtcaccctcgccctcctcctcgccggcgtctggtggggcctccaccactggctcaacgtcctcgtcgacgagctcctcccccagtccctccgctga

SEQ ID NO: 6685 - RNA, 666 nt, synthetic construct
  misc_feature 1..666: note = derived and/or modified sequence opt3 fromPurine_Nucleoside_Phosphorylase_deoD__Escherichia_coli_ _AHW84482
  source 1..666: mol_type = other RNA
atgaagaaggacatggatatcaacattgacgccctgctcagagataccttccttacagtggtcgagctgaggcagggcactacggttcggcacgggatagaattgtaccgccattgccaacgacaggtggagttagtacgtgaaagactgaaggacgctggatttagcagggagaatgtggaacacatcacctatgcacagtgtgccctactcgatgagacagtcctgtcccggtctggtatggacgatggccaggcgatttggatgaaaaacccccttcaatcacatttctttaatactctgcaggctggggagttgctctacgaacgcatgaaacaggtgctgcaggagcctgccccagcacaagccgttctgacctgcttccacagagtgctcttactgggatttaggggccggtatcaggacccggctgcacccgaacgcgatcagcttatcagtacattgaacggtcaggtcgcccctttcggggtgctgccagagaccgctgtactaaatgttcccctcagcactcgacaacatcctctgcttcactccccatttttctggctggtgacattggccctcctgttagcgggagtctggtggggcctgcaccattggctcaacgtgcttgtggacgagctgttgccccagtctctaagatga

SEQ ID NO: 6686 - RNA, 666 nt, synthetic construct
  misc_feature 1..666: note = derived and/or modified sequence opt4 fromPurine_Nucleoside_Phosphorylase_deoD__Escherichia_coli_ _AHW84482
  source 1..666: mol_type = other RNA
atgaagaaggacatggacatcaacatcgacgccctgctgagagacaccttcctgaccgtggtggagctgagacagggcaccaccgtgagacacggcatcgagctgtacagacactgccagagacaggtggagctggtgagagagagactgaaggacgccggcttcagcagagagaacgtggagcacatcacctacgcccagtgcgccctgctggacgagaccgtgctgagcagaagcggcatggacgacggccaggccatctggatgaagaaccccctgcagagccacttcttcaacaccctgcaggccggcgagctgctgtacgagagaatgaagcaggtgctgcaggagcccgcccccgcccaggccgtgctgacctgcttccacagagtgctgctgctgggcttcagaggcagataccaggaccccgccgcccccgagagagaccagctgatcagcaccctgaacggccaggtggcccccttcggcgtgctgcccgagaccgccgtgctgaacgtgcccctgagcaccagacagcaccccctgctgcacagccccttcttctggctggtgaccctggccctgctgctggccggcgtgtggtggggcctgcaccactggctgaacgtgctggtggacgagctgctgccccagagcctgagatga

SEQ ID NO: 6687 - RNA, 666 nt, synthetic construct
  misc_feature 1..666: note = derived and/or modified sequence opt5 fromPurine_Nucleoside_Phosphorylase_deoD__Escherichia_coli_ _AHW84482
  source 1..666: mol_type = other RNA
atgaagaaagacatggatatcaacattgacgccctgctcagagataccttcctgacagtggtcgagcttcggcagggcacgaccgttcgccacgggatcgaactgtacagacattgccaacgccaggtggagctcgtgcgggaaagactgaaggacgctggatttagccgggagaatgtcgaacacattacatatgcccagtgtgcgcttctggatgagaccgtgctctcccgctctggcatggacgatgggcaggctatctggatgaaaaaccccctgcaaagccatttctttaatacactgcaggccggagagctcctgtacgaaagaatgaagcaggttcttcaggagcctgccccggctcaagccgtgctgacctgcttccaccgggtcctcctgcttggctttcgcgggagatatcaggaccccgctgcccctgaacgggatcagctgatttccacactcaacggacaggtggcgcccttcggcgttctgcctgagaccgccgtgctgaatgtccccctctctacgcgccaacatcctctgcttcacagcccgtttttctggctggtgaccctcgctctgcttctggccggcgtgtggtgggggctccaccattggctgaacgtcctggttgacgagctcctgccccagtcccttagatga

SEQ ID NO: 6688 - RNA, 666 nt, synthetic construct
  misc_feature 1..666: note = derived and/or modified sequence opt6 fromPurine_Nucleoside_Phosphorylase_deoD__Escherichia_coli_ _AHW84482
  source 1..666: mol_type = other RNA
atgaaaaaagacatggatataaacatagacgcattactaagagacacattcttaacagtagtagaattaagacaaggaacaacagttagacacggaatagaactatacagacactgccaaagacaagtagaactagtaagagaaagattaaaagacgcaggattcagcagagaaaatgtagaacacataacatacgcacaatgcgcactcctagatgaaacagtcctatctagatcaggaatggacgacggacaagcaatatggatgaaaaacccactacaatcacacttcttcaacacactacaagcaggagaattactatacgaaagaatgaaacaagtactacaagaaccagcaccagcccaagcagtactaacatgctttcacagagtactactactaggctttagaggaagataccaagacccagctgcaccagaaagagatcaactaatttcaacattaaacggacaagtagcaccattcggagtactaccagaaacagcagtcttaaatgtaccactatcaacaagacaacacccactattacactcaccattcttctggttagtaacactagccctactactagcaggagtatggtggggactacaccactggctaaacgtactagtagacgaactactaccacaatcactaagataa

SEQ ID NO: 6689 - protein, 376 aa, synthetic construct
  REGION 1..376: note Thymidine_Kinase_TK__Herpes_Simplex_Virus_1_(HSV-1)__B2CPP5
MASYPCHQHASAFDQAARSRGHNNRRTALRPRRQQKATEVRLEQKMPTLLRVYIDGPHGMGKTTTTQLLVALGSRDDIVYVPEPMTYWRVLGASETIANIYTTQHRLDQGEISAGDAAVVMTSAQITMGMPYAVTDAVLAPHIGGEAGSSHAPPPALTLIFDRHPIAALLCYPAARYRMGSMTPQAVLAFVALIPPTLPGTNIVLGALPEDRHIDRLAKRQRPGERLDLAMLAAIRRVYELLANTVRYLQGGGSWREDWGQLSGTAVPPQGAEPQSNAGPQPHIGDTLFTLFRAPELLAPNGDLYNVFAWALDVLAKRLRPMHVFILDYDQSPAGCRDALLQLTSGMVQTHVTTPGSIPTICDLARTFAREMGEAN

SEQ ID NO: 6690 - RNA, 1131 nt, synthetic construct
  misc_feature 1..1131: note Thymidine_Kinase_TK__Herpes_Simplex_Virus_1_(HSV-1)__ACB592 51
  source 1..1131: mol_type = other RNA
atggcttcgtacccctgccatcaacacgcgtcggcgttcgaccaggctgcgcgttctcgcggccataacaaccgacgtacggcgttgcgccctcgccggcagcaaaaagccacggaagtccgcctggagcagaaaatgcccacgctactgcgggtttatatagacggtccccacgggatggggaaaaccaccaccacgcaactgctggtggccctgggttcgcgcgacgatatcgtctacgtacccgagccgatgacttactggcgggtgctgggggcttccgagacaatcgcgaacatctacaccacacaacaccgcctcgaccagggtgagatatcggccggggacgcggcggtggtaatgacaagcgcccagataacaatgggcatgccttatgccgtgaccgacgccgttctggctcctcatatcgggggggaggctgggagctcacatgccccgcccccggccctcaccctcatcttcgaccgccatcccatcgccgccctcctgtgttacccggccgcgcgataccgtatgggcagcatgaccccccaggccgtgctggcgttcgtggccctcatcccgccgaccttgcccggcacaaacatcgtgttgggggcccttccggaggacagacacatcgaccgcctggccaaacgccagcgccccggcgagcggcttgacctggctatgctggccgcgattcgccgcgtttacgagctgcttgccaatacggtgcggtatctgcagggcggcgggtcgtggcgggaggattggggacagctttcggggacggccgtgccgccccagggtgccgagccccagagcaacgcgggcccacaaccccatatcggggacacgttatttaccctgtttcgggcccccgagttgctggcccccaacggcgacctgtataacgtgtttgcctgggccttggacgtcttggccaaacgcctccgtcccatgcacgtctttatcctggattacgaccaatcgcccgccggctgccgggacgccctgctgcaacttacctccgggatggtccagacccacgtcaccacccccggctccataccgacgatctgcgacctggcgcgcacgtttgcccgggagatgggggaggctaactaa

SEQ ID NO: 6691 - RNA, 1131 nt, synthetic construct
  misc_feature 1..1131: note = derived and/or modified sequence opt1 fromThymidine_Kinase_TK__Herpes_Simplex_Virus_1_(HSV-1)__AC B59251
  source 1..1131: mol_type = other RNA
atggccagctacccctgccaccagcacgcctccgcgttcgaccaggccgcccgcagccggggccacaacaaccgccggaccgccctgcgcccgcggcgccagcagaaggccaccgaggtgcggctcgagcagaagatgcccacgctgctgcgcgtctacatcgacgggccccacggcatggggaagaccaccaccacgcagctcctggtggcgctgggctcccgggacgacatcgtgtacgtccccgagccgatgacctactggcgcgtgctcggggccagcgagaccatcgccaacatctacaccacgcagcaccggctggaccagggcgagatctccgccggcgacgcggccgtggtcatgaccagcgcccagatcaccatggggatgccctacgccgtgaccgacgccgtgctggcgccccacatcggcggggaggccggctccagccacgcgcccccgcccgccctcacgctgatcttcgaccgccaccccatcgccgccctgctctgctaccccgccgcccggtaccgcatggggtccatgaccccgcaggccgtcctggccttcgtggcgctgatcccgcccaccctccccggcaccaacatcgtgctgggcgccctgcccgaggaccggcacatcgaccgcctcgccaagcggcagcgccccggggagcggctggacctggccatgctcgccgcgatccgccgggtctacgagctgctggccaacacggtgcgctacctccagggcgggggcagctggcgcgaggactggggccagctgtccgggaccgccgtgccgccccagggcgccgagccccagagcaacgcggggccccagccccacatcggcgacaccctgttcaccctcttccgggcccccgagctgctggccccgaacggggacctctacaacgtcttcgcctgggccctggacgtgctggcgaagcgcctccggcccatgcacgtgttcatcctggactacgaccagtcccccgccggctgccgcgacgccctgctccagctgacgagcggcatggtccagacccacgtgaccacccccgggtccatcccgacgatctgcgacctggcccggaccttcgcccgcgagatgggcgaggcgaactga

SEQ ID NO: 6692 - RNA, 1131 nt, synthetic construct
  misc_feature 1..1131: note = derived and/or modified sequence opt2 fromThymidine_Kinase_TK__Herpes_Simplex_Virus_1_(HSV-1)__AC B59251
  source 1..1131: mol_type = other RNA
atggcctcctacccctgccaccagcacgcctccgccttcgaccaggccgcccgctcccgcggccacaacaaccgccgcaccgccctccgcccccgccgccagcagaaggccaccgaggtccgcctcgagcagaagatgcccaccctcctccgcgtctacatcgacggcccccacggcatgggcaagaccaccaccacccagctcctcgtcgccctcggctcccgcgacgacatcgtctacgtccccgagcccatgacctactggcgcgtcctcggcgcctccgagaccatcgccaacatctacaccacccagcaccgcctcgaccagggcgagatctccgccggcgacgccgccgtcgtcatgacctccgcccagatcaccatgggcatgccctacgccgtcaccgacgccgtcctcgccccccacatcggcggcgaggccggctcctcccacgcccccccccccgccctcaccctcatcttcgaccgccaccccatcgccgccctcctctgctaccccgccgcccgctaccgcatgggctccatgaccccccaggccgtcctcgccttcgtcgccctcatcccccccaccctccccggcaccaacatcgtcctcggcgccctccccgaggaccgccacatcgaccgcctcgccaagcgccagcgccccggcgagcgcctcgacctcgccatgctcgccgccatccgccgcgtctacgagctcctcgccaacaccgtccgctacctccagggcggcggctcctggcgcgaggactggggccagctctccggcaccgccgtccccccccagggcgccgagccccagtccaacgccggcccccagccccacatcggcgacaccctcttcaccctcttccgcgcccccgagctcctcgcccccaacggcgacctctacaacgtcttcgcctgggccctcgacgtcctcgccaagcgcctccgccccatgcacgtcttcatcctcgactacgaccagtcccccgccggctgccgcgacgccctcctccagctcacctccggcatggtccagacccacgtcaccacccccggctccatccccaccatctgcgacctcgcccgcaccttcgcccgcgagatgggcgaggccaactga

SEQ ID NO: 6693 - RNA, 1131 nt, synthetic construct
  misc_feature 1..1131: note = derived and/or modified sequence opt3 fromThymidine_Kinase_TK__Herpes_Simplex_Virus_1_(HSV-1)__AC B59251
  source 1..1131: mol_type = other RNA
atggccagctacccctgccaccagcatgcttccgcattcgaccaagccgcgagatctaggggccacaacaatcggcgcaccgctctgcgacctcgtagacagcagaaggccacagaggtgaggctcgaacagaaaatgccaactcttctgcgggtctatatcgatgggccgcatggaatgggtaagacgaccacaactcaattgttagttgcactgggctcacgcgacgatattgtgtacgtacccgagcctatgacctattggagagtgctaggggccagtgaaacaatagctaacatctacaccactcagcacaggctcgaccagggagagattagcgcaggcgatgccgctgtcgtgatgacatccgcccagatcaccatgggtatgccatatgcggttacggacgcagtgctggctccccatattgggggagaagccgggtcttcgcacgcccctccacccgcacttactctgatctttgatcggcaccctatagctgccttgctctgttacccagcggcccgctatcgaatgggctcaatgaccccgcaagcagtcctggctttcgtggccctgattccccctacactcccaggcactaatatcgtattaggagctctgcccgaggacagacatatcgataggcttgccaaacggcagcgtcctggtgagcgcttggacctggcaatgctagccgctattagaagggtttacgaactcctggcgaacaccgtgcggtaccttcagggcgggggaagctggcgagaggattggggccagctgagtggtacagcagtcccaccccaaggggccgaaccgcagtccaatgctggacctcagccccacatcggcgacaccttgtttactctcttccgcgccccagagctgttagcacctaacggcgatctgtataatgtgtttgcctgggctctcgacgtgcttgccaagagactgaggcccatgcatgtcttcatattggactacgatcaatctccagcagggtgccgggacgcgctactgcagctcacgagcggaatggttcagacacacgtgaccactcccggttccattcctacaatctgtgatctggctcgcacctttgccagagagatgggcgaagcaaactga

SEQ ID NO: 6694 - RNA, 1131 nt, synthetic construct
  misc_feature 1..1131: note = derived and/or modified sequence opt4 fromThymidine_Kinase_TK__Herpes_Simplex_Virus_1_(HSV-1)__AC B59251
  source 1..1131: mol_type = other RNA
atggccagctacccctgccaccagcacgccagcgccttcgaccaggccgccagaagcagaggccacaacaacagaagaaccgccctgagacccagaagacagcagaaggccaccgaggtgagactggagcagaagatgcccaccctgctgagagtgtacatcgacggcccccacggcatgggcaagaccaccaccacccagctgctggtggccctgggcagcagagacgacatcgtgtacgtgcccgagcccatgacctactggagagtgctgggcgccagcgagaccatcgccaacatctacaccacccagcacagactggaccagggcgagatcagcgccggcgacgccgccgtggtgatgaccagcgcccagatcaccatgggcatgccctacgccgtgaccgacgccgtgctggccccccacatcggcggcgaggccggcagcagccacgcccccccccccgccctgaccctgatcttcgacagacaccccatcgccgccctgctgtgctaccccgccgccagatacagaatgggcagcatgaccccccaggccgtgctggccttcgtggccctgatcccccccaccctgcccggcaccaacatcgtgctgggcgccctgcccgaggacagacacatcgacagactggccaagagacagagacccggcgagagactggacctggccatgctggccgccatcagaagagtgtacgagctgctggccaacaccgtgagatacctgcagggcggcggcagctggagagaggactggggccagctgagcggcaccgccgtgcccccccagggcgccgagccccagagcaacgccggcccccagccccacatcggcgacaccctgttcaccctgttcagagcccccgagctgctggcccccaacggcgacctgtacaacgtgttcgcctgggccctggacgtgctggccaagagactgagacccatgcacgtgttcatcctggactacgaccagagccccgccggctgcagagacgccctgctgcagctgaccagcggcatggtgcagacccacgtgaccacccccggcagcatccccaccatctgcgacctggccagaaccttcgccagagagatgggcgaggccaactga

SEQ ID NO: 6695 - RNA, 1131 nt, synthetic construct
  misc_feature 1..1131: note = derived and/or modified sequence opt5 fromThymidine_Kinase_TK__Herpes_Simplex_Virus_1_(HSV-1)__AC B59251
  source 1..1131: mol_type = other RNA
atggccagctacccctgccaccagcatgcttccgccttcgaccaagcggctagatctcggggccacaacaatcgcagaaccgccctgcggcctcgcagacagcagaaggccacagaggtgcggctcgaacagaaaatgccgacgctgcttcgcgtctatatcgatgggccccatggaatgggcaagaccacaaccacacaactgctcgttgctctggggagcagagacgatattgtgtacgtgcctgagcccatgacctattggcgggtccttggagcctccgaaacaatcgctaacatttacaccacgcagcaccgcctggaccagggcgagatctctgccggggatgcggccgtggttatgaccagcgctcagattacaatgggaatgccttatgccgtgaccgacgctgtcctcgctccccatatcggcggcgaagcggggtcctctcacgcccctccgcccgctctgacactgatctttgatagacaccctattgccgctctcctgtgttaccccgccgcccggtatcgcatgggaagcatgacccctcaagctgtgcttgcgttcgttgccctgattcccccgacgctccctggcacaaatatcgtgctgggggcccttcccgaggacagacatatcgatcggctggccaaacgccagagacctggagagcggctcgacctggccatgctggctgccattagacgcgtctacgaactcctggcgaacaccgtgcggtaccttcagggcgggggatcctggagagaggattggggccagctgagcggcacagctgtgcctccccaaggggccgaaccccagtctaatgccggaccgcagccccacatcggcgacaccctctttaccctgttccgcgctcctgagcttctggcccccaacggggatctctataatgtctttgcttgggccctggacgttctggcgaagcggctcagacctatgcatgtgttcattctggactacgatcaatcccccgccggatgccgcgacgcccttctgcagctcacaagcggcatggtgcagacgcacgtcaccacaccggggtctatccctaccatctgtgatctggctcggacatttgctagagagatgggagaagccaactga

SEQ ID NO: 6696 - RNA, 1131 nt, synthetic construct
  misc_feature 1..1131: note = derived and/or modified sequence opt6 fromThymidine_Kinase_TK__Herpes_Simplex_Virus_1_(HSV-1)__AC B59251
  source 1..1131: mol_type = other RNA
atggcaagctatccttgtcaccaacatgcatcagcattcgatcaagcagcgagatctagaggacacaataacagaagaacagcgttaagaccaaggagacaacaaaaagcaaccgaagttagactagaacaaaaaatgccaacactactaagagtatacattgacggaccccatggaatgggaaaaacaacaacaacacaattacttgtagcactaggaagtcgagatgatatagtctatgtaccagaaccaatgacatattggagagttttaggagctagtgaaactatagcaaatatatatacaacacaacacagactagatcaaggagaaatcagtgcaggagatgctgcagtagtaatgacatcagcacaaataacaatgggaatgccatatgcagtcacagatgcagtattagcaccacatataggtggtgaagcaggcagctctcatgcaccaccacccgcattaacattaatttttgatagacatccaatagcagcattactttgctatccagcagcaagatacagaatgggcagtatgacaccacaagcagtattagcatttgtagcactaataccaccaacattacctggcacaaatatagttttaggtgcactaccagaagatagacatatagatcgactagcaaaacgacaaaggcccggagaaagattagatttagcaatgctcgcagcaatcagaagagtatatgaattattagcaaacaccgtaagatacttacaaggaggaggatcatggagagaagattggggacaactaagtggaacagcagtacccccacaaggtgctgaaccacaatcaaatgcaggaccgcaaccccatataggagatacactctttacattatttagagctccagaactattagcaccaaatggagatctatataatgtatttgcatgggcactagatgtgttagcaaaaagattaaggcccatgcatgtatttatactagattacgatcaatcacctgcaggatgtcgagatgccctcttacaactaacatcaggaatggtacaaacacatgtaacaactccaggaagtataccaacaatatgtgatttagcaagaacatttgccagagaaatgggagaagcaaattaa

SEQ ID NO: 6697 - protein, 376 aa, synthetic construct
  REGION 1..376: note Thymidine_Kinase_TK__Herpes_Simplex_Virus_1_(HSV-1)__B2CPP6
MASYPGHQHASAFDQAARSRGHSNRRTALRPRRQQEATEVHLEQKMPTLLRVYIDGPHGMGKTTTTQLLVALGSRDDIVYVPEPMTYWRVLGASETIANIYTTQHRLDQGEISAGDAAVVMTSAQITMGMPYAVTDAVLAPHIGGEAGSSHAPPPALTLIFDRHPIAALLCYPAARYLMGSMTPQAVLAFVVLIPPTLPGTNIVLGALPEDRHIDRLAKRQRPGERLDLAMLAAIRRVYGLLANTVRYLQCGGSWREDWGQLSGTALTPQGAEPQSNAGPRPHIGETLFTLFRAPELLAPNGDLYNVFAWALDVLAKRLRPMHVFILDYDQSPAGCRDALLQLTSGMVQTHVTPPGSIPTICDLARTFAREMGEAH

SEQ ID NO: 6698 - RNA, 1131 nt, synthetic construct
  misc_feature 1..1131: note Thymidine_Kinase_TK__Herpes_Simplex_Virus_1_(HSV-1)__ACB592 52
  source 1..1131: mol_type = other RNA
atggcttcgtaccccggccatcaacacgcgtctgcgttcgaccaggctgcgcgttctcgcggccatagcaaccgacgtacggcgttgcgccctcgccggcagcaagaagccacggaagtccacctggagcagaaaatgcccacgctactgcgggtttatatagacggtcctcacgggatggggaaaaccaccaccacgcaactgctggtggccctgggttcgcgcgacgatatcgtctacgtacccgagccgatgacttactggcgggtgctgggggcttccgagacaatcgcgaacatctacaccacacaacaccgcctcgaccagggtgagatatcggccggggacgcggcggtggtaatgacaagcgcccagataacaatgggcatgccttatgccgtgaccgacgccgttctggctcctcatatcgggggggaggctgggagctcacatgccccgcccccggccctcaccctcatcttcgaccgccatcccatcgccgccctcctgtgctacccggccgcgcggtaccttatgggcagcatgaccccccaggccgtgctggcgttcgtggtcctcatcccgccgaccttgcccggcacaaacatcgtgttgggggcccttccggaggacagacacatcgaccgcctggccaaacgccagcgccccggtgagcggcttgacctggctatgctggccgcgattcgccgcgtttacgggctacttgccaatacggtgcggtatctgcagtgcggcgggtcgtggcgggaggattggggacagctttcggggacggccttgacgccccagggtgccgagccccagagcaacgcgggcccacgaccccatatcggggaaacgttatttaccctgtttcgggcccccgagttgctggcccccaacggcgacctgtacaacgtgtttgcctgggccttggacgtcttggccaaacgcctccgtcccatgcacgtctttatcctggattacgaccaatcgcccgccggctgccgggacgccctgctgcaacttacctccgggatggtccagacccatgtcacccccccaggctccataccgacgatctgcgacctggcgcgcacgtttgcccgggagatgggggaggctcactaa

SEQ ID NO: 6699 - RNA, 1131 nt, synthetic construct
  misc_feature 1..1131: note = derived and/or modified sequence opt1 fromThymidine_Kinase_TK__Herpes_Simplex_Virus_1_(HSV-1)__AC B59252
  source 1..1131: mol_type = other RNA
atggccagctaccccggccaccagcacgcctccgcgttcgaccaggccgcccgcagccgggggcactccaaccgccggaccgccctgcgcccgcggcgccagcaggaggccaccgaggtgcacctcgagcagaagatgcccacgctgctgcgggtctacatcgacggcccccacgggatgggcaagaccaccaccacgcagctcctggtggcgctggggagccgcgacgacatcgtgtacgtccccgagccgatgacctactggcgggtgctcggcgcctccgagaccatcgccaacatctacaccacgcagcaccgcctggaccagggcgagatcagcgccggggacgcggccgtggtcatgacctccgcccagatcaccatgggcatgccctacgccgtgaccgacgccgtgctggcgccccacatcgggggcgaggccgggagctcccacgcgcccccgcccgccctcacgctgatcttcgaccggcaccccatcgccgccctgctctgctaccccgccgcccgctacctgatgggcagcatgaccccgcaggccgtcctggccttcgtggtgctcatcccgcccaccctgcccggcaccaacatcgtcctgggggcgctccccgaggaccggcacatcgaccgcctggccaagcggcagcgccccggcgagcggctggacctcgccatgctggccgccatccgccgggtgtacgggctgctcgcgaacacggtgcgctacctgcagtgcggcggctcctggcgggaggactgggggcagctgagcggcaccgccctcacgccccagggggccgagccccagtccaacgccggcccgcgcccccacatcggggagaccctgttcaccctgttccgcgcgcccgagctcctggcccccaacggcgacctgtacaacgtcttcgcctgggccctcgacgtgctggccaagcggctgcgcccgatgcacgtgttcatcctcgactacgaccagagccccgcgggctgccgggacgccctgctgcagctcacctccgggatggtccagacccacgtgaccccgcccggcagcatccccacgatctgcgacctggcccgcaccttcgcccgggagatgggggaggcccactga

SEQ ID NO: 6700 - RNA, 1131 nt, synthetic construct
  misc_feature 1..1131: note = derived and/or modified sequence opt2 fromThymidine_Kinase_TK__Herpes_Simplex_Virus_1_(HSV-1)__AC B59252
  source 1..1131: mol_type = other RNA
atggcctcctaccccggccaccagcacgcctccgccttcgaccaggccgcccgctcccgcggccactccaaccgccgcaccgccctccgcccccgccgccagcaggaggccaccgaggtccacctcgagcagaagatgcccaccctcctccgcgtctacatcgacggcccccacggcatgggcaagaccaccaccacccagctcctcgtcgccctcggctcccgcgacgacatcgtctacgtccccgagcccatgacctactggcgcgtcctcggcgcctccgagaccatcgccaacatctacaccacccagcaccgcctcgaccagggcgagatctccgccggcgacgccgccgtcgtcatgacctccgcccagatcaccatgggcatgccctacgccgtcaccgacgccgtcctcgccccccacatcggcggcgaggccggctcctcccacgcccccccccccgccctcaccctcatcttcgaccgccaccccatcgccgccctcctctgctaccccgccgcccgctacctcatgggctccatgaccccccaggccgtcctcgccttcgtcgtcctcatcccccccaccctccccggcaccaacatcgtcctcggcgccctccccgaggaccgccacatcgaccgcctcgccaagcgccagcgccccggcgagcgcctcgacctcgccatgctcgccgccatccgccgcgtctacggcctcctcgccaacaccgtccgctacctccagtgcggcggctcctggcgcgaggactggggccagctctccggcaccgccctcaccccccagggcgccgagccccagtccaacgccggcccccgcccccacatcggcgagaccctcttcaccctcttccgcgcccccgagctcctcgcccccaacggcgacctctacaacgtcttcgcctgggccctcgacgtcctcgccaagcgcctccgccccatgcacgtcttcatcctcgactacgaccagtcccccgccggctgccgcgacgccctcctccagctcacctccggcatggtccagacccacgtcaccccccccggctccatccccaccatctgcgacctcgcccgcaccttcgcccgcgagatgggcgaggcccactga

SEQ ID NO: 6701 - RNA, 1131 nt, synthetic construct
  misc_feature 1..1131: note = derived and/or modified sequence opt3 fromThymidine_Kinase_TK__Herpes_Simplex_Virus_1_(HSV-1)__AC B59252
  source 1..1131: mol_type = other RNA
atggccagctaccccggccaccagcatgcttccgcattcgaccaagccgcgagatctagggggcactcaaaccggcgcaccgctctgcgacctcgtagacagcaggaggccacagaagtgcatctcgagcagaagatgccaactcttctgagggtctatatcgatggaccgcacggtatgggcaaaacgaccacaactcaattgttagttgcactggggagtcgggacgatattgtgtacgtacccgaacctatgacctattggcgcgtgctaggagccagcgagacaatagctaatatctacaccactcagcatagactcgaccagggcgaaatttccgccggtgatgccgctgtcgtgatgacatctgcccagatcaccatggggatgccatatgcggttacggacgcagtgctggcaccccacattggaggcgaggctggctcgtcacacgcccctccacccgcacttactctgatctttgataggcatcctatagctgccttgctctgctacccagcggcccggtatctgatggggagcatgaccccgcaagcagtcctggctttcgtggtactcattccccctacattaccaggaactaacatcgttctgggtgcccttcccgaggaccgccacatcgatcgattggctaagagacagaggcctggcgaacggctggacctagccatgctcgcagccattcgtcgcgtgtacgggctgcttgctaataccgtcagatacctgcagtgtggaggcagttggagggaggattggggtcagttgtccgggacagcgctcaccccacaaggagcagaaccccagtctaacgccggcccgcggcctcatatcggcgagacgctgtttactttattccgagctcccgagctgctcgccccaaatggggacctttataacgtgtttgcatgggccctggatgtgttggctaaacgcctaagacctatgcacgtcttcatactggactacgaccagagccccgccggatgcagggatgcactcctgcaacttacatccggtatggttcagacccacgtgactccacccggctcaattcctacaatctgtgacctggcgcggacctttgctcgcgaaatgggggaggcccattga

SEQ ID NO: 6702 - RNA, 1131 nt, synthetic construct
  misc_feature 1..1131: note = derived and/or modified sequence opt4 fromThymidine_Kinase_TK__Herpes_Simplex_Virus_1_(HSV-1)__AC B59252
  source 1..1131: mol_type = other RNA
atggccagctaccccggccaccagcacgccagcgccttcgaccaggccgccagaagcagaggccacagcaacagaagaaccgccctgagacccagaagacagcaggaggccaccgaggtgcacctggagcagaagatgcccaccctgctgagagtgtacatcgacggcccccacggcatgggcaagaccaccaccacccagctgctggtggccctgggcagcagagacgacatcgtgtacgtgcccgagcccatgacctactggagagtgctgggcgccagcgagaccatcgccaacatctacaccacccagcacagactggaccagggcgagatcagcgccggcgacgccgccgtggtgatgaccagcgcccagatcaccatgggcatgccctacgccgtgaccgacgccgtgctggccccccacatcggcggcgaggccggcagcagccacgcccccccccccgccctgaccctgatcttcgacagacaccccatcgccgccctgctgtgctaccccgccgccagatacctgatgggcagcatgaccccccaggccgtgctggccttcgtggtgctgatcccccccaccctgcccggcaccaacatcgtgctgggcgccctgcccgaggacagacacatcgacagactggccaagagacagagacccggcgagagactggacctggccatgctggccgccatcagaagagtgtacggcctgctggccaacaccgtgagatacctgcagtgcggcggcagctggagagaggactggggccagctgagcggcaccgccctgaccccccagggcgccgagccccagagcaacgccggccccagaccccacatcggcgagaccctgttcaccctgttcagagcccccgagctgctggcccccaacggcgacctgtacaacgtgttcgcctgggccctggacgtgctggccaagagactgagacccatgcacgtgttcatcctggactacgaccagagccccgccggctgcagagacgccctgctgcagctgaccagcggcatggtgcagacccacgtgaccccccccggcagcatccccaccatctgcgacctggccagaaccttcgccagagagatgggcgaggcccactga

SEQ ID NO: 6703 - RNA, 1131 nt, synthetic construct
  misc_feature 1..1131: note = derived and/or modified sequence opt5 fromThymidine_Kinase_TK__Herpes_Simplex_Virus_1_(HSV-1)__AC B59252
  source 1..1131: mol_type = other RNA
atggccagctaccccggccaccagcatgcttccgccttcgaccaagcggctagatctcgggggcacagcaaccgcagaaccgccctgcggcctcgcagacagcaggaggccacagaagtgcatctcgagcagaagatgccgacgctgcttcgggtctatatcgatggaccccacggcatggggaaaaccacaaccacacaactgctcgttgctctgggatcccgcgacgatattgtgtacgtgcctgaacccatgacctattggagagtccttggcgcctctgagacaatcgctaatatttacaccacgcagcatcggctggaccagggggaaatcagcgccggagatgcggccgtggttatgacctccgctcagattacaatgggcatgccttatgccgtgaccgacgctgtcctcgcgccccacatcggcggggaggccggatctagccacgcccctccgcccgctctgacactgatctttgatcgccatcctattgccgctctcctgtgctaccccgccgccagatatcttatgggctccatgacccctcaagctgtgctggcgttcgttgtgctcattcccccgacgctgcctgggacaaacatcgtccttggagccctgcccgaggaccggcacatcgatcgcctcgctaagagacagcggcctggcgaacgcctggacctggccatgctcgccgctattagacgggtgtacgggctgcttgccaataccgtgagatacctgcagtgtggaggcagctggcgcgaggattggggccagctctctgggacagcgctgacaccccaaggagctgaaccccagtccaacgccggccctcggccgcatatcggggagaccctttttaccctgttcagagcccccgagctcctggctcctaatggagacctgtataacgtctttgcctgggctctcgatgttctggccaaacgccttcggcccatgcacgtgttcattctggactacgaccagagccctgcgggctgcagagatgccctcctgcaacttacgtctgggatggtgcagacccacgtcacacccccgggatccatccctaccatctgtgacctggctcgcacatttgcccgggaaatgggcgaggctcattga

SEQ ID NO: 6704 - RNA, 1131 nt, synthetic construct
  misc_feature 1..1131: note = derived and/or modified sequence opt6 fromThymidine_Kinase_TK__Herpes_Simplex_Virus_1_(HSV-1)__AC B59252
  source 1..1131: mol_type = other RNA
atggcatcatatccaggacatcaacatgcaagcgcatttgatcaagcagcaagatcaagaggccacagcaatagaagaaccgcacttagaccaagacgacaacaagaagcaacggaagtacatttagaacaaaaaatgccaacacttttacgagtatatattgatggaccacatggaatgggaaaaactacaacaacacaactattagtagcattaggcagtagagatgatatagtttatgtaccagaaccaatgacatattggagagttttaggagcatcagaaacaatagcaaatatatataccacacaacataggcttgaccaaggagaaataagtgctggcgatgccgcagtagtcatgacttccgcacaaataactatgggtatgccatatgcagtaacagatgccgtactagcaccacacattggtggagaagccggttcaagtcatgcacctccaccagcattaacactgatatttgatagacatccaatagctgcactattatgttatccagcagctagatatttaatgggatcaatgacacctcaagcagtactagcattcgtcgttttaattccaccaacattaccaggaactaatatagtacttggagcattaccagaagatagacatatagacaggcttgcaaaaagacaacgaccaggagaaagattagatttagcaatgttagcagcaataagaagagtttatggattattagcaaatacagtaagatatttacaatgtggaggatcatggagagaagattggggacaactctcaggaacagctttaaccccacaaggagctgaaccacaatcaaatgcaggaccaagaccacatataggagaaacattatttacactcttcagagcaccagaattactagcaccaaatggagatttatataatgtatttgcctgggcactagatgtattagcaaaaagattaagacctatgcatgtatttatattagattatgaccaatcaccagcaggatgcagagatgctttattacaactaacaagtggtatggtacaaacacatgtaacaccacctggaagtataccaacaatatgtgacttagcacgaacattcgcaagagaaatgggagaggcacattaa

SEQ ID NO: 6705 - protein, 376 aa, synthetic construct
  REGION 1..376: note Thymidine_Kinase_TK__Herpes_Simplex_Virus_1_(HSV-1)__B2CPP7
MASYPCHQHASAFDQAARSRGHSNRRTALRPRRQQEATEVRPEQKMPTLLRVYIDGPHGMGKTTTTQLLVALGSRDDIVYVPEPMTYWRVLGASETIANIYTTQHRLDQGEISAGDAAVVMTSAQITMGMPYAVTDAVLAPHIGGEAGSSHAPPPALTLIFDRHPIAALLCYPAARYLMGSMTPQAVLAFVALIPPTLPGTNIVLGALPEDRHIDRLAKRQRPGERLDLAMLAAIRRVYELLANTVRYLQGGGSWREDWGQLSGTALTPQGAEPQSNAGPRPHIGETLFTLFRAPELLAPNGDLYNVFAWALDVLAKRLRPMHVFILDYDQSPAGCRDALLQLTSGMVQTHVTTPGSIPTICDLARTFAREMGEAP

SEQ ID NO: 6706 - RNA, 1131 nt, synthetic construct
  misc_feature 1..1131: note Thymidine_Kinase_TK__Herpes_Simplex_Virus_1_(HSV-1)__ACB592 53
  source 1..1131: mol_type = other RNA
atggcttcgtacccctgccatcaacacgcgtctgcgttcgaccaggctgcgcgttctcgcggccatagcaaccgacgtacggcgttgcgccctcgccggcagcaagaagccacggaagtccgcccggagcagaaaatgcccacgctactgcgggtttatatagacggtccccacgggatggggaaaaccaccaccacgcaactgctggtggccctgggttcgcgcgacgatatcgtctacgtacccgagccgatgacttactggcgggtgctgggggcttccgagacaatcgcgaacatctacaccacacaacaccgcctcgaccagggtgagatatcggccggggacgcggcggtggtaatgacaagcgcccagataacaatgggcatgccttatgccgtgaccgacgccgtgctggctcctcatatcgggggggaggctgggagctcacatgccccgcccccggccctcaccctcatcttcgaccgccatcccatcgccgccctcctgtgttacccggccgcgcgataccttatgggcagcatgaccccccaggccgtgctggcgttcgtggccctcatcccgccgaccttgccgggcacaaacatcgtgttgggggcccttccggaggacagacacatcgaccgcctggccaaacgccagcgccccggcgagcggcttgacctggctatgctggccgcgattcgccgcgtttacgagctgcttgccaatacggtgcggtatctgcagggcggcgggtcgtggcgggaggattggggacagctttcggggacggccttgacgccccagggtgccgagccccagagcaacgcgggcccgcgaccccatatcggggaaacgttatttaccctgtttcgggcccccgagttgctggcccccaacggcgacctgtacaacgtgtttgcctgggccttggacgtcttggccaaacgcctccgtcccatgcacgtctttatcctggattacgaccaatcgcccgccggctgccgggacgccctgctgcaacttacctccgggatggtccagacccacgtcaccaccccaggctccataccgacgatctgcgacctggcgcgcacgtttgcccgggagatgggggaggctccctaa

SEQ ID NO: 6707 - RNA, 1131 nt, synthetic construct
  misc_feature 1..1131: note = derived and/or modified sequence opt1 fromThymidine_Kinase_TK__Herpes_Simplex_Virus_1_(HSV-1)__AC B59253
  source 1..1131: mol_type = other RNA
atggccagctacccctgccaccagcacgcctccgcgttcgaccaggccgcccgcagccggggccactccaaccgccggaccgccctgcgcccgcggcgccagcaggaggccaccgaggtgcggcccgagcagaagatgcccacgctcctgcgcgtctacatcgacgggccccacggcatggggaagaccaccaccacgcagctgctcgtggcgctgggcagccgggacgacatcgtgtacgtcccggagcccatgacctactggcgcgtgctgggggcctccgagaccatcgccaacatctacaccacgcagcaccggctcgaccagggcgagatcagcgccggcgacgcggccgtggtcatgacctccgcccagatcaccatggggatgccctacgccgtgaccgacgccgtgctggcgccccacatcggcggggaggccggcagctcccacgccccgccgcccgccctgacgctcatcttcgaccgccaccccatcgccgcgctgctgtgctaccccgccgcccggtacctcatggggagcatgacgccccaggccgtcctggccttcgtggcgctgatcccgcccaccctccccggcaccaacatcgtgctgggcgccctgcccgaggaccgccacatcgaccggctcgccaagcgccagcggcccggggagcgcctggacctggccatgctcgccgcgatccggcgcgtctacgagctgctggccaacaccgtgcggtacctccagggcgggggctcctggcgcgaggactggggccagctgagcgggaccgccctgacgccccagggcgccgagccgcagtccaacgcggggccccgcccccacatcggcgagaccctcttcaccctgttccgggcccccgagctgctcgccccgaacggggacctgtacaacgtgttcgcctgggccctggacgtcctcgcgaagcgcctgcggcccatgcacgtgttcatcctggactacgaccagagccccgccggctgccgcgacgccctcctgcagctgacctccggcatggtgcagacccacgtcaccacgcccgggagcatcccgaccatctgcgacctcgcccggaccttcgcccgcgagatgggcgaggcgccctga

SEQ ID NO: 6708 - RNA, 1131 nt, synthetic construct
  misc_feature 1..1131: note = derived and/or modified sequence opt2 fromThymidine_Kinase_TK__Herpes_Simplex_Virus_1_(HSV-1)__AC B59253
  source 1..1131: mol_type = other RNA
atggcctcctacccctgccaccagcacgcctccgccttcgaccaggccgcccgctcccgcggccactccaaccgccgcaccgccctccgcccccgccgccagcaggaggccaccgaggtccgccccgagcagaagatgcccaccctcctccgcgtctacatcgacggcccccacggcatgggcaagaccaccaccacccagctcctcgtcgccctcggctcccgcgacgacatcgtctacgtccccgagcccatgacctactggcgcgtcctcggcgcctccgagaccatcgccaacatctacaccacccagcaccgcctcgaccagggcgagatctccgccggcgacgccgccgtcgtcatgacctccgcccagatcaccatgggcatgccctacgccgtcaccgacgccgtcctcgccccccacatcggcggcgaggccggctcctcccacgcccccccccccgccctcaccctcatcttcgaccgccaccccatcgccgccctcctctgctaccccgccgcccgctacctcatgggctccatgaccccccaggccgtcctcgccttcgtcgccctcatcccccccaccctccccggcaccaacatcgtcctcggcgccctccccgaggaccgccacatcgaccgcctcgccaagcgccagcgccccggcgagcgcctcgacctcgccatgctcgccgccatccgccgcgtctacgagctcctcgccaacaccgtccgctacctccagggcggcggctcctggcgcgaggactggggccagctctccggcaccgccctcaccccccagggcgccgagccccagtccaacgccggcccccgcccccacatcggcgagaccctcttcaccctcttccgcgcccccgagctcctcgcccccaacggcgacctctacaacgtcttcgcctgggccctcgacgtcctcgccaagcgcctccgccccatgcacgtcttcatcctcgactacgaccagtcccccgccggctgccgcgacgccctcctccagctcacctccggcatggtccagacccacgtcaccacccccggctccatccccaccatctgcgacctcgcccgcaccttcgcccgcgagatgggcgaggccccctga

SEQ ID NO: 6709 - RNA, 1131 nt, synthetic construct
  misc_feature 1..1131: note = derived and/or modified sequence opt3 fromThymidine_Kinase_TK__Herpes_Simplex_Virus_1_(HSV-1)__AC B59253
  source 1..1131: mol_type = other RNA
atggccagctacccctgccaccagcatgcttccgcattcgaccaagccgcgagatctaggggccactcaaaccggcgcaccgctctgcgacctcgtagacagcaggaggccacagaagtgaggccagagcagaagatgccgactctccttcgggtctatatcgatgggccccatggaatgggtaaaacgaccacaactcaactgttggttgcattaggcagtcgcgacgatattgtgtacgtacctgaaccaatgacctattggagagtgctgggggccagcgagacaatagctaatatctacaccactcagcacaggctagaccagggagaaatttccgcaggcgatgccgctgtcgtgatgacatctgcccagatcaccatgggtatgccctatgcggttacggacgcagtgctcgcccctcatattgggggagaggctggctcgtcacacgccccaccccctgcactgactcttatctttgatcggcacccaatagctgccctgttgtgttacccggcggcccgctatctcatgggcagcatgacaccccaagcagtcctggctttcgtggccctgatccctccaaccctccccgggactaacattgtattaggagctctgcctgaggaccgacatatcgatagacttgccaagaggcagcggccaggtgaacgtttggacctggcaatgctagccgctattcgcagagtttacgagctcctggcgaataccgtgaggtaccttcagggcgggggaagttggcgggaagattggggccagctgtccggtacagcattgacgccccaaggggccgagccgcagtctaacgctggacctcgaccccacatcggcgagaccctctttactctgttccgcgccccagaattactggcacctaatggcgacctctataacgtctttgcctgggctcttgatgtgctggccaaaagattgaggcccatgcatgtgttcatactagactacgaccagagcccagcagggtgccgggatgcgctgctccaactgacatccggaatggtccagacccacgttactacacccggttcaattcctaccatctgtgaccttgctcgcacgtttgccagagagatgggcgaagcaccatga

SEQ ID NO: 6710 - RNA, 1131 nt, synthetic construct
  misc_feature 1..1131: note = derived and/or modified sequence opt4 fromThymidine_Kinase_TK__Herpes_Simplex_Virus_1_(HSV-1)__AC B59253
  source 1..1131: mol_type = other RNA
atggccagctacccctgccaccagcacgccagcgccttcgaccaggccgccagaagcagaggccacagcaacagaagaaccgccctgagacccagaagacagcaggaggccaccgaggtgagacccgagcagaagatgcccaccctgctgagagtgtacatcgacggcccccacggcatgggcaagaccaccaccacccagctgctggtggccctgggcagcagagacgacatcgtgtacgtgcccgagcccatgacctactggagagtgctgggcgccagcgagaccatcgccaacatctacaccacccagcacagactggaccagggcgagatcagcgccggcgacgccgccgtggtgatgaccagcgcccagatcaccatgggcatgccctacgccgtgaccgacgccgtgctggccccccacatcggcggcgaggccggcagcagccacgcccccccccccgccctgaccctgatcttcgacagacaccccatcgccgccctgctgtgctaccccgccgccagatacctgatgggcagcatgaccccccaggccgtgctggccttcgtggccctgatcccccccaccctgcccggcaccaacatcgtgctgggcgccctgcccgaggacagacacatcgacagactggccaagagacagagacccggcgagagactggacctggccatgctggccgccatcagaagagtgtacgagctgctggccaacaccgtgagatacctgcagggcggcggcagctggagagaggactggggccagctgagcggcaccgccctgaccccccagggcgccgagccccagagcaacgccggccccagaccccacatcggcgagaccctgttcaccctgttcagagcccccgagctgctggcccccaacggcgacctgtacaacgtgttcgcctgggccctggacgtgctggccaagagactgagacccatgcacgtgttcatcctggactacgaccagagccccgccggctgcagagacgccctgctgcagctgaccagcggcatggtgcagacccacgtgaccacccccggcagcatccccaccatctgcgacctggccagaaccttcgccagagagatgggcgaggccccctga

SEQ ID NO: 6711 - RNA, 1131 nt, synthetic construct
  misc_feature 1..1131: note = derived and/or modified sequence opt5 fromThymidine_Kinase_TK__Herpes_Simplex_Virus_1_(HSV-1)__AC B59253
  source 1..1131: mol_type = other RNA
atggccagctacccctgccaccagcatgcttccgccttcgaccaagcggctagatctcggggccacagcaaccgcagaaccgccctgcggcctcgcagacagcaggaggccacagaagtgcggccggagcagaagatgcccacgctcctgcgcgtctatatcgatgggcctcatggaatgggcaaaaccacaaccacacaacttctggttgctctcgggtccagagacgatattgtgtacgtgcccgaacctatgacctattggcgggtcctgggagcctctgagacaatcgctaatatttacaccacgcagcaccgccttgaccagggcgaaatcagcgccggggatgcggccgtggttatgacctccgctcagattacaatgggaatgccctatgccgtgaccgacgctgtcctggcccctcatatcggcggcgaggcggggtctagccacgccccgccccctgctctcacactgatctttgatagacaccccattgccgctctgctctgttaccctgccgcccggtatctgatgggatccatgacgccccaagctgtgcttgcgttcgttgccctgatcccgcctaccctccccggcacaaacattgtgctgggggcccttcctgaggaccgccatatcgatagactggctaagcggcagcgccccggagaaagactcgacctggccatgctggctgccattcggagagtctacgagctcctggcgaataccgtgcgctaccttcagggcgggggaagctggcgggaagattggggccagctgtctggcacagctctcacaccccaaggggccgagcctcagtccaacgccggaccgagaccccacatcggcgagaccctgtttacccttttccgcgctcctgaactgctcgcccccaatggggacctgtataacgtgtttgcttgggccctggatgtcctcgcgaaacggctgagacctatgcatgttttcattcttgactacgaccagagccccgccggatgccgcgatgctctgctccaactgacgtctggcatggtgcagacccacgtgacaaccccggggtccatccctacaatctgtgaccttgcccggacctttgctagagagatgggagaagccccctga

SEQ ID NO: 6712 - RNA, 1131 nt, synthetic construct
  misc_feature 1..1131: note = derived and/or modified sequence opt6 fromThymidine_Kinase_TK__Herpes_Simplex_Virus_1_(HSV-1)__AC B59253
  source 1..1131: mol_type = other RNA
atggcttcgtacccatgccatcaacatgcaagcgcattcgatcaagcagcaagatcaagaggacatagtaatcgaagaacagctctaagaccaagaagacaacaagaagctacagaagtaagaccagaacaaaaaatgcctacattactaagagtatatatagatggacctcatggaatgggaaaaacaacaacaacacaactacttgttgcattaggatcaagagatgatatagtttacgttccagaaccgatgacatactggagagtactaggagcatcagaaacaatagcaaacatttatacaacacaacatagattagatcaaggagaaatatcagcaggagatgctgcagtagtaatgacaagtgcacaaataacaatgggaatgccatatgcagtaacagatgctgtactagcgccacacataggaggtgaagcaggttcatcacacgcaccaccaccagcacttacattaatatttgatagacatccaatagcagcattattgtgctatcctgcagctagatatcttatgggatcaatgacaccacaagcagttttagcctttgttgctttaatacccccaacattacctggaacaaatatagtacttggagcattaccagaagatagacacatagataggttagcaaaaagacaaagaccaggagaaagacttgatctagcaatgttggctgcaataagaagagtatatgaattattagccaatacagtaagatacttacaaggaggaggttcttggagagaagattggggacaactaagcggaacagctcttacacctcaaggagcagaaccccaatcaaatgccggaccaagacctcatataggagaaacactatttactttatttagagcaccagaacttctagcacctaacggagacttatataacgtctttgcatgggcactagacgtattagcaaaaagattaagaccaatgcatgtatttattctagattatgatcaatcaccagcaggatgtagagatgcattattacaactcacttcaggaatggtacaaacacatgtaactaccccaggaagtataccaacaatttgtgaccttgctagaacatttgcacgagaaatgggagaggcaccataa

SEQ ID NO: 6713 - protein, 375 aa, synthetic construct
  REGION 1..375: note Thymidine_Kinase_TK__Herpes_Simplex_Virus_1_(HSV-1)__B2CPP8
MASYPGHQHASAFDQAARSRGHSNRRTALRPRRQQATEVHLEQKMPTLLRVYIDGPHGMGKTTTTQLLVALGSRDDIVYVPEPMTYWRVLGASETIANIYTTQHRLDQGEISAGDAAVVMTSAQITMGMPYAVTDAVLAPHIGGEAGSSHAPPPALTLIFDRHPIAALLCYPAARYLMGSMTPQAVLAFVVLIPPTLPGTNIVLGALPEDRHIDRLAKRQRPGERLDLAMLAAIRRVYGLLANTVRYLQCGGSWREDWGQLSGTALTPQGAEPQSNAGPRPHIGETLFTLFRAPELLAPNGDLYNVFAWALDVLAKRLRPMHVFILDYDQSPAGCRDALLQLTSGMVQTHVTTPGSIPTICDLARTFAREMGEAH

SEQ ID NO: 6714 - RNA, 1128 nt, synthetic construct
  misc_feature 1..1128: note Thymidine_Kinase_TK__Herpes_Simplex_Virus_1_(HSV-1)__ACB592 54
  source 1..1128: mol_type = other RNA
atggcttcgtaccccggccatcaacacgcgtctgcgttcgaccaggctgcgcgttctcgcggccatagcaaccgacgtacggcgttgcgccctcgccggcagcaagccacggaagtccacctggagcagaaaatgcccacgctactgcgggtttatatagacggtcctcacgggatggggaaaaccaccaccacgcaactgctggtggccctgggttcgcgcgacgatatcgtctacgtacccgagccgatgacttactggcgggtgctgggggcttccgagacaatcgcgaacatctacaccacacaacaccgcctcgaccagggtgagatatcggccggggacgcggcggtggtaatgacaagcgcccagataacaatgggcatgccttatgccgtgaccgacgccgttctggctcctcatatcgggggggaggctgggagctcacatgccccgcccccggccctcaccctcatcttcgaccgccatcccatcgccgccctcctgtgctacccggccgcgcggtaccttatgggcagcatgaccccccaggccgtgctggcgttcgtggtcctcatcccgccgaccttgcccggcacaaacatcgtgttgggggcccttccggaggacagacacatcgaccgcctggccaaacgccagcgccccggtgagcggcttgacctggctatgctggccgcgattcgccgcgtttacgggctacttgccaatacggtgcggtatctgcagtgcggcgggtcgtggcgggaggattggggacagctttcggggacggccttgacgccccagggtgccgagccccagagcaacgcgggcccacgaccccatatcggggaaacgttatttaccctgtttcgggcccccgagttgctggcccccaacggcgacctgtacaacgtgtttgcctgggccttggacgtcttggccaaacgcctccgtcccatgcacgtctttatcctggattacgaccaatcgcccgccggctgccgggacgccctgctgcaacttacctccgggatggtccagacccatgtcaccaccccaggctccataccgacgatctgcgacctggcgcgcacgtttgcccgggagatgggggaggctcactaa

SEQ ID NO: 6715 - RNA, 1128 nt, synthetic construct
  misc_feature 1..1128: note = derived and/or modified sequence opt1 fromThymidine_Kinase_TK__Herpes_Simplex_Virus_1_(HSV-1)__AC B59254
  source 1..1128: mol_type = other RNA
atggccagctaccccggccaccagcacgcctccgcgttcgaccaggccgcccgcagccgggggcactccaaccgccggaccgccctgcgcccgcggcgccagcaggccaccgaggtgcacctcgagcagaagatgcccacgctgctgcgggtctacatcgacggcccccacgggatgggcaagaccaccaccacgcagctcctggtggcgctggggagccgcgacgacatcgtgtacgtccccgagccgatgacctactggcgggtgctcggcgcctccgagaccatcgccaacatctacaccacgcagcaccgcctggaccagggcgagatcagcgccggggacgcggccgtggtcatgacctccgcccagatcaccatgggcatgccctacgccgtgaccgacgccgtgctggcgccccacatcgggggcgaggccgggagctcccacgcgcccccgcccgccctcacgctgatcttcgaccggcaccccatcgccgccctgctctgctaccccgccgcccgctacctgatgggcagcatgaccccgcaggccgtcctggccttcgtggtgctcatcccgcccaccctgcccggcaccaacatcgtcctgggggcgctccccgaggaccggcacatcgaccgcctggccaagcggcagcgccccggcgagcggctggacctcgccatgctggccgccatccgccgggtgtacgggctgctcgcgaacacggtgcgctacctgcagtgcggcggctcctggcgggaggactgggggcagctgagcggcaccgccctcacgccccagggggccgagccccagtccaacgccggcccgcgcccccacatcggggagaccctgttcaccctgttccgcgcgcccgagctcctggcccccaacggcgacctgtacaacgtcttcgcctgggccctcgacgtgctggccaagcggctgcgcccgatgcacgtgttcatcctcgactacgaccagagccccgcgggctgccgggacgccctgctgcagctcacctccgggatggtccagacccacgtgaccacgcccggcagcatccccaccatctgcgacctggcccgcaccttcgcccgggagatgggggaggcccactga

SEQ ID NO: 6716 - RNA, 1128 nt, synthetic construct
  misc_feature 1..1128: note = derived and/or modified sequence opt2 fromThymidine_Kinase_TK__Herpes_Simplex_Virus_1_(HSV-1)__AC B59254
  source 1..1128: mol_type = other RNA
atggcctcctaccccggccaccagcacgcctccgccttcgaccaggccgcccgctcccgcggccactccaaccgccgcaccgccctccgcccccgccgccagcaggccaccgaggtccacctcgagcagaagatgcccaccctcctccgcgtctacatcgacggcccccacggcatgggcaagaccaccaccacccagctcctcgtcgccctcggctcccgcgacgacatcgtctacgtccccgagcccatgacctactggcgcgtcctcggcgcctccgagaccatcgccaacatctacaccacccagcaccgcctcgaccagggcgagatctccgccggcgacgccgccgtcgtcatgacctccgcccagatcaccatgggcatgccctacgccgtcaccgacgccgtcctcgccccccacatcggcggcgaggccggctcctcccacgcccccccccccgccctcaccctcatcttcgaccgccaccccatcgccgccctcctctgctaccccgccgcccgctacctcatgggctccatgaccccccaggccgtcctcgccttcgtcgtcctcatcccccccaccctccccggcaccaacatcgtcctcggcgccctccccgaggaccgccacatcgaccgcctcgccaagcgccagcgccccggcgagcgcctcgacctcgccatgctcgccgccatccgccgcgtctacggcctcctcgccaacaccgtccgctacctccagtgcggcggctcctggcgcgaggactggggccagctctccggcaccgccctcaccccccagggcgccgagccccagtccaacgccggcccccgcccccacatcggcgagaccctcttcaccctcttccgcgcccccgagctcctcgcccccaacggcgacctctacaacgtcttcgcctgggccctcgacgtcctcgccaagcgcctccgccccatgcacgtcttcatcctcgactacgaccagtcccccgccggctgccgcgacgccctcctccagctcacctccggcatggtccagacccacgtcaccacccccggctccatccccaccatctgcgacctcgcccgcaccttcgcccgcgagatgggcgaggcccactga

SEQ ID NO: 6717 - RNA, 1128 nt, synthetic construct
  misc_feature 1..1128: note = derived and/or modified sequence opt3 fromThymidine_Kinase_TK__Herpes_Simplex_Virus_1_(HSV-1)__AC B59254
  source 1..1128: mol_type = other RNA
atggccagctaccccggccaccagcatgcttccgcattcgaccaagccgcgagatctagggggcactcaaaccggcgcaccgctctgcgacctcgtagacagcaggccacagaggtgcatctcgaacagaagatgccaactcttctgagggtctatatcgatggaccgcacggtatgggcaaaacgaccacaactcaattgttagttgcactggggagtcgggacgatattgtgtacgtacccgagcctatgacctattggcgcgtgctaggagccagcgaaacaatagctaatatctacaccactcagcatagactcgaccagggcgagatttccgccggtgatgccgctgtcgtgatgacatctgcccagatcaccatggggatgccatatgcggttacggacgcagtgctggcaccccacattggaggcgaagctggctcgtcacacgcccctccacccgcacttactctgatctttgataggcatcctatagctgccttgctctgctacccagcggcccggtatctgatggggagcatgaccccgcaagcagtcctggctttcgtggtactcattccccctacattaccaggaactaacatcgttctgggtgcccttcccgaggaccgccacatcgatcgattggctaagagacagaggcctggcgagcggctggacctagccatgctcgcagccattcgtcgcgtgtacgggctgcttgctaataccgtcagatacctgcagtgtggaggcagttggagggaagattggggtcagttgtccgggacagcgctcaccccacaaggagcagagccccagtctaacgccggcccgcggcctcatatcggcgaaacgctgtttactttattccgagctcccgagctgctcgccccaaatggggacctttataacgtgtttgcatgggccctggatgtgttggctaaacgcctaagacctatgcacgtcttcatactggactacgaccagagccccgccggatgcagggatgcactcctgcaacttacatccggtatggttcagacccacgtgactacaccaggctcaattcccaccatctgtgacctggcgcggacgtttgctcgcgagatgggggaagcccattga

SEQ ID NO: 6718 - RNA, 1128 nt, synthetic construct
  misc_feature 1..1128: note = derived and/or modified sequence opt4 fromThymidine_Kinase_TK__Herpes_Simplex_Virus_1_(HSV-1)__AC B59254
  source 1..1128: mol_type = other RNA
atggccagctaccccggccaccagcacgccagcgccttcgaccaggccgccagaagcagaggccacagcaacagaagaaccgccctgagacccagaagacagcaggccaccgaggtgcacctggagcagaagatgcccaccctgctgagagtgtacatcgacggcccccacggcatgggcaagaccaccaccacccagctgctggtggccctgggcagcagagacgacatcgtgtacgtgcccgagcccatgacctactggagagtgctgggcgccagcgagaccatcgccaacatctacaccacccagcacagactggaccagggcgagatcagcgccggcgacgccgccgtggtgatgaccagcgcccagatcaccatgggcatgccctacgccgtgaccgacgccgtgctggccccccacatcggcggcgaggccggcagcagccacgcccccccccccgccctgaccctgatcttcgacagacaccccatcgccgccctgctgtgctaccccgccgccagatacctgatgggcagcatgaccccccaggccgtgctggccttcgtggtgctgatcccccccaccctgcccggcaccaacatcgtgctgggcgccctgcccgaggacagacacatcgacagactggccaagagacagagacccggcgagagactggacctggccatgctggccgccatcagaagagtgtacggcctgctggccaacaccgtgagatacctgcagtgcggcggcagctggagagaggactggggccagctgagcggcaccgccctgaccccccagggcgccgagccccagagcaacgccggccccagaccccacatcggcgagaccctgttcaccctgttcagagcccccgagctgctggcccccaacggcgacctgtacaacgtgttcgcctgggccctggacgtgctggccaagagactgagacccatgcacgtgttcatcctggactacgaccagagccccgccggctgcagagacgccctgctgcagctgaccagcggcatggtgcagacccacgtgaccacccccggcagcatccccaccatctgcgacctggccagaaccttcgccagagagatgggcgaggcccactga

SEQ ID NO: 6719 - RNA, 1128 nt, synthetic construct
  misc_feature 1..1128: note = derived and/or modified sequence opt5 fromThymidine_Kinase_TK__Herpes_Simplex_Virus_1_(HSV-1)__AC B59254
  source 1..1128: mol_type = other RNA
atggccagctaccccggccaccagcatgcttccgccttcgaccaagcggctagatctcgggggcacagcaaccgcagaaccgccctgcggcctcgcagacagcaggccacagaggtgcatctcgaacagaagatgccgacgctgcttcgggtctatatcgatggaccccacggcatggggaaaaccacaaccacacaactgctcgttgctctgggatcccgcgacgatattgtgtacgtgcctgagcccatgacctattggagagtccttggcgcctctgaaacaatcgctaatatttacaccacgcagcatcggctggaccagggggagatcagcgccggagatgcggccgtggttatgacctccgctcagattacaatgggcatgccttatgccgtgaccgacgctgtcctcgcgccccacatcggcggggaagccggatctagccacgcccctccgcccgctctgacactgatctttgatcgccatcctattgccgctctcctgtgctaccccgccgccagatatcttatgggctccatgacccctcaagctgtgctggcgttcgttgtgctcattcccccgacgctgcctgggacaaacatcgtccttggagccctgcccgaggaccggcacatcgatcgcctcgctaagagacagcggcctggcgagcgcctggacctggccatgctcgccgctattagacgggtgtacgggctgcttgccaataccgtgagatacctgcagtgtggaggcagctggcgcgaagattggggccagctctctgggacagcgctgacaccccaaggagctgagccccagtccaacgccggccctcggccgcatatcggggaaaccctttttaccctgttcagagcccccgagctcctggctcctaatggagacctgtataacgtctttgcctgggctctcgatgttctggccaaacgccttcggcccatgcacgtgttcattctggactacgaccagagccctgcgggctgcagagatgccctcctgcaacttacgtctgggatggtgcagacccacgtcacaacccccggatccatcccgacaatctgtgacctggctcgcacctttgcccgggagatgggcgaagctcattga

SEQ ID NO: 6720 - RNA, 1128 nt, synthetic construct
  misc_feature 1..1128: note = derived and/or modified sequence opt6 fromThymidine_Kinase_TK__Herpes_Simplex_Virus_1_(HSV-1)__AC B59254
  source 1..1128: mol_type = other RNA
atggcttcatatccaggccatcaacatgcatctgcatttgatcaagcagctagatcaagaggacattcaaataggagaacagctttaagaccaagaagacaacaagcaacggaagtacatctagaacaaaaaatgccaacattattaagagtatatatcgatggacctcacggcatgggtaaaacaacaaccacacaattactagtagcactaggaagtagagacgatatagtatatgtcccagaacctatgacatattggagagtattaggagcaagcgaaacaatagcaaatatatatacaacacaacacagattagatcaaggagaaatatccgcaggagatgcagcagtagtaatgacatctgcacaaatcactatgggaatgccatatgctgtaacagacgcagtattagcaccacatattggaggagaagcaggttcatcgcatgcaccacctcccgcattaacattaatcttcgaccgtcatcccatagcagcactcttatgttatccagcagctaggtacttaatgggatctatgacaccacaagcagtcctagctttcgtagtattaataccaccaacactacctggaactaatatcgtattaggagctttacctgaagatcgacatatagatagactagcaaaaagacaaagaccaggtgaacgactagatctcgcaatgttagcagcaataagaagagtatatggattactagcaaataccgtccgatatttacaatgtggaggatcatggcgagaagattggggacaattatctggcacagcattaacacctcaaggagcagaaccacaatcaaatgcaggaccaagaccacatataggagaaactcttttcaccttatttagagcaccagaattactagcaccaaatggtgatctatacaatgtatttgcttgggcattagatgtattagcaaaaagactacgaccaatgcatgtattcatattagattatgatcaaagtccagctggatgcagagatgcattactacaattaacaagcggaatggtacaaacacacgtaaccacaccaggatcaatacctaccatatgcgacctagcaagaacatttgcaagagaaatgggagaagcacattaa

SEQ ID NO: 6721 - protein, 376 aa, synthetic construct
  REGION 1..376: note Thymidine_Kinase_TK__Herpes_Simplex_Virus_1_(HSV-1)__B2CPP9
MASYPGHQHASAFDQAARSRGHSNRRTALRPRRQQEATEVHLEQKMPTLLRVYIDGPHGMGKTTTTQLLVALGSRDDIVYVPEPMTYWRVLGASETIANIYTTQHRLDQGEISAGDAAVVMTSAQITMGMPYAVTDAVLAPHIGGEAGSSHAPPPALTLIFDRHPIAALLCYPAARYLMGNMTPQAVLAFVVLIPPTLPGTNIVLGALPEDRHIDRLAKRQRPGERLDLAMLAAIRRVYGLLANTVRYLQCGGSWREDWGQLSGTALTPQGAEPQSNAGPRPHIGETLFTLFRAPELLAPNGDLYNVFAWALDVLAKRLRPMHVFILDYDQSPAGCRDALLQLTSGMVQTHVTTPGSIPTICDLARTFAREMGEAN

SEQ ID NO: 6722 - RNA, 1131 nt, synthetic construct
  misc_feature 1..1131: note Thymidine_Kinase_TK__Herpes_Simplex_Virus_1_(HSV-1)__ACB592 55
  source 1..1131: mol_type = other RNA
atggcttcgtaccccggccatcaacacgcgtctgcgttcgaccaggctgcgcgttctcgcggccatagcaaccgacgtacggcgttgcgccctcgccggcagcaagaagccacggaagtccacctggagcagaaaatgcccacgctactgcgggtttatatagacggtcctcacgggatggggaaaaccaccaccacgcaactgctggtggccctgggttcgcgcgacgatatcgtctacgtacccgagccgatgacttactggcgggtgctgggggcttccgagacaatcgcgaacatctacaccacacaacaccgcctcgaccagggtgagatatcggccggggacgcggcggtggtaatgacaagcgcccagataacaatgggcatgccttatgccgtgaccgacgccgttctggctcctcatatcgggggggaggctgggagctcacatgccccgcccccggccctcaccctcatcttcgaccgccatcccatcgccgccctcctgtgctacccggccgcgcggtaccttatgggcaacatgaccccccaggccgtgctggcgttcgtggtcctcatcccgccgaccttgcccggcacaaacatcgtgttgggggcccttccggaggacagacacatcgaccgcctggccaaacgccagcgccccggtgagcggcttgacctggctatgctggccgcgattcgccgcgtttacgggctacttgccaatacggtgcggtatctgcagtgcggcgggtcgtggcgggaggattggggacagctttcggggacggccttgacgccccagggtgccgagccccagagcaacgcgggcccacgaccccatatcggggaaacgttatttaccctgtttcgggcccccgagttgctggcccccaacggcgacctgtacaacgtgtttgcctgggccttggacgtcttggccaaacgcctccgtcccatgcacgtctttatcctggattacgaccaatcgcccgccggctgccgggacgccctgctgcaacttacctccgggatggtccagacccacgtcaccacccccggctccataccgacgatctgcgacctggcgcgcacgtttgcccgggagatgggggaggctaactaa

SEQ ID NO: 6723 - RNA, 1131 nt, synthetic construct
  misc_feature 1..1131: note = derived and/or modified sequence opt1 fromThymidine_Kinase_TK__Herpes_Simplex_Virus_1_(HSV-1)__AC B59255
  source 1..1131: mol_type = other RNA
atggccagctaccccggccaccagcacgcctccgcgttcgaccaggccgcccgcagccgggggcactccaaccgccggaccgccctgcgcccgcggcgccagcaggaggccaccgaggtgcacctcgagcagaagatgcccacgctgctgcgggtctacatcgacggcccccacgggatgggcaagaccaccaccacgcagctcctggtggcgctggggagccgcgacgacatcgtgtacgtccccgagccgatgacctactggcgggtgctcggcgcctccgagaccatcgccaacatctacaccacgcagcaccgcctggaccagggcgagatcagcgccggggacgcggccgtggtcatgacctccgcccagatcaccatgggcatgccctacgccgtgaccgacgccgtgctggcgccccacatcgggggcgaggccgggagctcccacgcgcccccgcccgccctcacgctgatcttcgaccggcaccccatcgccgccctgctctgctaccccgccgcccgctacctgatgggcaacatgaccccgcaggccgtcctggccttcgtggtgctcatcccgcccaccctgcccggcaccaacatcgtcctgggggcgctccccgaggaccggcacatcgaccgcctggccaagcggcagcgccccggcgagcggctggacctcgccatgctggccgccatccgccgggtgtacgggctgctcgcgaacacggtgcgctacctgcagtgcggcggcagctggcgggaggactgggggcagctgtccggcaccgccctcacgccccagggggccgagccccagagcaacgccggcccgcgcccccacatcggggagaccctgttcaccctgttccgcgcgcccgagctcctggcccccaacggcgacctgtacaacgtcttcgcctgggccctcgacgtgctggccaagcggctgcgcccgatgcacgtgttcatcctcgactacgaccagtcccccgcgggctgccgggacgccctgctgcagctcaccagcgggatggtccagacccacgtgaccacgcccggctccatccccaccatctgcgacctggcccgcaccttcgcccgggagatgggggaggccaactga

SEQ ID NO: 6724 - RNA, 1131 nt, synthetic construct
  misc_feature 1..1131: note = derived and/or modified sequence opt2 fromThymidine_Kinase_TK__Herpes_Simplex_Virus_1_(HSV-1)__AC B59255
  source 1..1131: mol_type = other RNA
atggcctcctaccccggccaccagcacgcctccgccttcgaccaggccgcccgctcccgcggccactccaaccgccgcaccgccctccgcccccgccgccagcaggaggccaccgaggtccacctcgagcagaagatgcccaccctcctccgcgtctacatcgacggcccccacggcatgggcaagaccaccaccacccagctcctcgtcgccctcggctcccgcgacgacatcgtctacgtccccgagcccatgacctactggcgcgtcctcggcgcctccgagaccatcgccaacatctacaccacccagcaccgcctcgaccagggcgagatctccgccggcgacgccgccgtcgtcatgacctccgcccagatcaccatgggcatgccctacgccgtcaccgacgccgtcctcgccccccacatcggcggcgaggccggctcctcccacgcccccccccccgccctcaccctcatcttcgaccgccaccccatcgccgccctcctctgctaccccgccgcccgctacctcatgggcaacatgaccccccaggccgtcctcgccttcgtcgtcctcatcccccccaccctccccggcaccaacatcgtcctcggcgccctccccgaggaccgccacatcgaccgcctcgccaagcgccagcgccccggcgagcgcctcgacctcgccatgctcgccgccatccgccgcgtctacggcctcctcgccaacaccgtccgctacctccagtgcggcggctcctggcgcgaggactggggccagctctccggcaccgccctcaccccccagggcgccgagccccagtccaacgccggcccccgcccccacatcggcgagaccctcttcaccctcttccgcgcccccgagctcctcgcccccaacggcgacctctacaacgtcttcgcctgggccctcgacgtcctcgccaagcgcctccgccccatgcacgtcttcatcctcgactacgaccagtcccccgccggctgccgcgacgccctcctccagctcacctccggcatggtccagacccacgtcaccacccccggctccatccccaccatctgcgacctcgcccgcaccttcgcccgcgagatgggcgaggccaactga

SEQ ID NO: 6725 - RNA, 1131 nt, synthetic construct
  misc_feature 1..1131: note = derived and/or modified sequence opt3 fromThymidine_Kinase_TK__Herpes_Simplex_Virus_1_(HSV-1)__AC B59255
  source 1..1131: mol_type = other RNA
atggccagctaccccggccaccagcatgcttccgcattcgaccaagccgcgagatctagggggcactcaaaccggcgcaccgctctgcgacctcgtagacagcaggaggccacagaagtgcatctcgagcagaagatgccaactcttctgagggtctatatcgatggaccgcacggtatgggcaaaacgaccacaactcaattgttagttgcactggggagtcgggacgatattgtgtacgtacccgaacctatgacctattggcgcgtgctaggagccagcgagacaatagctaatatctacaccactcagcatagactcgaccagggcgaaatttccgccggtgatgccgctgtcgtgatgacatctgcccagatcaccatggggatgccatatgcggttacggacgcagtgctggcaccccacattggaggcgaggctggctcgtcacacgcccctccacccgcacttactctgatctttgataggcatcctatagctgccttgctctgctacccagcggcccggtatctgatggggaacatgaccccgcaagcagtcctggctttcgtggtactcattccccctacattaccaggaactaatatcgttctgggtgcccttcccgaggaccgccacatcgatcgattggctaagagacagaggcctggcgaacggctggacctagccatgctcgcagccattcgtcgcgtgtacgggctgcttgctaacaccgtcagatacctgcagtgtggaggcagctggagggaggattggggtcagttgagtgggacagcgctcaccccacaaggagcagaaccccagtccaatgccggcccgcggcctcatatcggcgagacgctgtttactttattccgagctcccgagctgctcgccccaaacggggacctttataatgtgtttgcatgggccctggatgtgttggctaaacgcctaagacctatgcacgtcttcatactggactacgaccagtctcccgccggatgcagggatgcactcctgcaacttacaagcggtatggttcagacccacgtgactacaccaggctccattcccaccatctgtgacctggcgcggacgtttgctcgcgaaatgggggaggccaactga

SEQ ID NO: 6726 - RNA, 1131 nt, synthetic construct
  misc_feature 1..1131: note = derived and/or modified sequence opt4 fromThymidine_Kinase_TK__Herpes_Simplex_Virus_1_(HSV-1)__AC B59255
  source 1..1131: mol_type = other RNA
atggccagctaccccggccaccagcacgccagcgccttcgaccaggccgccagaagcagaggccacagcaacagaagaaccgccctgagacccagaagacagcaggaggccaccgaggtgcacctggagcagaagatgcccaccctgctgagagtgtacatcgacggcccccacggcatgggcaagaccaccaccacccagctgctggtggccctgggcagcagagacgacatcgtgtacgtgcccgagcccatgacctactggagagtgctgggcgccagcgagaccatcgccaacatctacaccacccagcacagactggaccagggcgagatcagcgccggcgacgccgccgtggtgatgaccagcgcccagatcaccatgggcatgccctacgccgtgaccgacgccgtgctggccccccacatcggcggcgaggccggcagcagccacgcccccccccccgccctgaccctgatcttcgacagacaccccatcgccgccctgctgtgctaccccgccgccagatacctgatgggcaacatgaccccccaggccgtgctggccttcgtggtgctgatcccccccaccctgcccggcaccaacatcgtgctgggcgccctgcccgaggacagacacatcgacagactggccaagagacagagacccggcgagagactggacctggccatgctggccgccatcagaagagtgtacggcctgctggccaacaccgtgagatacctgcagtgcggcggcagctggagagaggactggggccagctgagcggcaccgccctgaccccccagggcgccgagccccagagcaacgccggccccagaccccacatcggcgagaccctgttcaccctgttcagagcccccgagctgctggcccccaacggcgacctgtacaacgtgttcgcctgggccctggacgtgctggccaagagactgagacccatgcacgtgttcatcctggactacgaccagagccccgccggctgcagagacgccctgctgcagctgaccagcggcatggtgcagacccacgtgaccacccccggcagcatccccaccatctgcgacctggccagaaccttcgccagagagatgggcgaggccaactga

SEQ ID NO: 6727 - RNA, 1131 nt, synthetic construct
  misc_feature 1..1131: note = derived and/or modified sequence opt5 fromThymidine_Kinase_TK__Herpes_Simplex_Virus_1_(HSV-1)__AC B59255
  source 1..1131: mol_type = other RNA
atggccagctaccccggccaccagcatgcttccgccttcgaccaagcggctagatctcgggggcacagcaaccgcagaaccgccctgcggcctcgcagacagcaggaggccacagaagtgcatctcgagcagaagatgccgacgctgcttcgggtctatatcgatggaccccacggcatggggaaaaccacaaccacacaactgctcgttgctctgggatcccgcgacgatattgtgtacgtgcctgaacccatgacctattggagagtccttggcgcctctgagacaatcgctaatatttacaccacgcagcatcggctggaccagggggaaatcagcgccggagatgcggccgtggttatgacctccgctcagattacaatgggcatgccttatgccgtgaccgacgctgtcctcgcgccccacatcggcggggaggccggatctagccacgcccctccgcccgctctgacactgatctttgatcgccatcctattgccgctctcctgtgctaccccgccgccagatatcttatgggcaacatgacccctcaagctgtgctggcgttcgttgtgctcattcccccgacgctgcctgggacaaatatcgtccttggagccctgcccgaggaccggcacatcgatcgcctcgctaagagacagcggcctggcgaacgcctggacctggccatgctcgccgctattagacgggtgtacgggctgcttgccaacaccgtgagatacctgcagtgtggaggctcctggcgcgaggattggggccagctcagcgggacagcgctgacaccccaaggagctgaaccccagtctaatgccggccctcggccgcatatcggggagaccctttttaccctgttcagagcccccgagctcctggctcctaacggagacctgtataatgtctttgcctgggctctcgatgttctggccaaacgccttcggcccatgcacgtgttcattctggactacgaccagtcccctgcgggctgcagagatgccctcctgcaacttacgagcgggatggtgcagacccacgtcacaacccccggatctatcccgacaatctgtgacctggctcgcacctttgcccgggaaatgggcgaggctaactga

SEQ ID NO: 6728 - RNA, 1131 nt, synthetic construct
  misc_feature 1..1131: note = derived and/or modified sequence opt6 fromThymidine_Kinase_TK__Herpes_Simplex_Virus_1_(HSV-1)__AC B59255
  source 1..1131: mol_type = other RNA
atggcatcatacccaggacaccaacacgccagtgcttttgatcaagctgcaagaagtagaggacattcaaatagaagaactgcattaagaccaagaagacaacaagaagcaacagaagtacatttagaacaaaaaatgcctacactattaagagtatatatcgatggacctcatggaatgggtaaaactactacaacacaattactagtagctctaggcagtagagatgacattgtatatgtaccagaacctatgacatattggagagtactaggagcatcagaaacaatagcaaacatttatacaacacaacatagactcgatcaaggagaaataagcgcaggcgatgcagcagtagtaatgacatctgcacaaattactatgggaatgccctatgccgtaacagacgctgtactagcccctcatattggtggagaagcgggaagctcacatgcaccaccaccagcactcaccttaatatttgacagacatccaattgcagcattattatgttatccagcagcaagatatctaatgggaaatatgactccacaagcagtattagcattcgttgtactaatacctccaacattaccaggaacaaacatagttttaggagcattacctgaagatagacacatagatagattagcaaaaagacaaagaccaggagaacgactagacctagcaatgctagcagcaataagaagagtatatggtttattagcaaatacagtacgatatcttcaatgtggtggatcatggagagaagattggggacaattaagtggaaccgcattaacaccacaaggagcagaaccacaatcaaacgcaggaccaagaccacacataggcgaaacattattcacattatttagagcaccagaactattagccccaaatggagatctgtataatgtcttcgcttgggcattagatgtattagcaaaaagattaagacctatgcatgtatttatattagactatgatcaaagtccagctggatgtagagacgcattattacaattaacatcaggaatggtacaaactcatgtaacaacacctggaagtatacccacaatatgtgacttagccagaacatttgcacgagaaatgggagaagccaattaa

SEQ ID NO: 6729 - protein, 375 aa, synthetic construct
  REGION 1..375: note Thymidine_Kinase_TK__Herpes_Simplex_Virus_1_(HSV-1)__B2CPQ0
MASYPCHQHASAFDQAARSRGHNNRRTALRPRRQQKATEVRLEQKMPTLLRVYIDGPHGMGKTTTTQLLVALGSRDDIVYVPEPMTYWRVLGASETIANIYTTQHRLDQGEISAGDAAVVMTSAQITMGMPYAVTDAVLAPHIGGEAGSSHAPPPALTLIFDRHPIAALLCYPAARYLMGSMTPQAVLAFVALPPTLPGTNIVLGALPEDRHIDRLAKRQRPGERLDLAMLAAIRRVYELLANTVRYLQGGGSWREDWGQLSGTAVPPQGAEPQSNAGPQPHIGDTLFTLFRAPELLAPNGDLYNVFAWALDVLAKRLRPMHVFILDYDQSPAGCRDALLQLTSGMVQTHVTTPGSIPTICDLARTFAREMGEAN

SEQ ID NO: 6730 - RNA, 1128 nt, synthetic construct
  misc_feature 1..1128: note Thymidine_Kinase_TK__Herpes_Simplex_Virus_1_(HSV-1)__ACB592 56
  source 1..1128: mol_type = other RNA
atggcttcgtacccctgccatcaacacgcgtctgcgttcgaccaggctgcgcgttctcgcggccataacaaccgacgtacggcgttgcgccctcgccggcagcaaaaagccacggaagtccgcctggagcagaaaatgcccacgctactgcgggtttatatagacggtccccacgggatggggaaaaccaccaccacgcaactgctggtggccctgggttcgcgcgacgatatcgtctacgtacccgagccgatgacttactggcgggtgctgggggcttccgagacaatcgcgaacatctacaccacacaacaccgcctcgaccagggtgagatatcggccggggacgcggcggtggtaatgacaagcgcccagataacaatgggcatgccttatgccgtgaccgacgccgttctggctcctcatatcgggggggaggctgggagctcacatgccccgcccccggccctcaccctcatcttcgaccgccatcccatcgccgccctcctgtgttacccggccgcgcgataccttatgggcagcatgaccccccaggccgtgctggcgttcgtggccctcccgccgaccttgcccggcacaaacatcgtgttgggggcccttccggaggacagacacatcgaccgcctggccaaacgccagcgccccggcgagcggcttgacctggctatgctggccgcgattcgccgcgtttacgagctgcttgccaatacggtgcggtatctgcagggcggcgggtcgtggcgggaggattggggacagctttcggggacggccgtgccgccccagggtgccgagccccagagcaacgcgggcccacaaccccatatcggggacacgttatttaccctgtttcgggcccccgagttgctggcccccaacggcgacctgtataacgtgtttgcctgggccttggacgtcttggccaaacgcctccgtcccatgcacgtctttatcctggattacgaccaatcgcccgccggctgccgggacgccctgctgcaacttacctccgggatggtccagacccacgtcaccacccccggctccataccgacgatctgcgacctggcgcgcacgtttgcccgggagatgggggaggctaactaa

SEQ ID NO: 6731 - RNA, 1128 nt, synthetic construct
  misc_feature 1..1128: note = derived and/or modified sequence opt1 fromThymidine_Kinase_TK__Herpes_Simplex_Virus_1_(HSV-1)__AC B59256
  source 1..1128: mol_type = other RNA
atggccagctacccctgccaccagcacgcctccgcgttcgaccaggccgcccgcagccggggccacaacaaccgccggaccgccctgcgcccgcggcgccagcagaaggccaccgaggtgcggctcgagcagaagatgcccacgctgctgcgcgtctacatcgacgggccccacggcatggggaagaccaccaccacgcagctcctggtggcgctgggctcccgggacgacatcgtgtacgtccccgagccgatgacctactggcgcgtgctcggggccagcgagaccatcgccaacatctacaccacgcagcaccggctggaccagggcgagatctccgccggcgacgcggccgtggtcatgaccagcgcccagatcaccatggggatgccctacgccgtgaccgacgccgtgctggcgccccacatcggcggggaggccggctccagccacgcgcccccgcccgccctcacgctgatcttcgaccgccaccccatcgccgccctgctctgctaccccgccgcccggtacctgatggggtccatgaccccgcaggccgtcctggccttcgtggcgctcccgcccaccctgcccggcaccaacatcgtgctgggcgccctccccgaggaccgccacatcgaccggctggccaagcgccagcggcccggggagcgcctggacctcgccatgctggccgcgatccggcgcgtctacgagctgctcgccaacacggtgcggtacctgcagggcgggggcagctggcgcgaggactggggccagctgtccgggaccgccgtgccgccccagggcgccgagccccagagcaacgcggggccccagccccacatcggcgacaccctcttcaccctgttccgcgcccccgagctgctcgccccgaacggggacctgtacaacgtcttcgcctgggccctggacgtgctcgcgaagcggctgcgccccatgcacgtgttcatcctggactacgaccagtcccccgccggctgccgggacgccctcctgcagctgacgagcggcatggtccagacccacgtgaccacccccgggtccatcccgacgatctgcgacctcgcccgcaccttcgcccgggagatgggcgaggcgaactga

SEQ ID NO: 6732 - RNA, 1128 nt, synthetic construct
  misc_feature 1..1128: note = derived and/or modified sequence opt2 fromThymidine_Kinase_TK__Herpes_Simplex_Virus_1_(HSV-1)__AC B59256
  source 1..1128: mol_type = other RNA
atggcctcctacccctgccaccagcacgcctccgccttcgaccaggccgcccgctcccgcggccacaacaaccgccgcaccgccctccgcccccgccgccagcagaaggccaccgaggtccgcctcgagcagaagatgcccaccctcctccgcgtctacatcgacggcccccacggcatgggcaagaccaccaccacccagctcctcgtcgccctcggctcccgcgacgacatcgtctacgtccccgagcccatgacctactggcgcgtcctcggcgcctccgagaccatcgccaacatctacaccacccagcaccgcctcgaccagggcgagatctccgccggcgacgccgccgtcgtcatgacctccgcccagatcaccatgggcatgccctacgccgtcaccgacgccgtcctcgccccccacatcggcggcgaggccggctcctcccacgcccccccccccgccctcaccctcatcttcgaccgccaccccatcgccgccctcctctgctaccccgccgcccgctacctcatgggctccatgaccccccaggccgtcctcgccttcgtcgccctcccccccaccctccccggcaccaacatcgtcctcggcgccctccccgaggaccgccacatcgaccgcctcgccaagcgccagcgccccggcgagcgcctcgacctcgccatgctcgccgccatccgccgcgtctacgagctcctcgccaacaccgtccgctacctccagggcggcggctcctggcgcgaggactggggccagctctccggcaccgccgtccccccccagggcgccgagccccagtccaacgccggcccccagccccacatcggcgacaccctcttcaccctcttccgcgcccccgagctcctcgcccccaacggcgacctctacaacgtcttcgcctgggccctcgacgtcctcgccaagcgcctccgccccatgcacgtcttcatcctcgactacgaccagtcccccgccggctgccgcgacgccctcctccagctcacctccggcatggtccagacccacgtcaccacccccggctccatccccaccatctgcgacctcgcccgcaccttcgcccgcgagatgggcgaggccaactga

SEQ ID NO: 6733 - RNA, 1128 nt, synthetic construct
  misc_feature 1..1128: note = derived and/or modified sequence opt3 fromThymidine_Kinase_TK__Herpes_Simplex_Virus_1_(HSV-1)__AC B59256
  source 1..1128: mol_type = other RNA
atggccagctacccctgccaccagcatgcttccgcattcgaccaagccgcgagatctaggggccacaacaatcggcgcaccgctctgcgacctcgtagacagcagaaggccacagaggtgaggctcgaacagaaaatgccaactcttctgcgggtctatatcgatgggccgcatggaatgggtaagacgaccacaactcaattgttagttgcactgggctcacgcgacgatattgtgtacgtacccgagcctatgacctattggagagtgctaggggccagtgaaacaatagctaacatctacaccactcagcacaggctcgaccagggagagattagcgcaggcgatgccgctgtcgtgatgacatccgcccagatcaccatgggtatgccatatgcggttacggacgcagtgctggctccccatattgggggagaagctgggtcttcgcacgcccctccacccgcacttactctgatctttgatcggcaccctatagctgccttgctctgttacccagcggcccgctatctgatgggctcaatgaccccgcaagcagtcctggctttcgtggccttaccccctacactcccaggcactaatatcgtactgggagcccttcccgaggaccgacatattgatagattggccaaaaggcagcggcctggtgagcgtctggacctagcaatgctcgccgctatccgcagagtttacgaactgcttgcgaacaccgtgaggtacctgcagggcgggggaagctggcgggaggattggggccagttgagtggtacagcagtcccaccccaaggggccgaaccgcagtccaatgctggacctcagccccacattggcgacaccctctttacgctgttccgagccccagagttactggcacctaacggcgatctctataatgtgtttgcctgggctcttgacgtgctggccaagcgcttgagacccatgcatgtcttcatcctagactacgatcaatctccagcagggtgcagggacgcgctgctccagctgactagcggaatggttcagacacacgtgaccactcccggttccatacctacaatttgtgatcttgctcggacctttgcccgcgagatgggcgaagcaaactga

SEQ ID NO: 6734 - RNA, 1128 nt, synthetic construct
  misc_feature 1..1128: note = derived and/or modified sequence opt4 fromThymidine_Kinase_TK__Herpes_Simplex_Virus_1_(HSV-1)__AC B59256
  source 1..1128: mol_type = other RNA
atggccagctacccctgccaccagcacgccagcgccttcgaccaggccgccagaagcagaggccacaacaacagaagaaccgccctgagacccagaagacagcagaaggccaccgaggtgagactggagcagaagatgcccaccctgctgagagtgtacatcgacggcccccacggcatgggcaagaccaccaccacccagctgctggtggccctgggcagcagagacgacatcgtgtacgtgcccgagcccatgacctactggagagtgctgggcgccagcgagaccatcgccaacatctacaccacccagcacagactggaccagggcgagatcagcgccggcgacgccgccgtggtgatgaccagcgcccagatcaccatgggcatgccctacgccgtgaccgacgccgtgctggccccccacatcggcggcgaggccggcagcagccacgcccccccccccgccctgaccctgatcttcgacagacaccccatcgccgccctgctgtgctaccccgccgccagatacctgatgggcagcatgaccccccaggccgtgctggccttcgtggccctgccccccaccctgcccggcaccaacatcgtgctgggcgccctgcccgaggacagacacatcgacagactggccaagagacagagacccggcgagagactggacctggccatgctggccgccatcagaagagtgtacgagctgctggccaacaccgtgagatacctgcagggcggcggcagctggagagaggactggggccagctgagcggcaccgccgtgcccccccagggcgccgagccccagagcaacgccggcccccagccccacatcggcgacaccctgttcaccctgttcagagcccccgagctgctggcccccaacggcgacctgtacaacgtgttcgcctgggccctggacgtgctggccaagagactgagacccatgcacgtgttcatcctggactacgaccagagccccgccggctgcagagacgccctgctgcagctgaccagcggcatggtgcagacccacgtgaccacccccggcagcatccccaccatctgcgacctggccagaaccttcgccagagagatgggcgaggccaactga

SEQ ID NO: 6735 - RNA, 1128 nt, synthetic construct
  misc_feature 1..1128: note = derived and/or modified sequence opt5 fromThymidine_Kinase_TK__Herpes_Simplex_Virus_1_(HSV-1)__AC B59256
  source 1..1128: mol_type = other RNA
atggccagctacccctgccaccagcatgcttccgccttcgaccaagcggctagatctcggggccacaacaatcgcagaaccgccctgcggcctcgcagacagcagaaggccacagaggtgcggctcgaacagaaaatgccgacgctgcttcgcgtctatatcgatgggccccatggaatgggcaagaccacaaccacacaactgctcgttgctctggggagcagagacgatattgtgtacgtgcctgagcccatgacctattggcgggtccttggagcctccgaaacaatcgctaacatttacaccacgcagcaccgcctggaccagggcgagatctctgccggggatgcggccgtggttatgaccagcgctcagattacaatgggaatgccttatgccgtgaccgacgctgtcctcgcgccccatatcggcggcgaagccgggtcctctcacgcccctccgcccgctctgacactgatctttgatagacaccctattgccgctctcctgtgttaccccgccgcccggtatcttatgggaagcatgacccctcaagctgtgctggcgttcgttgccctgcccccgacgctccctggcacaaatatcgtgcttggggctctgcccgaggaccgccatattgatagactcgccaaacggcagcgccctggagagagactggacctggccatgctcgctgccatccggagagtctacgaactgcttgcgaacaccgtgcgctacctgcagggcgggggatcctggcgggaggattggggccagctcagcggcacagctgtgcctccccaaggggccgaaccccagtctaatgccggaccgcagccccacattggcgacaccctgtttacccttttcagagctcctgagctgctcgcccccaacggggatctgtataatgtctttgcttgggccctggacgttctcgcgaagcgcctgcggcctatgcatgtgttcatccttgactacgatcaatcccccgccggatgcagagacgctctgctccagctgacaagcggcatggtgcagacgcacgtcaccacaccggggtctattcctaccatctgtgatcttgcccgcacatttgctcgggagatgggagaagccaactga

SEQ ID NO: 6736 - RNA, 1128 nt, synthetic construct
  misc_feature 1..1128: note = derived and/or modified sequence opt6 fromThymidine_Kinase_TK__Herpes_Simplex_Virus_1_(HSV-1)__AC B59256
  source 1..1128: mol_type = other RNA
atggcttcatatccatgtcatcaacatgcatccgcatttgatcaagcagcaagatcaagaggacataataatcgaagaacagcccttagaccaagaagacaacaaaaagctacagaagttagattagaacaaaaaatgccaacattattaagagtatatatagatggaccacatggtatgggtaaaactacaacaacacaattactcgttgcattaggatcaagggacgacatagtatacgtaccagaaccaatgacatactggagagtactcggcgctagtgaaacgattgctaatatatatacaacacaacacagattagaccaaggagaaatatcagcaggagatgcagcagtagttatgacatcagctcaaataacaatgggtatgccatatgcagtaacagatgcggtcctagcaccacatattggcggcgaagctggatcatcacacgcaccaccaccagcattaacattaatatttgatagacatccaatagccgcattattatgttatccagcagctagatatctaatgggatccatgacaccacaagcagtattagcttttgtagcattaccacctactttaccagggacaaatatagttctaggtgctttaccagaagatagacatatagatagactagcaaaaagacaacgaccaggagaaagattagatttagcaatgttagcagcaataagaagagtttacgaactattagcaaatacagttagatatctacaaggaggaggatcatggagagaagattggggacaattatctggaacagcagtaccaccacaaggagcagaaccacaatccaatgcaggacctcaaccacatataggagatacactatttacattattcagagcaccagaattattagcaccaaatggtgatctatataatgtttttgcatgggctctagatgtattagcaaaaagattaagaccaatgcatgtatttatattagattatgatcaatcaccagctggttgtagagatgcactactacaattaacatcaggtatggttcaaactcacgttaccacaccaggcagtataccaacaatatgtgatctagcaagaacatttgcacgagaaatgggagaagcaaattaa

SEQ ID NO: 6737 - protein, 227 aa, synthetic construct
  REGION 1..227: note Thymidine_Kinase_TK__Herpes_Simplex_Virus_1_(HSV-1)__B2CPQ2
MASYPGHQHASAFDQAARSRGHSNRRTALRPRRQQEATEVRPEQKMPTLLRVYIDGPHGMGKTTTTQLLVALGSRDDIVYVPEPMTYWQVLGASETIANIYTTQHRLDQGEISAGDAAVVMTSAQITMGMPYAVTDAVLAPHIGGGGWELTCPAPGPHPHLRPPSHRRPPVLPGRAIPYGQHDPPGRAGVRGPHPADLARHKHRVGGPSGGQTHRPPGQTPAPRRAA

SEQ ID NO: 6738 - RNA, 684 nt, synthetic construct
  misc_feature 1..684: note Thymidine_Kinase_TK__Herpes_Simplex_Virus_1_(HSV-1)__ACB592 58
  source 1..684: mol_type = other RNA
atggcttcgtaccccggccatcagcacgcgtctgcgttcgaccaggctgcgcgttctcgcggccatagcaaccgacgtacggcgttgcgccctcgccggcagcaagaagccacggaagtccgcccggagcagaaaatgcccacgctactgcgggtttatatagacggtccccacgggatggggaaaaccaccaccacgcaactgctggtggccctgggttcgcgcgacgatatcgtctacgtacccgagccgatgacttactggcaggtgctgggggcttccgagacaatcgcgaacatctacaccacacaacaccgcctcgaccagggtgagatatcggccggggacgcggcggtggtaatgacaagcgcccagataacaatgggcatgccttatgccgtgaccgacgccgttctggctcctcatatcggggggggaggctgggagctcacatgccccgcccccggccctcaccctcatcttcgaccgccatcccatcgccgccctcctgtgttacccggccgcgcgataccttatgggcagcatgaccccccaggccgtgctggcgttcgtggccctcatcccgccgaccttgcccggcacaaacatcgtgttgggggcccttccggaggacagacacatcgaccgcctggccaaacgccagcgccccggcgagcggcttga

SEQ ID NO: 6739 - RNA, 684 nt, synthetic construct
  misc_feature 1..684: note = derived and/or modified sequence opt1 fromThymidine_Kinase_TK__Herpes_Simplex_Virus_1_(HSV-1)__AC B59258
  source 1..684: mol_type = other RNA
atggccagctaccccggccaccagcacgcctccgccttcgaccaggccgcccgcagccgggggcactccaaccgccggaccgccctgcgcccgcggcgccagcaggaggccaccgaggtgcggcccgagcagaagatgcccacgctcctgcgcgtgtacatcgacggcccccacgggatgggcaagaccaccaccacgcagctgctcgtggcgctggggagccgggacgacatcgtgtacgtcccggagcccatgacctactggcaggtcctgggcgcctccgagaccatcgccaacatctacaccacgcagcaccgcctcgaccagggcgagatcagcgccggggacgcggccgtggtgatgacctccgcccagatcaccatgggcatgccctacgccgtgaccgacgccgtgctggcgccccacatcgggggcgggggctgggagctgacgtgcccggcccccggcccccacccccacctccggccgcccagccaccgccggccgcccgtcctgcccgggcgcgccatcccctacggccagcacgacccgcccgggcgggccggcgtgcgcggcccccaccccgccgacctggcgcggcacaagcaccgcgtcgggggcccctccgggggccagacccaccggcccccggggcagacccccgcgccccgccgggccgcctga

SEQ ID NO: 6740 - RNA, 684 nt, synthetic construct
  misc_feature 1..684: note = derived and/or modified sequence opt2 fromThymidine_Kinase_TK__Herpes_Simplex_Virus_1_(HSV-1)__AC B59258
  source 1..684: mol_type = other RNA
atggcctcctaccccggccaccagcacgcctccgccttcgaccaggccgcccgctcccgcggccactccaaccgccgcaccgccctccgcccccgccgccagcaggaggccaccgaggtccgccccgagcagaagatgcccaccctcctccgcgtctacatcgacggcccccacggcatgggcaagaccaccaccacccagctcctcgtcgccctcggctcccgcgacgacatcgtctacgtccccgagcccatgacctactggcaggtcctcggcgcctccgagaccatcgccaacatctacaccacccagcaccgcctcgaccagggcgagatctccgccggcgacgccgccgtcgtcatgacctccgcccagatcaccatgggcatgccctacgccgtcaccgacgccgtcctcgccccccacatcggcggcggcggctgggagctcacctgccccgcccccggcccccacccccacctccgccccccctcccaccgccgcccccccgtcctccccggccgcgccatcccctacggccagcacgacccccccggccgcgccggcgtccgcggcccccaccccgccgacctcgcccgccacaagcaccgcgtcggcggcccctccggcggccagacccaccgcccccccggccagacccccgccccccgccgcgccgcctga

SEQ ID NO: 6741 - RNA, 684 nt, synthetic construct
  misc_feature 1..684: note = derived and/or modified sequence opt3 fromThymidine_Kinase_TK__Herpes_Simplex_Virus_1_(HSV-1)__AC B59258
  source 1..684: mol_type = other RNA
atggccagctaccccggccaccagcatgcttccgcattcgaccaagccgcgagatctagggggcactcaaaccggcgcaccgctctgcgacctcgtagacagcaggaggccacagaagtgaggccagagcagaagatgccgactctccttcgggtctatatcgatggaccccatggtatgggcaaaacgaccacaactcaactgttggttgcattagggagtcgcgacgatattgtgtacgtacctgaaccaatgacctattggcaagtgctgggagccagcgagacaatagctaatatctacaccactcagcacagactagaccagggcgaaatttccgccggtgatgcagctgtcgtgatgacatctgcccagatcaccatggggatgccctatgcggttacggacgcagtgctcgcccctcatattggaggcggcgggtgggagctgacttgcccagctcccggacctcacccacaccttaggccgccctcgcatcggcgccctccagtcctgcccggtcgagccatcccttacggccagcacgatccacccgggagagcaggagtgaggggcccgcatcctgctgacttggcccggcacaagcaccgtgtaggtgggccctcaggaggccagacccatcgcccacctggccagacacccgcgccaagaagggccgcatga

SEQ ID NO: 6742 - RNA, 684 nt, synthetic construct
  misc_feature 1..684: note = derived and/or modified sequence opt4 fromThymidine_Kinase_TK__Herpes_Simplex_Virus_1_(HSV-1)__AC B59258
  source 1..684: mol_type = other RNA
atggccagctaccccggccaccagcacgccagcgccttcgaccaggccgccagaagcagaggccacagcaacagaagaaccgccctgagacccagaagacagcaggaggccaccgaggtgagacccgagcagaagatgcccaccctgctgagagtgtacatcgacggcccccacggcatgggcaagaccaccaccacccagctgctggtggccctgggcagcagagacgacatcgtgtacgtgcccgagcccatgacctactggcaggtgctgggcgccagcgagaccatcgccaacatctacaccacccagcacagactggaccagggcgagatcagcgccggcgacgccgccgtggtgatgaccagcgcccagatcaccatgggcatgccctacgccgtgaccgacgccgtgctggccccccacatcggcggcggcggctgggagctgacctgccccgcccccggcccccacccccacctgagaccccccagccacagaagaccccccgtgctgcccggcagagccatcccctacggccagcacgacccccccggcagagccggcgtgagaggcccccaccccgccgacctggccagacacaagcacagagtgggcggccccagcggcggccagacccacagaccccccggccagacccccgcccccagaagagccgcctga

SEQ ID NO: 6743 - RNA, 684 nt, synthetic construct
  misc_feature 1..684: note = derived and/or modified sequence opt5 fromThymidine_Kinase_TK__Herpes_Simplex_Virus_1_(HSV-1)__AC B59258
  source 1..684: mol_type = other RNA
atggccagctaccccggccaccagcatgcttccgccttcgaccaagcggctagatctcgggggcacagcaaccgcagaaccgccctgcggcctcgcagacagcaggaggccacagaagtgcggccggagcagaagatgcccacgctcctgcgcgtctatatcgatggacctcatggcatggggaaaaccacaaccacacaacttctggttgctctcggatccagagacgatattgtgtacgtgcccgaacctatgacctattggcaggtcctgggcgcctctgagacaatcgctaatatttacaccacgcagcaccggcttgaccagggggaaatcagcgccggagatgcggccgtggttatgacctccgctcaaattacaatgggcatgccctatgccgtgaccgacgctgtcctggcccctcatatcggcgggggaggctgggagctcacatgcccggcgcccgggcctcacccccatctgcgccctccctctcacagacggccgcctgtgctgcccggacgcgccatcccttacggccagcacgatcctcccgggagagctggagttcggggcccccatccggccgacctcgctcgccacaagcacagagtgggcgggcccagcggaggccagacccatcggcctcccgggcagacgcctgcccccagacgcgccgcttga

SEQ ID NO: 6744 - RNA, 684 nt, synthetic construct
  misc_feature 1..684: note = derived and/or modified sequence opt6 fromThymidine_Kinase_TK__Herpes_Simplex_Virus_1_(HSV-1)__AC B59258
  source 1..684: mol_type = other RNA
atggcatcatatccaggacatcaacatgcaagcgcatttgatcaagcagcaagaagcagaggacattcaaatcgaagaacagctttaagaccaagaagacaacaagaagcaacagaagtaagaccagaacaaaaaatgccaacattactaagagtttatatagatggtccccatggaatgggtaaaacaactactacacaattattagtagcattaggatcaagagatgatatagtatacgttccagaaccaatgacatattggcaagtattaggagcatcagaaacaatcgcaaatatatacaccacacaacatagattagatcaaggagaaataagtgcaggtgatgcagcagtagttatgacaagtgctcaaataactatgggaatgccatatgcagtaacagatgcagtattagcaccacatataggaggaggaggatgggaattaacatgtccagcaccaggaccacatccacatttaagaccaccctctcatagaagaccaccagttctaccaggaagagcaataccatatggacaacatgacccaccaggaagagcaggagtaagaggaccacatccagcagatttagcacgacataaacacagagttggaggaccatcaggaggacaaactcatcgcccacctggacaaacaccagcaccaagaagagcagcataa

SEQ ID NO: 6745 - protein, 227 aa, synthetic construct
  REGION 1..227: note Thymidine_Kinase_TK__Herpes_Simplex_Virus_1_(HSV-1)__B2CPQ3
MASYPGHQHASAFDQAARSRGHSNRRTALRPRRQQEATEVRPEQKMPTLLRVYIDGPHGMGKTTTTQLLVALGSRDDIVYVPEPMTYWRVLGASETIANIYTTQHRLDQGEISAGDAAVVMTSAQITMGMPYAVTDAVLAPHIGGGGWELTCPAPGPHPHLRPPSHRRPPVLPGRAIPYGQHDPPGRAGVRGPHPADLARHKHRVGGPSGGQTHRPPGQTPAPRRAA

SEQ ID NO: 6746 - RNA, 684 nt, synthetic construct
  misc_feature 1..684: note Thymidine_Kinase_TK__Herpes_Simplex_Virus_1_(HSV-1)__ACB592 59
  source 1..684: mol_type = other RNA
atggcttcgtaccccggccatcaacacgcgtctgcgttcgaccaggctgcgcgttctcgcggccatagcaaccgacgtacggcgttgcgccctcgccggcagcaagaagccacggaagtccgcccggagcagaaaatgcccacgctactgcgggtttatatagacggtccccacgggatggggaaaaccaccaccacgcaactgctggtggccctgggttcgcgcgacgatatcgtctacgtacccgagccgatgacttactggcgggtgctgggggcttccgagacaatcgcgaacatctacaccacacaacaccgcctcgaccagggtgagatatcggccggggacgcggcggtggtaatgacaagcgcccagataacaatgggcatgccttatgccgtgaccgacgccgttctggctcctcatatcggggggggaggctgggagctcacatgccccgcccccggccctcaccctcatcttcgaccgccatcccatcgccgccctcctgtgttacccggccgcgcgataccttatgggcagcatgaccccccaggccgtgctggcgttcgtggccctcatcccgccgaccttgcccggcacaaacatcgtgttgggggcccttccggaggacagacacatcgaccgcctggccaaacgccagcgccccggcgagcggcttga

SEQ ID NO: 6747 - RNA, 684 nt, synthetic construct
  misc_feature 1..684: note = derived and/or modified sequence opt1 fromThymidine_Kinase_TK__Herpes_Simplex_Virus_1_(HSV-1)__AC B59259
  source 1..684: mol_type = other RNA
atggccagctaccccggccaccagcacgcctccgccttcgaccaggccgcccgcagccgggggcactccaaccgccggaccgccctgcgcccgcggcgccagcaggaggccaccgaggtgcggcccgagcagaagatgcccacgctcctgcgcgtgtacatcgacggcccccacgggatgggcaagaccaccaccacgcagctgctcgtggcgctggggagccgggacgacatcgtgtacgtcccggagcccatgacctactggcgcgtgctgggcgcctccgagaccatcgccaacatctacaccacgcagcaccggctcgaccagggcgagatcagcgccggggacgcggccgtggtcatgacctccgcccagatcaccatgggcatgccctacgccgtgaccgacgccgtgctggcgccccacatcgggggcgggggctgggagctgacgtgcccggcccccggcccccacccccacctccgcccgcccagccaccggcgcccgcccgtcctgcccgggcgggccatcccctacggccagcacgacccgcccgggcgcgccggcgtgcggggcccccaccccgccgacctggcgcgccacaagcaccgggtcgggggcccctccgggggccagacccaccggcccccggggcagacccccgcgccccgccgcgccgcctga

SEQ ID NO: 6748 - RNA, 684 nt, synthetic construct
  misc_feature 1..684: note = derived and/or modified sequence opt2 fromThymidine_Kinase_TK__Herpes_Simplex_Virus_1_(HSV-1)__AC B59259
  source 1..684: mol_type = other RNA
atggcctcctaccccggccaccagcacgcctccgccttcgaccaggccgcccgctcccgcggccactccaaccgccgcaccgccctccgcccccgccgccagcaggaggccaccgaggtccgccccgagcagaagatgcccaccctcctccgcgtctacatcgacggcccccacggcatgggcaagaccaccaccacccagctcctcgtcgccctcggctcccgcgacgacatcgtctacgtccccgagcccatgacctactggcgcgtcctcggcgcctccgagaccatcgccaacatctacaccacccagcaccgcctcgaccagggcgagatctccgccggcgacgccgccgtcgtcatgacctccgcccagatcaccatgggcatgccctacgccgtcaccgacgccgtcctcgccccccacatcggcggcggcggctgggagctcacctgccccgcccccggcccccacccccacctccgccccccctcccaccgccgcccccccgtcctccccggccgcgccatcccctacggccagcacgacccccccggccgcgccggcgtccgcggcccccaccccgccgacctcgcccgccacaagcaccgcgtcggcggcccctccggcggccagacccaccgcccccccggccagacccccgccccccgccgcgccgcctga

SEQ ID NO: 6749 - RNA, 684 nt, synthetic construct
  misc_feature 1..684: note = derived and/or modified sequence opt3 fromThymidine_Kinase_TK__Herpes_Simplex_Virus_1_(HSV-1)__AC B59259
  source 1..684: mol_type = other RNA
atggccagctaccccggccaccagcatgcttccgcattcgaccaagccgcgagatctagggggcactcaaaccggcgcaccgctctgcgacctcgtagacagcaggaggccacagaagtgaggccagagcagaagatgccgactctccttcgggtctatatcgatggaccccatggtatgggcaaaacgaccacaactcaactgttggttgcattagggagtcgcgacgatattgtgtacgtacctgaaccaatgacctattggagagtgctgggagccagcgagacaatagctaatatctacaccactcagcacaggctagaccagggcgaaatttccgccggtgatgcagctgtcgtgatgacatctgcccagatcaccatggggatgccctatgcggttacggacgcagtgctcgcccctcatattggaggcggcgggtgggagctgacttgcccagctcccggacctcacccacaccttcggccgccctcgcatcgccgacctccagtcctgcccggtagagccatcccttacggccaacacgatccacccgggagggcaggagtgcggggcccgcatcctgctgacttggcccgtcacaagcaccgcgtaggtgggccctcaggaggccagacccatagaccacctggccagacacccgcgccaaggcgggccgcatga

SEQ ID NO: 6750 - RNA, 684 nt, synthetic construct
  misc_feature 1..684: note = derived and/or modified sequence opt4 fromThymidine_Kinase_TK__Herpes_Simplex_Virus_1_(HSV-1)__AC B59259
  source 1..684: mol_type = other RNA
atggccagctaccccggccaccagcacgccagcgccttcgaccaggccgccagaagcagaggccacagcaacagaagaaccgccctgagacccagaagacagcaggaggccaccgaggtgagacccgagcagaagatgcccaccctgctgagagtgtacatcgacggcccccacggcatgggcaagaccaccaccacccagctgctggtggccctgggcagcagagacgacatcgtgtacgtgcccgagcccatgacctactggagagtgctgggcgccagcgagaccatcgccaacatctacaccacccagcacagactggaccagggcgagatcagcgccggcgacgccgccgtggtgatgaccagcgcccagatcaccatgggcatgccctacgccgtgaccgacgccgtgctggccccccacatcggcggcggcggctgggagctgacctgccccgcccccggcccccacccccacctgagaccccccagccacagaagaccccccgtgctgcccggcagagccatcccctacggccagcacgacccccccggcagagccggcgtgagaggcccccaccccgccgacctggccagacacaagcacagagtgggcggccccagcggcggccagacccacagaccccccggccagacccccgcccccagaagagccgcctga

SEQ ID NO: 6751 - RNA, 684 nt, synthetic construct
  misc_feature 1..684: note = derived and/or modified sequence opt5 fromThymidine_Kinase_TK__Herpes_Simplex_Virus_1_(HSV-1)__AC B59259
  source 1..684: mol_type = other RNA
atggccagctaccccggccaccagcatgcttccgccttcgaccaagcggctagatctcgggggcacagcaaccgcagaaccgccctgcggcctcgcagacagcaggaggccacagaagtgcggccggagcagaagatgcccacgctcctgcgcgtctatatcgatggacctcatggcatggggaaaaccacaaccacacaacttctggttgctctcggatccagagacgatattgtgtacgtgcccgaacctatgacctattggcgggtcctgggcgcctctgagacaatcgctaatatttacaccacgcagcaccgccttgaccagggggaaatcagcgccggagatgcggccgtggttatgacctccgctcagattacaatgggcatgccctatgccgtgaccgacgctgtcctggcccctcatatcggcgggggaggctgggagctcacatgcccggcgcccgggcctcacccccacctgagacctccctctcatcggcgcccgcctgtgctgcccggacgcgccatcccttacggccaacacgatcctcccgggcgggctggagttcgcggcccccatccggccgacctcgctagacacaagcaccgggtgggcgggcccagcggaggccagacccatagacctcccgggcagacgcctgcccccagacgggccgcttga

SEQ ID NO: 6752 - RNA, 684 nt, synthetic construct
  misc_feature 1..684: note = derived and/or modified sequence opt6 fromThymidine_Kinase_TK__Herpes_Simplex_Virus_1_(HSV-1)__AC B59259
  source 1..684: mol_type = other RNA
atggcatcatatccaggtcaccaacacgcttcagcatttgatcaagcagcaagatcaagaggacatagtaatagaagaacagcattaagaccaagaagacaacaagaagcaacagaagtaagaccagaacaaaaaatgccaacattactaagagtatatatagatggacctcacggaatgggtaaaacaacaacaacacaattattagtagcactaggatcaagagatgatatagtatatgtaccagaaccaatgacatattggagagtactaggagcatcagaaacaatagcaaatatatatacaacacaacatagactagatcaaggagaaatatcagcaggtgacgcagcagtagtaatgacaagcgcacaaataacaatgggaatgccatatgcagtaacagatgctgtattagcaccacatataggaggaggaggatgggaattaacatgtccagcaccaggacctcaccctcatctaagaccaccatcacataggagaccaccagtattaccaggaagagcaataccatatggacaacatgatccaccaggaagagcaggtgtaagaggaccacatccagcagatttagcaagacataaacatagagtaggtgggccaagcggaggacaaacacatcgaccaccaggtcaaacaccagctccaagaagggcagcataa

SEQ ID NO: 6753 - protein, 376 aa, synthetic construct
  REGION 1..376: note Thymidine_Kinase_TK__Herpes_Simplex_Virus_1_(HSV-1)__B2CPQ4
MASYPGHQHASAFDQAARSRGHSNRRTALRPRRQQEATEVRLEQKMPTLLRVYIDGPHGMGKTTTTQLLVALGSRDDSVYVPEPMTYWRVLGASETIANIYTTQHRLDQGEISAGDAAVVMTSAQITMGMPYAVTDAVLAPHIGGEAGSSHAPPPALTLIFDRHPIAALLCYPAARYLMGSMTPQAVLAFVVLIPPTLPGTNIVLGALPEDRHIDRLAKRQRPGERLDLAMLAAIRRVYGLLANTVRYLQCGGSWREDWGQLSGTALTPQGAEPQSNAGPRPHIGETLFTLFRAPELLAPNGDLYNVFAWALDVLAKRLRPMHVFILDYDQSPAGCRDALLQLTSGMVQTHVTTPGSIPTICDLARTFAREMGEAN

SEQ ID NO: 6754 - RNA, 1131 nt, synthetic construct
  misc_feature 1..1131: note Thymidine_Kinase_TK__Herpes_Simplex_Virus_1_(HSV-1)__ACB592 60
  source 1..1131: mol_type = other RNA
atggcttcgtaccccggccatcaacacgcgtctgcgttcgaccaggctgcgcgttctcgcggccatagcaaccgacgtacggcgttgcgccctcgccggcagcaagaagccacggaagtccgcctggagcagaaaatgcccacgctactgcgggtttatatagacggtcctcacgggatggggaaaaccaccaccacgcaactgctggtggccctgggttcgcgcgacgatagcgtctacgtacccgagccgatgacttactggcgggtgctgggggcttccgagacaatcgcgaacatctacaccacacaacaccgcctcgaccagggtgagatatcggccggggacgcggcggtggtaatgacaagcgcccagataacaatgggcatgccttatgccgtgaccgacgccgttctggctcctcatatcgggggggaggctgggagctcacatgccccgcccccggccctcaccctcatcttcgaccgccatcccatcgccgccctcctgtgctacccggccgcgcggtaccttatgggcagcatgaccccccaggccgtgctggcgttcgtggtcctcatcccgccgaccttgcccggcacaaacatcgtgttgggggcccttccggaggacagacacatcgaccgcctggccaaacgccagcgccccggtgagcggcttgacctggctatgctggccgcgattcgccgcgtttacgggctacttgccaatacggtgcggtatctgcagtgcggcgggtcgtggcgggaggattggggacagctttcggggacggccttgacgccccagggtgccgagccccagagcaacgcgggcccacgaccccatatcggggaaacgttatttaccctgtttcgggcccccgagttgctggcccccaacggcgacctgtacaacgtgtttgcctgggccttggacgtcttggccaaacgcctccgtcccatgcacgtctttatcctggattacgaccaatcgcccgccggctgccgggacgccctgctgcaacttacctccgggatggtccagacccatgtcaccaccccaggctccataccgacgatctgcgacctggcgcgcacgtttgcccgggagatgggggaggctaactaa

SEQ ID NO: 6755 - RNA, 1131 nt, synthetic construct
  misc_feature 1..1131: note = derived and/or modified sequence opt1 fromThymidine_Kinase_TK__Herpes_Simplex_Virus_1_(HSV-1)__AC B59260
  source 1..1131: mol_type = other RNA
atggccagctaccccggccaccagcacgcctccgcgttcgaccaggccgcccgcagccgggggcactccaaccgccggaccgccctgcgcccgcggcgccagcaggaggccaccgaggtgcggctcgagcagaagatgcccacgctgctgcgcgtctacatcgacggcccccacgggatgggcaagaccaccaccacgcagctcctggtggcgctggggagccgggacgactccgtgtacgtccccgagccgatgacctactggcgcgtgctcggcgccagcgagaccatcgccaacatctacaccacgcagcaccggctggaccagggcgagatctccgccggggacgcggccgtggtcatgaccagcgcccagatcaccatgggcatgccctacgccgtgaccgacgccgtgctggcgccccacatcgggggcgaggccgggtccagccacgcgcccccgcccgccctcacgctgatcttcgaccgccaccccatcgccgccctgctctgctaccccgccgcccggtacctgatgggctccatgaccccgcaggccgtcctggccttcgtggtgctcatcccgcccaccctgcccggcaccaacatcgtcctgggggcgctccccgaggaccgccacatcgaccggctggccaagcgccagcggcccggcgagcgcctggacctcgccatgctggccgccatccggcgcgtgtacgggctgctcgcgaacacggtgcggtacctgcagtgcggcggcagctggcgcgaggactgggggcagctgtccggcaccgccctcacgccccagggggccgagccccagagcaacgccggcccgcgcccccacatcggggagaccctgttcaccctgttccgggcgcccgagctcctggcccccaacggcgacctgtacaacgtcttcgcctgggccctcgacgtgctggccaagcgcctgcggccgatgcacgtgttcatcctcgactacgaccagtcccccgcgggctgccgcgacgccctgctgcagctcaccagcgggatggtccagacccacgtgaccacgcccggctccatccccaccatctgcgacctggcccggaccttcgcccgcgagatgggggaggccaactga

SEQ ID NO: 6756 - RNA, 1131 nt, synthetic construct
  misc_feature 1..1131: note = derived and/or modified sequence opt2 fromThymidine_Kinase_TK__Herpes_Simplex_Virus_1_(HSV-1)__AC B59260
  source 1..1131: mol_type = other RNA
atggcctcctaccccggccaccagcacgcctccgccttcgaccaggccgcccgctcccgcggccactccaaccgccgcaccgccctccgcccccgccgccagcaggaggccaccgaggtccgcctcgagcagaagatgcccaccctcctccgcgtctacatcgacggcccccacggcatgggcaagaccaccaccacccagctcctcgtcgccctcggctcccgcgacgactccgtctacgtccccgagcccatgacctactggcgcgtcctcggcgcctccgagaccatcgccaacatctacaccacccagcaccgcctcgaccagggcgagatctccgccggcgacgccgccgtcgtcatgacctccgcccagatcaccatgggcatgccctacgccgtcaccgacgccgtcctcgccccccacatcggcggcgaggccggctcctcccacgcccccccccccgccctcaccctcatcttcgaccgccaccccatcgccgccctcctctgctaccccgccgcccgctacctcatgggctccatgaccccccaggccgtcctcgccttcgtcgtcctcatcccccccaccctccccggcaccaacatcgtcctcggcgccctccccgaggaccgccacatcgaccgcctcgccaagcgccagcgccccggcgagcgcctcgacctcgccatgctcgccgccatccgccgcgtctacggcctcctcgccaacaccgtccgctacctccagtgcggcggctcctggcgcgaggactggggccagctctccggcaccgccctcaccccccagggcgccgagccccagtccaacgccggcccccgcccccacatcggcgagaccctcttcaccctcttccgcgcccccgagctcctcgcccccaacggcgacctctacaacgtcttcgcctgggccctcgacgtcctcgccaagcgcctccgccccatgcacgtcttcatcctcgactacgaccagtcccccgccggctgccgcgacgccctcctccagctcacctccggcatggtccagacccacgtcaccacccccggctccatccccaccatctgcgacctcgcccgcaccttcgcccgcgagatgggcgaggccaactga

SEQ ID NO: 6757 - RNA, 1131 nt, synthetic construct
  misc_feature 1..1131: note = derived and/or modified sequence opt3 fromThymidine_Kinase_TK__Herpes_Simplex_Virus_1_(HSV-1)__AC B59260
  source 1..1131: mol_type = other RNA
atggccagctaccccggccaccagcatgcttccgcattcgaccaagccgcgagatctagggggcactcaaaccggcgcaccgctctgcgacctcgtagacagcaggaggccacagaagtgaggctcgagcagaagatgccaactcttctgcgggtctatatcgatggaccgcatggtatgggcaaaacgaccacaactcaattgttagttgcactggggagtcgcgacgatagcgtgtacgtacccgaacctatgacctattggagagtgctaggagcctccgagacaattgctaatatatacaccactcagcacaggctcgaccagggcgaaatctctgccggtgatgccgctgtcgtgatgacatcggcccagattaccatggggatgccatatgcggttacggacgcagtgctggcaccccatatcggaggcgaggctggctcaagccacgcccctccacccgcacttactctgatttttgatcggcaccctatcgctgccttgctctgctacccagcggcccgctatctgatggggagtatgaccccgcaagcagtcctggctttcgtggtactcataccccctacattaccaggaactaacatcgttctgggtgcccttcccgaggaccgacatattgatagattggctaagaggcagcggcctggcgaacgtctggacctagccatgctcgcagccatccgcagagtgtacgggctgcttgctaataccgtcaggtacctgcagtgtggaggctcctggcgggaggattggggtcagttgtctgggacagcgctcaccccacaaggagcagaaccccagagcaacgccggcccgcgacctcacattggcgagacgctgtttactttattccgcgctcccgagctgctcgccccaaatggggacctttataacgtgtttgcatgggccctggatgtgttggctaaaagactaaggcctatgcatgtcttcatcctggactacgaccagtcccccgccggatgccgggatgcactcctgcaacttacatcaggtatggttcagacccacgtgactacaccaggcagtatacccaccatttgtgacctggcgcgcacgtttgctagagaaatgggggaggccaattga

SEQ ID NO: 6758 - RNA, 1131 nt, synthetic construct
  misc_feature 1..1131: note = derived and/or modified sequence opt4 fromThymidine_Kinase_TK__Herpes_Simplex_Virus_1_(HSV-1)__AC B59260
  source 1..1131: mol_type = other RNA
atggccagctaccccggccaccagcacgccagcgccttcgaccaggccgccagaagcagaggccacagcaacagaagaaccgccctgagacccagaagacagcaggaggccaccgaggtgagactggagcagaagatgcccaccctgctgagagtgtacatcgacggcccccacggcatgggcaagaccaccaccacccagctgctggtggccctgggcagcagagacgacagcgtgtacgtgcccgagcccatgacctactggagagtgctgggcgccagcgagaccatcgccaacatctacaccacccagcacagactggaccagggcgagatcagcgccggcgacgccgccgtggtgatgaccagcgcccagatcaccatgggcatgccctacgccgtgaccgacgccgtgctggccccccacatcggcggcgaggccggcagcagccacgcccccccccccgccctgaccctgatcttcgacagacaccccatcgccgccctgctgtgctaccccgccgccagatacctgatgggcagcatgaccccccaggccgtgctggccttcgtggtgctgatcccccccaccctgcccggcaccaacatcgtgctgggcgccctgcccgaggacagacacatcgacagactggccaagagacagagacccggcgagagactggacctggccatgctggccgccatcagaagagtgtacggcctgctggccaacaccgtgagatacctgcagtgcggcggcagctggagagaggactggggccagctgagcggcaccgccctgaccccccagggcgccgagccccagagcaacgccggccccagaccccacatcggcgagaccctgttcaccctgttcagagcccccgagctgctggcccccaacggcgacctgtacaacgtgttcgcctgggccctggacgtgctggccaagagactgagacccatgcacgtgttcatcctggactacgaccagagccccgccggctgcagagacgccctgctgcagctgaccagcggcatggtgcagacccacgtgaccacccccggcagcatccccaccatctgcgacctggccagaaccttcgccagagagatgggcgaggccaactga

SEQ ID NO: 6759 - RNA, 1131 nt, synthetic construct
  misc_feature 1..1131: note = derived and/or modified sequence opt5 fromThymidine_Kinase_TK__Herpes_Simplex_Virus_1_(HSV-1)__AC B59260
  source 1..1131: mol_type = other RNA
atggccagctaccccggccaccagcatgcttccgccttcgaccaagcggctagatctcgggggcacagcaaccgcagaaccgccctgcggcctcgcagacagcaggaggccacagaagtgcggctcgagcagaagatgccgacgctgcttcgcgtctatatcgatggaccccatggcatggggaaaaccacaaccacacaactgctcgttgctctgggatccagagacgattctgtgtacgtgcctgaacccatgacctattggcgggtccttggcgccagcgagacaattgctaatatctacaccacgcagcaccgcctggaccagggggaaatttccgccggagatgcggccgtggttatgacctctgctcagatcacaatgggcatgccttatgccgtgaccgacgctgtcctcgcgccccatattggcggggaggccggaagctcccacgcccctccgcccgctctgacactgatctttgatagacaccctatcgccgctctcctgtgctaccccgccgcccggtatcttatgggcagcatgacccctcaagctgtgctggcgttcgttgtgctcattcccccgacgctgcctgggacaaacatcgtccttggagccctgcccgaggaccgccatattgatagactcgctaagcggcagcgccctggcgaaagactggacctggccatgctcgccgctatccggagagtgtacgggctgcttgccaataccgtgcgctacctgcagtgtggaggctcttggcgggaggattggggccagctctccgggacagcgctgacaccccaaggagctgaaccccagagcaacgccggccctagaccgcacattggggagaccctttttaccctgttccgcgcccccgagctcctggctcctaatggagacctgtataacgtctttgcctgggctctcgatgttctggccaaacggcttagacccatgcatgtgttcatcctggactacgaccagtctcctgcgggctgccgcgatgccctcctgcaacttacgtccgggatggtgcagacccacgtcacaacccccggaagcattccgacaatctgtgacctggctcggacctttgccagagaaatgggcgaggctaattga

SEQ ID NO: 6760 - RNA, 1131 nt, synthetic construct
  misc_feature 1..1131: note = derived and/or modified sequence opt6 fromThymidine_Kinase_TK__Herpes_Simplex_Virus_1_(HSV-1)__AC B59260
  source 1..1131: mol_type = other RNA
atggccagctatccaggtcatcaacatgcaagtgcatttgaccaagcagcaagatcaagaggtcattcaaatagaaggacagctctaagacctagaagacaacaagaagcaacagaagtaagactagaacaaaaaatgccaacattattaagagtatatatagatggaccacatggaatgggaaaaacaacaaccacacaattattagtagctttaggatcaagagatgactcagtatatgtaccagagccaatgacgtattggagagtactaggagcaagcgaaacaatagcaaatatatacacaacacaacatagattagatcaaggagaaataagcgcaggagatgcagcagtagtaatgaccagtgcacaaataacaatgggaatgccttatgcagttaccgatgcagtattagccccacatataggtggtgaagcaggtagttcacatgcaccaccacctgcgttaacattaatttttgatcgacacccaatagccgccctactatgctaccccgcagcaagatatctaatgggaagtatgacaccacaagcagtattagcatttgtagttttaatacctcctaccttaccaggaacaaatatagtattaggagcattgcctgaagacagacatatagaccgattagcaaaaagacaaagaccaggagaaagactagatctagctatgttagcagcaataagacgagtatacggactattagcaaacacagttagatatttacaatgtggaggatcgtggagagaagattggggacaattaagtggaacagcattaacaccacaaggagcagaaccacaaagcaacgcaggaccaagaccacacataggcgaaacattgtttacactatttagagcaccagaattattagcaccaaacggagatctatataacgtatttgcctgggcattagatgttttagcaaaaagattaagaccaatgcatgtatttattctagattatgatcaatcaccggcaggatgtagagatgcattattacaacttacaagcggaatggtacaaacacatgtgacaacaccaggatcaataccaacaatatgtgaccttgcaagaacatttgcaagagaaatgggtgaagctaattaa

SEQ ID NO: 6761 - protein, 376 aa, synthetic construct
  REGION 1..376: note Thymidine_Kinase_TK__Herpes_Simplex_Virus_1_(HSV-1)__B2CPQ5
MASYPGHQHASAFDQAARSRGHSNRRTALRPRRQQEATEVHLEQKMPTLLRVYIDGPHGMGKTTTTQLLVALGSRDDIVYVPEPMTYWRVLGASETIANIYTTQHRLDQGEISAGDAAVVMTSAQITMGMPYAVTDAVLAPHIGGEAGSSHAPPPALTLIFDRHPIAALLCYPAARYLMGSMTPQAVLAFVVLIPPTLPGTNIVLGALPEDRHIDRLAKRQRPGERLDLAMLAAIRRVYGLLANTVRYLQCGGSWRENWGQLSGTALTPQGAEPQSNAGPRPHIGETLFTLFRAPELLAPNGDLYNVFAWALDVLAKRLRPMHVFILDYDQSPAGCRDALLQLTSGMVQTHVTTPGSIPTICDLARTFAREMGEAN

SEQ ID NO: 6762 - RNA, 1131 nt, synthetic construct
  misc_feature 1..1131: note Thymidine_Kinase_TK__Herpes_Simplex_Virus_1_(HSV-1)__ACB592 61
  source 1..1131: mol_type = other RNA
atggcttcgtaccccggccatcaacacgcgtctgcgttcgaccaggctgcgcgttctcgcggccatagcaaccgacgtacggcgttgcgccctcgccggcagcaagaagccacggaagtccacctggagcagaaaatgcccacgctactgcgggtttatatagacggtcctcacgggatggggaaaaccaccaccacgcaactgctggtggccctgggttcgcgcgacgatatcgtctacgtacccgagccgatgacttactggcgggtgctgggggcttccgagacaatcgcgaacatctacaccacacaacaccgcctcgaccagggtgagatatcggccggggacgcggcggtggtaatgacaagcgcccagataacaatgggcatgccttatgccgtgaccgacgccgttctggctcctcatatcgggggggaggctgggagctcacatgccccgcccccggccctcaccctcatcttcgaccgccatcccatcgccgccctcctgtgctacccggccgcgcggtaccttatgggcagcatgaccccccaggccgtgctggcgttcgtggtcctcatcccgccgaccttgcccggcacaaacatcgtgttgggggcccttccggaggacagacacatcgaccgcctggccaaacgccagcgccccggtgagcggcttgacctggctatgctggccgcgattcgccgcgtttacgggctacttgccaatacggtgcggtatctgcagtgcggcgggtcgtggcgggagaattggggacagctttcggggacggccttgacgccccagggtgccgagccccagagcaacgcgggcccacgaccccatatcggggaaacgttatttaccctgtttcgggcccccgagttgctggcccccaacggcgacctgtacaacgtgtttgcctgggccttggacgtcttggccaaacgcctccgtcccatgcacgtctttatcctggattacgaccaatcgcccgccggctgccgggacgccctgctgcaacttacctccgggatggtccagacccacgtcaccacccccggctccataccgacgatctgcgacctggcgcgcacgtttgcccgggagatgggggaggctaactaa

SEQ ID NO: 6763 - RNA, 1131 nt, synthetic construct
  misc_feature 1..1131: note = derived and/or modified sequence opt1 fromThymidine_Kinase_TK__Herpes_Simplex_Virus_1_(HSV-1)__AC B59261
  source 1..1131: mol_type = other RNA
atggccagctaccccggccaccagcacgcctccgcgttcgaccaggccgcccgcagccgggggcactccaaccgccggaccgccctgcgcccgcggcgccagcaggaggccaccgaggtgcacctcgagcagaagatgcccacgctgctgcgggtctacatcgacggcccccacgggatgggcaagaccaccaccacgcagctcctggtggcgctggggagccgcgacgacatcgtgtacgtccccgagccgatgacctactggcgggtgctcggcgcctccgagaccatcgccaacatctacaccacgcagcaccgcctggaccagggcgagatcagcgccggggacgcggccgtggtcatgacctccgcccagatcaccatgggcatgccctacgccgtgaccgacgccgtgctggcgccccacatcgggggcgaggccgggagctcccacgcgcccccgcccgccctcacgctgatcttcgaccggcaccccatcgccgccctgctctgctaccccgccgcccgctacctgatgggcagcatgaccccgcaggccgtcctggccttcgtggtgctcatcccgcccaccctgcccggcaccaacatcgtcctgggggcgctccccgaggaccggcacatcgaccgcctggccaagcggcagcgccccggcgagcggctggacctcgccatgctggccgccatccgccgggtgtacgggctgctcgcgaacacggtgcgctacctgcagtgcggcggctcctggcgggagaactgggggcagctgagcggcaccgccctcacgccccagggggccgagccccagtccaacgccggcccgcgcccccacatcggggagaccctgttcaccctgttccgcgcgcccgagctcctggcccccaacggcgacctgtacaacgtcttcgcctgggccctcgacgtgctggccaagcggctgcgcccgatgcacgtgttcatcctcgactacgaccagagccccgcgggctgccgggacgccctgctgcagctcacctccgggatggtccagacccacgtgaccacgcccggcagcatccccaccatctgcgacctggcccgcaccttcgcccgggagatgggggaggccaactga

SEQ ID NO: 6764 - RNA, 1131 nt, synthetic construct
  misc_feature 1..1131: note = derived and/or modified sequence opt2 fromThymidine_Kinase_TK__Herpes_Simplex_Virus_1_(HSV-1)__AC B59261
  source 1..1131: mol_type = other RNA
atggcctcctaccccggccaccagcacgcctccgccttcgaccaggccgcccgctcccgcggccactccaaccgccgcaccgccctccgcccccgccgccagcaggaggccaccgaggtccacctcgagcagaagatgcccaccctcctccgcgtctacatcgacggcccccacggcatgggcaagaccaccaccacccagctcctcgtcgccctcggctcccgcgacgacatcgtctacgtccccgagcccatgacctactggcgcgtcctcggcgcctccgagaccatcgccaacatctacaccacccagcaccgcctcgaccagggcgagatctccgccggcgacgccgccgtcgtcatgacctccgcccagatcaccatgggcatgccctacgccgtcaccgacgccgtcctcgccccccacatcggcggcgaggccggctcctcccacgcccccccccccgccctcaccctcatcttcgaccgccaccccatcgccgccctcctctgctaccccgccgcccgctacctcatgggctccatgaccccccaggccgtcctcgccttcgtcgtcctcatcccccccaccctccccggcaccaacatcgtcctcggcgccctccccgaggaccgccacatcgaccgcctcgccaagcgccagcgccccggcgagcgcctcgacctcgccatgctcgccgccatccgccgcgtctacggcctcctcgccaacaccgtccgctacctccagtgcggcggctcctggcgcgagaactggggccagctctccggcaccgccctcaccccccagggcgccgagccccagtccaacgccggcccccgcccccacatcggcgagaccctcttcaccctcttccgcgcccccgagctcctcgcccccaacggcgacctctacaacgtcttcgcctgggccctcgacgtcctcgccaagcgcctccgccccatgcacgtcttcatcctcgactacgaccagtcccccgccggctgccgcgacgccctcctccagctcacctccggcatggtccagacccacgtcaccacccccggctccatccccaccatctgcgacctcgcccgcaccttcgcccgcgagatgggcgaggccaactga

SEQ ID NO: 6765 - RNA, 1131 nt, synthetic construct
  misc_feature 1..1131: note = derived and/or modified sequence opt3 fromThymidine_Kinase_TK__Herpes_Simplex_Virus_1_(HSV-1)__AC B59261
  source 1..1131: mol_type = other RNA
atggccagctaccccggccaccagcatgcttccgcattcgaccaagccgcgagatctagggggcactcaaaccggcgcaccgctctgcgacctcgtagacagcaggaggccacagaagtgcatctcgagcagaagatgccaactcttctgagggtctatatcgatggaccgcacggtatgggcaaaacgaccacaactcaattgttagttgcactggggagtcgggacgatattgtgtacgtacccgaacctatgacctattggcgcgtgctaggagccagcgagacaatagctaatatctacaccactcagcatagactcgaccagggcgaaatttccgccggtgatgccgctgtcgtgatgacatctgcccagatcaccatggggatgccatatgcggttacggacgcagtgctggcaccccacattggaggcgaggctggctcgtcacacgcccctccacccgcacttactctgatctttgataggcatcctatagctgccttgctctgctacccagcggcccggtatctgatggggagcatgaccccgcaagcagtcctggctttcgtggtactcattccccctacattaccaggaactaacatcgttctgggtgcccttcccgaggaccgccacatcgatcgattggctaagagacagaggcctggcgaacggctggacctagccatgctcgcagccattcgtcgcgtgtacgggctgcttgctaataccgtcagatacctgcagtgtggaggcagttggagggagaactggggtcagttgtccgggacagcgctcaccccacaaggagcagaaccccagtctaatgccggcccgcggcctcatatcggcgagacgctgtttactttattccgagctcccgagctgctcgccccaaacggggatctttataatgtgtttgcatgggccctggacgtgttggctaaacgcctaagacctatgcacgtcttcatactggattacgaccagagccccgccggatgcagggacgcactcctgcaacttacatccggtatggttcagacccacgtgactacaccaggctcaattcccaccatctgtgatctggcgcggacgtttgctcgcgaaatgggggaggccaactga

SEQ ID NO: 6766 - RNA, 1131 nt, synthetic construct
  misc_feature 1..1131: note = derived and/or modified sequence opt4 fromThymidine_Kinase_TK__Herpes_Simplex_Virus_1_(HSV-1)__AC B59261
  source 1..1131: mol_type = other RNA
atggccagctaccccggccaccagcacgccagcgccttcgaccaggccgccagaagcagaggccacagcaacagaagaaccgccctgagacccagaagacagcaggaggccaccgaggtgcacctggagcagaagatgcccaccctgctgagagtgtacatcgacggcccccacggcatgggcaagaccaccaccacccagctgctggtggccctgggcagcagagacgacatcgtgtacgtgcccgagcccatgacctactggagagtgctgggcgccagcgagaccatcgccaacatctacaccacccagcacagactggaccagggcgagatcagcgccggcgacgccgccgtggtgatgaccagcgcccagatcaccatgggcatgccctacgccgtgaccgacgccgtgctggccccccacatcggcggcgaggccggcagcagccacgcccccccccccgccctgaccctgatcttcgacagacaccccatcgccgccctgctgtgctaccccgccgccagatacctgatgggcagcatgaccccccaggccgtgctggccttcgtggtgctgatcccccccaccctgcccggcaccaacatcgtgctgggcgccctgcccgaggacagacacatcgacagactggccaagagacagagacccggcgagagactggacctggccatgctggccgccatcagaagagtgtacggcctgctggccaacaccgtgagatacctgcagtgcggcggcagctggagagagaactggggccagctgagcggcaccgccctgaccccccagggcgccgagccccagagcaacgccggccccagaccccacatcggcgagaccctgttcaccctgttcagagcccccgagctgctggcccccaacggcgacctgtacaacgtgttcgcctgggccctggacgtgctggccaagagactgagacccatgcacgtgttcatcctggactacgaccagagccccgccggctgcagagacgccctgctgcagctgaccagcggcatggtgcagacccacgtgaccacccccggcagcatccccaccatctgcgacctggccagaaccttcgccagagagatgggcgaggccaactga

SEQ ID NO: 6767 - RNA, 1131 nt, synthetic construct
  misc_feature 1..1131: note = derived and/or modified sequence opt5 fromThymidine_Kinase_TK__Herpes_Simplex_Virus_1_(HSV-1)__AC B59261
  source 1..1131: mol_type = other RNA
atggccagctaccccggccaccagcatgcttccgccttcgaccaagcggctagatctcgggggcacagcaaccgcagaaccgccctgcggcctcgcagacagcaggaggccacagaagtgcatctcgagcagaagatgccgacgctgcttcgggtctatatcgatggaccccacggcatggggaaaaccacaaccacacaactgctcgttgctctgggatcccgcgacgatattgtgtacgtgcctgaacccatgacctattggagagtccttggcgcctctgagacaatcgctaatatttacaccacgcagcatcggctggaccagggggaaatcagcgccggagatgcggccgtggttatgacctccgctcagattacaatgggcatgccttatgccgtgaccgacgctgtcctcgcgccccacatcggcggggaggccggatctagccacgcccctccgcccgctctgacactgatctttgatcgccatcctattgccgctctcctgtgctaccccgccgccagatatcttatgggctccatgacccctcaagctgtgctggcgttcgttgtgctcattcccccgacgctgcctgggacaaacatcgtccttggagccctgcccgaggaccggcacatcgatcgcctcgctaagagacagcggcctggcgaacgcctggacctggccatgctcgccgctattagacgggtgtacgggctgcttgccaataccgtgagatacctgcagtgtggaggcagctggcgcgagaactggggccagctctctgggacagcgctgacaccccaaggagctgaaccccagtccaatgccggccctcggccgcatatcggggagaccctttttaccctgttcagagcccccgagctcctggctcctaacggagatctgtataatgtctttgcctgggctctcgacgttctggccaaacgccttcggcccatgcacgtgttcattctggattacgaccagagccctgcgggctgcagagacgccctcctgcaacttacgtctgggatggtgcagacccacgtcacaacccccggatccatcccgacaatctgtgatctggctcgcacctttgcccgggaaatgggcgaggctaactga

SEQ ID NO: 6768 - RNA, 1131 nt, synthetic construct
  misc_feature 1..1131: note = derived and/or modified sequence opt6 fromThymidine_Kinase_TK__Herpes_Simplex_Virus_1_(HSV-1)__AC B59261
  source 1..1131: mol_type = other RNA
atggctagttatccaggacatcaacatgcatcagcatttgatcaagccgcaagatcaagaggacattcaaatagaagaactgcactaagaccaagacgacaacaagaagcaacagaagtacatctagaacaaaaaatgcctacactactaagagtatacatagatggaccacatggtatgggtaaaacaacgaccacacaattattagtagcacttggcagtcgtgacgatatagtatatgtcccagaaccaatgacatattggagagtacttggagcatcagaaacaatagcaaatatctatacaacacaacatagactagatcaaggtgaaataagtgcaggagatgcagcagtagtaatgacctcagcacaaatcacaatgggtatgccatatgcagtaacagatgcagtattagcaccacacattggaggagaagcaggatcaagtcatgcacctccaccagcattaacactaatttttgatagacatccaatagcagcactactgtgctatccagcagctcgatacttaatgggatcaatgacaccacaagcagttctagcctttgtagtattaataccaccaacattaccaggaacaaacatagtactaggagcactaccagaagatagacatatagatcgactagcaaaaagacaaaggccaggagaacgattagatcttgcaatgttagcagcaataagaagagtatacggattattagcaaatactgtaagatatctacaatgcggaggttcatggagagaaaactggggacaactatcaggaacagcattaacaccacaaggagctgaaccacaatcaaacgcaggtccaagaccacatataggagaaacactcttcaccctctttagagcaccagaactactagcaccaaacggtgatttatataatgtatttgcatgggccctagatgtattagcaaaaagactaagaccaatgcatgtatttatactagattatgatcaatcacccgcaggatgtcgcgatgcactattacaattaacaagcggtatggtacaaacacatgtaacaaccccaggatcaataccaacaatttgtgatttagcaagaacattcgcaagagaaatgggagaagcaaattga

SEQ ID NO: 6769 - protein, 376 aa, synthetic construct
  REGION 1..376: note Thymidine_Kinase_TK__Herpes_Simplex_Virus_1_(HSV-1)__O72346
MASYPCHQHASAFDQAARSRGHSNRRTALRPRRQQEATEVRPEQKMPTLLRVYIDGPHGMGKTTTTQLLVALGSRDDIVYVPEPMTYWRVLGASETIANIYTTQHRLDQGEISAGDAAVVMTSAQITMGMPYAVTDAVLAPHIGGEAGSSHAPPPALTLIFDRHPIAALLCYPAARYLMGSMTPQAVLAFVALIPPTLPGTNIVLGALPEDRHIDRLAKRQRPGERLDLAMLAAIRRVYGLLANTVRYLQGGGSWREDWGQLSGTAVPPQGAEPQSNAGPRPHIGDTLFTLFRAPELLAPNGDLYNVFAWALDVLAKRLRPMHVFILDYDQSPAGCRDALLQLTSGMVQTHVTTPGSIPTICDLARTFAREMGEAN

SEQ ID NO: 6770 - RNA, 1131 nt, synthetic construct
  misc_feature 1..1131: note Thymidine_Kinase_TK__Herpes_Simplex_Virus_1_(HSV-1)__AAC162 35
  source 1..1131: mol_type = other RNA
atggcttcgtacccctgccatcaacacgcgtctgcgttcgaccaggctgcgcgttctcgcggccatagcaaccgacgtacggcgttgcgccctcgccggcagcaagaagccacggaagtccgcccggagcagaaaatgcccacgctactgcgggtttatatagacggtccccacgggatggggaaaaccaccaccacgcaactgctggtggccctgggttcgcgcgacgatatcgtctacgtacccgagccgatgacttactggcgggtgctgggggcttccgagacaatcgcgaacatctacaccacacaacaccgcctcgaccagggtgagatatcggccggggacgcggcggtggtaatgacaagcgcccagataacaatgggcatgccttatgccgtgaccgacgccgttctggctcctcatatcgggggggaggctgggagctcacatgccccgcccccggccctcaccctcatcttcgaccgccatcccatcgccgccctcctgtgctacccggccgcgcgataccttatgggcagcatgaccccccaggccgtgctggcgttcgtggccctcatcccgccgaccttgcccggcacaaacatcgtgttgggggcccttccggaggacagacacatcgaccgcctggccaaacgccagcgccccggcgagcggcttgacctggctatgctggccgcgattcgccgcgtttacgggctgcttgccaatacggtgcggtatctgcagggcggcgggtcgtggcgggaggattggggacagctttcggggacggccgtgccgccccagggtgccgagccccagagcaacgcgggcccacgaccccatatcggggacacgttatttaccctgtttcgggcccccgagttgctggcccccaacggcgacctgtataacgtgtttgcctgggccttggacgtcttggccaaacgcctccgtcccatgcacgtctttatcctggattacgaccaatcgcccgccggctgccgggacgccctgctgcaacttacctccgggatggtccagacccacgtcaccaccccaggctccataccgacgatctgcgacctggcgcgcacgtttgcccgggagatgggggaggctaactga

SEQ ID NO: 6771 - RNA, 1131 nt, synthetic construct
  misc_feature 1..1131: note = derived and/or modified sequence opt1 fromThymidine_Kinase_TK__Herpes_Simplex_Virus_1_(HSV-1)__AA C16235
  source 1..1131: mol_type = other RNA
atggccagctacccctgccaccagcacgcctccgcgttcgaccaggccgcccgcagccggggccactccaaccgccggaccgccctgcgcccgcggcgccagcaggaggccaccgaggtgcggcccgagcagaagatgcccacgctcctgcgcgtctacatcgacgggccccacggcatggggaagaccaccaccacgcagctgctcgtggcgctgggcagccgggacgacatcgtgtacgtcccggagcccatgacctactggcgcgtgctgggggcctccgagaccatcgccaacatctacaccacgcagcaccggctcgaccagggcgagatcagcgccggcgacgcggccgtggtcatgacctccgcccagatcaccatggggatgccctacgccgtgaccgacgccgtgctggcgccccacatcggcggggaggccggcagctcccacgccccgccgcccgccctgacgctcatcttcgaccgccaccccatcgccgcgctgctgtgctaccccgccgcccggtacctcatggggagcatgacgccccaggccgtcctggccttcgtggcgctgatcccgcccaccctccccggcaccaacatcgtgctgggcgccctgcccgaggaccgccacatcgaccggctcgccaagcgccagcggcccggggagcgcctggacctggccatgctcgccgcgatccggcgcgtctacggcctgctggccaacaccgtgcggtacctccagggcgggggctcctggcgcgaggactgggggcagctgagcggcaccgccgtgcccccgcagggggccgagccccagtccaacgcgggcccccgcccccacatcggggacaccctgttcaccctcttccgggccccggagctgctggcccccaacggcgacctctacaacgtcttcgcctgggccctggacgtgctggcgaagcgcctccggcccatgcacgtgttcatcctggactacgaccagagccccgccggctgccgcgacgccctgctccagctgacgtccgggatggtccagacccacgtgaccaccccgggcagcatccccacgatctgcgacctggcccggaccttcgcccgcgagatgggggaggcgaactga

SEQ ID NO: 6772 - RNA, 1131 nt, synthetic construct
  misc_feature 1..1131: note = derived and/or modified sequence opt2 fromThymidine_Kinase_TK__Herpes_Simplex_Virus_1_(HSV-1)__AA C16235
  source 1..1131: mol_type = other RNA
atggcctcctacccctgccaccagcacgcctccgccttcgaccaggccgcccgctcccgcggccactccaaccgccgcaccgccctccgcccccgccgccagcaggaggccaccgaggtccgccccgagcagaagatgcccaccctcctccgcgtctacatcgacggcccccacggcatgggcaagaccaccaccacccagctcctcgtcgccctcggctcccgcgacgacatcgtctacgtccccgagcccatgacctactggcgcgtcctcggcgcctccgagaccatcgccaacatctacaccacccagcaccgcctcgaccagggcgagatctccgccggcgacgccgccgtcgtcatgacctccgcccagatcaccatgggcatgccctacgccgtcaccgacgccgtcctcgccccccacatcggcggcgaggccggctcctcccacgcccccccccccgccctcaccctcatcttcgaccgccaccccatcgccgccctcctctgctaccccgccgcccgctacctcatgggctccatgaccccccaggccgtcctcgccttcgtcgccctcatcccccccaccctccccggcaccaacatcgtcctcggcgccctccccgaggaccgccacatcgaccgcctcgccaagcgccagcgccccggcgagcgcctcgacctcgccatgctcgccgccatccgccgcgtctacggcctcctcgccaacaccgtccgctacctccagggcggcggctcctggcgcgaggactggggccagctctccggcaccgccgtccccccccagggcgccgagccccagtccaacgccggcccccgcccccacatcggcgacaccctcttcaccctcttccgcgcccccgagctcctcgcccccaacggcgacctctacaacgtcttcgcctgggccctcgacgtcctcgccaagcgcctccgccccatgcacgtcttcatcctcgactacgaccagtcccccgccggctgccgcgacgccctcctccagctcacctccggcatggtccagacccacgtcaccacccccggctccatccccaccatctgcgacctcgcccgcaccttcgcccgcgagatgggcgaggccaactga

SEQ ID NO: 6773 - RNA, 1131 nt, synthetic construct
  misc_feature 1..1131: note = derived and/or modified sequence opt3 fromThymidine_Kinase_TK__Herpes_Simplex_Virus_1_(HSV-1)__AA C16235
  source 1..1131: mol_type = other RNA
atggccagctacccctgccaccagcatgcttccgcattcgaccaagccgcgagatctaggggccactcaaaccggcgcaccgctctgcgacctcgtagacagcaggaggccacagaagtgaggccagagcagaagatgccgactctccttcgggtctatatcgatgggccccatggaatgggtaaaacgaccacaactcaactgttggttgcattaggcagtcgcgacgatattgtgtacgtacctgaaccaatgacctattggagagtgctgggggccagcgagacaatagctaatatctacaccactcagcacaggctagaccagggagaaatttccgcaggcgatgccgctgtcgtgatgacatctgcccagatcaccatgggtatgccctatgcggttacggacgcagtgctcgcccctcatattgggggagaggctggctcgtcacacgccccaccccctgcactgactcttatctttgatcggcacccaatagctgccctgttgtgttacccggcggcccgctatctcatgggcagcatgacgccccaagcagtcctggctttcgtggccctgatccctccaacactccccgggactaacattgtattaggagctctgcctgaggaccgacatatcgatagacttgccaagaggcagcggccaggtgaacgtttggacctggcaatgctagccgctattcgcagagtttacggcctcctggcgaataccgtgaggtaccttcaagggggaggcagttggcgggaggattggggtcagctgtccgggacagcagtgcccccgcagggagccgaacctcagtctaacgctggcccccgaccacacatcggcgacaccttgtttaccctcttccgcgcccctgagctgttagcacccaatggggatctgtataacgtctttgcctgggctctcgacgtgcttgccaaaagactgaggccaatgcatgtcttcatattggactacgatcagagccccgcaggatgccgggacgcgctactgcaactcacttccggtatggttcagacacacgtgaccactcctggctcaattccaacaatctgtgatctggctcgcacctttgccagagagatgggggaagcaaattga

SEQ ID NO: 6774 - RNA, 1131 nt, synthetic construct
  misc_feature 1..1131: note = derived and/or modified sequence opt4 fromThymidine_Kinase_TK__Herpes_Simplex_Virus_1_(HSV-1)__AA C16235
  source 1..1131: mol_type = other RNA
atggccagctacccctgccaccagcacgccagcgccttcgaccaggccgccagaagcagaggccacagcaacagaagaaccgccctgagacccagaagacagcaggaggccaccgaggtgagacccgagcagaagatgcccaccctgctgagagtgtacatcgacggcccccacggcatgggcaagaccaccaccacccagctgctggtggccctgggcagcagagacgacatcgtgtacgtgcccgagcccatgacctactggagagtgctgggcgccagcgagaccatcgccaacatctacaccacccagcacagactggaccagggcgagatcagcgccggcgacgccgccgtggtgatgaccagcgcccagatcaccatgggcatgccctacgccgtgaccgacgccgtgctggccccccacatcggcggcgaggccggcagcagccacgcccccccccccgccctgaccctgatcttcgacagacaccccatcgccgccctgctgtgctaccccgccgccagatacctgatgggcagcatgaccccccaggccgtgctggccttcgtggccctgatcccccccaccctgcccggcaccaacatcgtgctgggcgccctgcccgaggacagacacatcgacagactggccaagagacagagacccggcgagagactggacctggccatgctggccgccatcagaagagtgtacggcctgctggccaacaccgtgagatacctgcagggcggcggcagctggagagaggactggggccagctgagcggcaccgccgtgcccccccagggcgccgagccccagagcaacgccggccccagaccccacatcggcgacaccctgttcaccctgttcagagcccccgagctgctggcccccaacggcgacctgtacaacgtgttcgcctgggccctggacgtgctggccaagagactgagacccatgcacgtgttcatcctggactacgaccagagccccgccggctgcagagacgccctgctgcagctgaccagcggcatggtgcagacccacgtgaccacccccggcagcatccccaccatctgcgacctggccagaaccttcgccagagagatgggcgaggccaactga

SEQ ID NO: 6775 - RNA, 1131 nt, synthetic construct
  misc_feature 1..1131: note = derived and/or modified sequence opt5 fromThymidine_Kinase_TK__Herpes_Simplex_Virus_1_(HSV-1)__AA C16235
  source 1..1131: mol_type = other RNA
atggccagctacccctgccaccagcatgcttccgccttcgaccaagcggctagatctcggggccacagcaaccgcagaaccgccctgcggcctcgcagacagcaggaggccacagaagtgcggccggagcagaagatgcccacgctcctgcgcgtctatatcgatgggcctcatggaatgggcaaaaccacaaccacacaacttctggttgctctcgggtccagagacgatattgtgtacgtgcccgaacctatgacctattggcgggtcctgggagcctctgagacaatcgctaatatttacaccacgcagcaccgccttgaccagggcgaaatcagcgccggggatgcggccgtggttatgacctccgctcagattacaatgggaatgccctatgccgtgaccgacgctgtcctggcccctcatatcggcggcgaggcggggtctagccacgccccgccccctgctctcacactgatctttgatagacaccccattgccgctctgctctgttaccctgccgcccggtatctgatgggatccatgacgccccaagctgtgcttgcgttcgttgccctgatcccgcctaccctccccggcacaaacattgtgctgggggcccttcctgaggaccgccatatcgatagactggctaagcggcagcgccccggagaaagactcgacctggccatgctggctgccattcggagagtctacggcctcctggcgaataccgtgcgctaccttcaagggggaggcagctggcgggaggattggggccagctgtctgggacagctgtgccccctcagggagccgaaccgcagtccaacgccggccccagacctcacatcggggacaccctctttaccctgttccgcgctcccgagcttctggcccctaatggagatctctataacgtctttgcttgggccctggacgttctggcgaaacggctcagacccatgcatgtgttcattctggactacgatcagagcccggccggctgccgcgacgcccttctgcaactcacatctgggatggtgcagacgcacgtcaccacacctggatccatccccaccatctgtgatctggctcggacatttgctagagagatgggcgaagccaattga

SEQ ID NO: 6776 - RNA, 1131 nt, synthetic construct
  misc_feature 1..1131: note = derived and/or modified sequence opt6 fromThymidine_Kinase_TK__Herpes_Simplex_Virus_1_(HSV-1)__AA C16235
  source 1..1131: mol_type = other RNA
atggcatcatatccatgtcaccaacacgcaagtgcatttgatcaagcagcaaggagcagaggtcattcaaatagaagaacagcattaagacctagacgacaacaagaagctactgaagtaagaccagaacaaaaaatgccaaccttattaagagtatatatagatggtccacacggaatgggaaaaactacaacaactcaattacttgttgcattaggttcaagggacgatatagtatatgtaccagaacctatgacatactggagagtactaggtgcatctgaaacaattgcaaatatttatacaacacaacatagactagatcaaggcgaaatatcagcaggagatgcagcagttgttatgacaagtgcacaaataactatgggaatgccatacgcagttacagacgcagtactcgcaccacatataggaggagaagcaggatcttcacatgcaccaccaccagcactaacattaatattcgacagacatcccatagcagcattactatgctatccagctgcaagatatttaatgggatcaatgacaccacaagcagtattagcctttgtagccttgataccaccaacattaccaggcacaaacattgttctaggagcattaccagaagatagacatatagatagactagcaaaaagacaaagaccaggagaaagactagatttagccatgctcgcagcaataagaagagtctatggacttttagcaaatacagtaagatacttacaaggaggaggttcatggagagaagactggggacaactatcaggaacagcagtaccacctcaaggagcagaaccacaatcaaacgcaggaccgagaccccatataggagatacattattcaccttatttagagcaccagaattactcgcaccaaatggagacctatataatgtatttgcctgggcattagatgtactagctaaaagactcagaccaatgcacgtatttatactagattatgatcaatccccagcaggttgtagagatgcactcttacaattaacatcaggaatggttcaaacacatgtaacaacaccaggatctatcccaacaatatgtgatctagccagaacatttgctagagaaatgggagaagctaattaa

SEQ ID NO: 6777 - protein, 376 aa, synthetic construct
  REGION 1..376: note Thymidine_Kinase_TK__Herpes_Simplex_Virus_1_(HSV-1)__P06478
MASYPCHQHASAFDQAARSRGHSNRRTALRPRRQQEATEVRLEQKMPTLLRVYIDGPHGMGKTTTTQLLVALGSRDDIVYVPEPMTYWQVLGASETIANIYTTQHRLDQGEISAGDAAVVMTSAQITMGMPYAVTDAVLAPHVGGEAGSSHAPPPALTLIFDRHPIAALLCYPAARYLMGSMTPQAVLAFVALIPPTLPGTNIVLGALPEDRHIDRLAKRQRPGERLDLAMLAAIRRVYGLLANTVRYLQGGGSWWEDWGQLSGTAVPPQGAEPQSNAGPRPHIGDTLFTLFRAPELLAPNGDLYNVFAWALDVLAKRLRPMHVFILDYDQSPAGCRDALLQLTSGMVQTHVTTPGSIPTICDLARTFAREMGEAN

SEQ ID NO: 6778 - RNA, 1131 nt, synthetic construct
  misc_feature 1..1131: note Thymidine_Kinase_TK__Herpes_Simplex_Virus_1_(HSV-1)__AAA458 11
  source 1..1131: mol_type = other RNA
atggcttcgtacccctgccatcaacacgcgtctgcgttcgaccaggctgcgcgttctcgcggccatagcaaccgacgtacggcgttgcgccctcgccggcagcaagaagccacggaagtccgcctggagcagaaaatgcccacgctactgcgggtttatatagacggtcctcacgggatggggaaaaccaccaccacgcaactgctggtggccctgggttcgcgcgacgatatcgtctacgtacccgagccgatgacttactggcaggtgctgggggcttccgagacaatcgcgaacatctacaccacacaacaccgcctcgaccagggtgagatatcggccggggacgcggcggtggtaatgacaagcgcccagataacaatgggcatgccttatgccgtgaccgacgccgttctggctcctcatgtcgggggggaggctgggagttcacatgccccgcccccggccctcaccctcatcttcgaccgccatcccatcgccgccctcctgtgctacccggccgcgcgataccttatgggcagcatgaccccccaggccgtgctggcgttcgtggccctcatcccgccgaccttgcccggcacaaacatcgtgttgggggcccttccggaggacagacacatcgaccgcctggccaaacgccagcgccccggcgagcggcttgacctggctatgctggccgcgattcgccgcgtttacgggctgcttgccaatacggtgcggtatctgcagggcggcgggtcgtggtgggaggattggggacagctttcggggacggccgtgccgccccagggtgccgagccccagagcaacgcgggcccacgaccccatatcggggacacgttatttaccctgtttcgggcccccgagttgctggcccccaacggcgacctgtataacgtgtttgcctgggccttggacgtcttggccaaacgcctccgtcccatgcacgtctttatcctggattacgaccaatcgcccgccggctgccgggacgccctgctgcaacttacctccgggatggtccagacccacgtcaccaccccaggctccataccgacgatctgcgacctggcgcgcacgtttgcccgggagatgggggaggctaactga

SEQ ID NO: 6779 - RNA, 1131 nt, synthetic construct
  misc_feature 1..1131: note = derived and/or modified sequence opt1 fromThymidine_Kinase_TK__Herpes_Simplex_Virus_1_(HSV-1)__AA A45811
  source 1..1131: mol_type = other RNA
atggccagctacccctgccaccagcacgcctccgcgttcgaccaggccgcccgcagccggggccactccaaccgccggaccgccctgcgcccgcggcgccagcaggaggccaccgaggtgcggctcgagcagaagatgcccacgctgctgcgcgtctacatcgacgggccccacggcatggggaagaccaccaccacgcagctcctggtggcgctgggcagccgggacgacatcgtgtacgtccccgagccgatgacctactggcaggtcctcggggcctccgagaccatcgccaacatctacaccacgcagcaccgcctggaccagggcgagatcagcgccggcgacgcggccgtggtgatgacctccgcccagatcaccatggggatgccctacgccgtgaccgacgccgtgctggcgccccacgtcggcggggaggccggcagctcccacgcgcccccgcccgccctcacgctgatcttcgaccggcaccccatcgccgccctgctctgctaccccgccgcccgctacctgatggggagcatgaccccgcaggccgtgctggccttcgtggcgctcatcccgcccaccctgcccggcaccaacatcgtcctgggcgccctccccgaggaccggcacatcgaccgcctggccaagcggcagcgccccggggagcggctggacctcgccatgctggccgcgatccgccgggtgtacggcctgctcgccaacacggtgcgctacctgcagggcgggggctcctggtgggaggactgggggcagctgagcggcaccgccgtcccgccccagggggccgagccccagtccaacgcgggcccccggccccacatcggggacaccctcttcaccctgttccgcgcccccgagctgctcgccccgaacggcgacctgtacaacgtgttcgcctgggccctggacgtgctcgcgaagcgcctgcggcccatgcacgtcttcatcctggactacgaccagagccccgccggctgccgcgacgccctcctgcagctgacgtccgggatggtgcagacccacgtgaccacccccggcagcatcccgacgatctgcgacctcgcccggaccttcgcccgcgagatgggggaggcgaactga

SEQ ID NO: 6780 - RNA, 1131 nt, synthetic construct
  misc_feature 1..1131: note = derived and/or modified sequence opt2 fromThymidine_Kinase_TK__Herpes_Simplex_Virus_1_(HSV-1)__AA A45811
  source 1..1131: mol_type = other RNA
atggcctcctacccctgccaccagcacgcctccgccttcgaccaggccgcccgctcccgcggccactccaaccgccgcaccgccctccgcccccgccgccagcaggaggccaccgaggtccgcctcgagcagaagatgcccaccctcctccgcgtctacatcgacggcccccacggcatgggcaagaccaccaccacccagctcctcgtcgccctcggctcccgcgacgacatcgtctacgtccccgagcccatgacctactggcaggtcctcggcgcctccgagaccatcgccaacatctacaccacccagcaccgcctcgaccagggcgagatctccgccggcgacgccgccgtcgtcatgacctccgcccagatcaccatgggcatgccctacgccgtcaccgacgccgtcctcgccccccacgtcggcggcgaggccggctcctcccacgcccccccccccgccctcaccctcatcttcgaccgccaccccatcgccgccctcctctgctaccccgccgcccgctacctcatgggctccatgaccccccaggccgtcctcgccttcgtcgccctcatcccccccaccctccccggcaccaacatcgtcctcggcgccctccccgaggaccgccacatcgaccgcctcgccaagcgccagcgccccggcgagcgcctcgacctcgccatgctcgccgccatccgccgcgtctacggcctcctcgccaacaccgtccgctacctccagggcggcggctcctggtgggaggactggggccagctctccggcaccgccgtccccccccagggcgccgagccccagtccaacgccggcccccgcccccacatcggcgacaccctcttcaccctcttccgcgcccccgagctcctcgcccccaacggcgacctctacaacgtcttcgcctgggccctcgacgtcctcgccaagcgcctccgccccatgcacgtcttcatcctcgactacgaccagtcccccgccggctgccgcgacgccctcctccagctcacctccggcatggtccagacccacgtcaccacccccggctccatccccaccatctgcgacctcgcccgcaccttcgcccgcgagatgggcgaggccaactga

SEQ ID NO: 6781 - RNA, 1131 nt, synthetic construct
  misc_feature 1..1131: note = derived and/or modified sequence opt3 fromThymidine_Kinase_TK__Herpes_Simplex_Virus_1_(HSV-1)__AA A45811
  source 1..1131: mol_type = other RNA
atggccagctacccctgccaccagcatgcttccgcattcgaccaagccgcgagatctaggggccactcaaaccggcgcaccgctctgcgacctcgtagacagcaggaggccacagaagtgaggctcgagcagaagatgccaactcttctgcgggtctatatcgatgggccgcatggaatgggtaaaacgaccacaactcaattgttagttgcactgggcagtcgcgacgatattgtgtacgtacccgaacctatgacctattggcaagtgctaggggccagcgagacaatagctaatatctacaccactcagcacagactcgaccagggagaaatttccgcaggcgatgccgctgtcgtgatgacatctgcccagatcaccatgggtatgccatatgcggttacggacgcagtgctggctccccatgtcgggggagaggctggctcgtcacacgcccctccacccgcacttactctgatttttgataggcaccctatcgctgccttgctctgttacccagcggcccggtatctgatgggcagcatgaccccgcaggcagtgctggctttcgtagccctcataccccctacattaccagggactaacatcgttctgggagcccttcccgaggaccgccatattgatcgattggccaagagacagaggcctggtgaacggctggacctagcaatgctcgccgctatccgtcgcgtgtacggcctgcttgcgaataccgtcagatacctgcaagggggaggcagttggtgggaggattggggtcagttgtccgggacagcagtgccaccccagggagccgaaccgcagtctaacgctggccctaggccccacattggcgacaccctctttacgctgttccgggccccagagttactggcacctaatggggatctctataacgtgtttgcctgggctcttgacgtcctggccaaacgattgcgccccatgcatgttttcatcctagactacgatcaaagcccagcaggatgcagagacgcgctgctccagctgacttccggtatggtgcagacacacgtaaccactcccggctcaatacctacaatttgtgatcttgctaggacctttgcccgggagatgggggaagcaaattga

SEQ ID NO: 6782 - RNA, 1131 nt, synthetic construct
  misc_feature 1..1131: note = derived and/or modified sequence opt4 fromThymidine_Kinase_TK__Herpes_Simplex_Virus_1_(HSV-1)__AA A45811
  source 1..1131: mol_type = other RNA
atggccagctacccctgccaccagcacgccagcgccttcgaccaggccgccagaagcagaggccacagcaacagaagaaccgccctgagacccagaagacagcaggaggccaccgaggtgagactggagcagaagatgcccaccctgctgagagtgtacatcgacggcccccacggcatgggcaagaccaccaccacccagctgctggtggccctgggcagcagagacgacatcgtgtacgtgcccgagcccatgacctactggcaggtgctgggcgccagcgagaccatcgccaacatctacaccacccagcacagactggaccagggcgagatcagcgccggcgacgccgccgtggtgatgaccagcgcccagatcaccatgggcatgccctacgccgtgaccgacgccgtgctggccccccacgtgggcggcgaggccggcagcagccacgcccccccccccgccctgaccctgatcttcgacagacaccccatcgccgccctgctgtgctaccccgccgccagatacctgatgggcagcatgaccccccaggccgtgctggccttcgtggccctgatcccccccaccctgcccggcaccaacatcgtgctgggcgccctgcccgaggacagacacatcgacagactggccaagagacagagacccggcgagagactggacctggccatgctggccgccatcagaagagtgtacggcctgctggccaacaccgtgagatacctgcagggcggcggcagctggtgggaggactggggccagctgagcggcaccgccgtgcccccccagggcgccgagccccagagcaacgccggccccagaccccacatcggcgacaccctgttcaccctgttcagagcccccgagctgctggcccccaacggcgacctgtacaacgtgttcgcctgggccctggacgtgctggccaagagactgagacccatgcacgtgttcatcctggactacgaccagagccccgccggctgcagagacgccctgctgcagctgaccagcggcatggtgcagacccacgtgaccacccccggcagcatccccaccatctgcgacctggccagaaccttcgccagagagatgggcgaggccaactga

SEQ ID NO: 6783 - RNA, 1131 nt, synthetic construct
  misc_feature 1..1131: note = derived and/or modified sequence opt5 fromThymidine_Kinase_TK__Herpes_Simplex_Virus_1_(HSV-1)__AA A45811
  source 1..1131: mol_type = other RNA
atggccagctacccctgccaccagcatgcttccgccttcgaccaagcggctagatctcggggccacagcaaccgcagaaccgccctgcggcctcgcagacagcaggaggccacagaagtgcggctcgagcagaagatgccgacgctgcttcgcgtctatatcgatgggccccatggaatgggcaaaaccacaaccacacaactgctcgttgctctggggtccagagacgatattgtgtacgtgcctgaacccatgacctattggcaggtccttggagcctctgagacaatcgctaatatttacaccacgcagcaccggctggaccagggcgaaatcagcgccggggatgcggccgtggttatgacctccgctcaaattacaatgggaatgccttatgccgtgaccgacgctgtcctcgcgccccatgtgggcggcgaggccgggtctagccacgcccctccgcccgctctgacactgatctttgatcgccaccctatcgccgctctcctgtgttaccccgccgccagatatcttatgggatccatgacccctcaggctgttctggcgttcgtggccctcattcccccgacgctgcctggcacaaacatcgtccttggggctctgcccgaggaccggcatattgatcgcctcgccaagagacagcggcctggagaacgcctggacctggccatgctcgctgccatcagacgggtgtacggcctgcttgcgaataccgtgagatacctgcaagggggaggcagctggtgggaggattggggccagctctctgggacagctgtccctccccagggagccgaaccccagtccaacgccggcccgcgcccccacattggggacaccctgtttacccttttccgggctcctgagctgctcgcccccaatggagatctgtataacgtttttgcttgggccctggacgtgctcgcgaaaagactgcgccctatgcatgtgttcatccttgactacgatcaaagccccgccggctgccgggacgctctgctccagctgacatctgggatggtccagacgcacgtgaccacaccgggatccattcctaccatctgtgatcttgccagaacatttgctcgcgagatgggcgaagccaattga

SEQ ID NO: 6784 - RNA, 1131 nt, synthetic construct
  misc_feature 1..1131: note = derived and/or modified sequence opt6 fromThymidine_Kinase_TK__Herpes_Simplex_Virus_1_(HSV-1)__AA A45811
  source 1..1131: mol_type = other RNA
atggcatcatacccttgtcaccaacatgcatcagcatttgatcaagcagcacgatcaagaggacattcaaatagaagaactgcactaagacctagaagacaacaagaagcaacagaagtaagattagaacaaaaaatgcccacactacttagagtttatatagatggaccacatggtatgggaaaaacaacaacaactcaattactagtagcattaggatcaagagatgatatagtatatgttcccgaacccatgacctactggcaagtattaggagcaagcgaaacaatagcaaatatatacacaactcaacatagacttgaccaaggcgaaatatcagcaggagacgcagcagttgtaatgacatcagcacaaataacaatgggcatgccatatgcagttacagacgcagtattagctccccacgtaggaggcgaagcaggatcctcacatgcaccaccaccagcactaacattaatttttgacagacaccccatagctgcactcctatgttacccagcagcaagatatttaatgggctcaatgacaccacaagcagtattagccttcgtagcattgatacccccaacattaccaggaacaaatatcgttttaggagcattaccagaagacagacatatagatcgccttgcaaagagacaaagacctggagaaagactagaccttgcaatgctagcagcaatcagaagagtatacggattactagcaaatacagtaagatatcttcaaggaggaggatcatggtgggaagattggggacaattatcaggaacagcagttccaccacaaggagcagaacctcaatcaaatgctggccctagaccacatataggagatacattatttactttattcagagcacctgaattactcgctcccaatggtgatttatataatgttttcgcttgggcattagatgtattagcaaaaagactaagaccaatgcatgtatttatattagattatgatcaatcaccagcaggatgtagagatgctttactacaattaacaagtggtatggtacaaacacatgtaacaacccctggttctataccaacaatatgtgatttggcaagaacatttgcaagagaaatgggcgaagcaaattaa

SEQ ID NO: 6785 - protein, 376 aa, synthetic construct
  REGION 1..376: note Thymidine_Kinase_TK__Herpes_Simplex_Virus_1_(HSV-1)__P08333
MASYPGHQHASAFDQAARSRGHSNRRTALRPRRQQEATEVRPEQKMPTLLRVYIDGPHGMGKTTTTQLLVALGSRDDIVYVPEPMTYWRVLGASETIANIYTTQHRLDQGEISAGDAAVVMTSAQITIGMPYAVTDAVLAPHIGGEAGSSHAPPPALTLIFDRHPIAALLCYPAARYLMGSMTPQAVLAFVALIPPTLPGTNIVLGALPEDRHIDRLAKRQRPGERLDLAMLAAIRRVYGLLANTVRYLQGGGSWREDWGQLSGTAVPPQGAEPQSNAGPRPHIGDTLFTLFRAPELLAPNGDLYNVFAWALDVLAKRLRPMHVFILDYDQSPAGCRDALLQLTSGMIQTHVTTPGSIPTICDLARTFAREMGEAN

SEQ ID NO: 6786 - RNA, 1131 nt, synthetic construct
  misc_feature 1..1131: note Thymidine_Kinase_TK__Herpes_Simplex_Virus_1_(HSV-1)__AAA458 14
  source 1..1131: mol_type = other RNA
atggcttcgtaccccggccatcagcacgcgtctgcgttcgaccaggctgcgcgttctcgcggccatagcaaccgacgtacggcgttgcgccctcgccggcagcaagaagccacggaagtccgcccggagcagaaaatgcccacgctactgcgggtttatatagacggtccccacgggatggggaaaaccaccaccacgcaactgctggtggccctgggttcgcgcgacgatatcgtctacgtacccgagccgatgacttactggcgggtgctgggggcttccgagacaatcgcgaacatctacaccacacaacaccgcctcgaccagggtgagatatcggccggggacgcggcggtggtaatgacaagcgcccagataacaataggcatgccttatgccgtgaccgacgccgttctggctcctcatatcgggggggaggctgggagctcacatgccccgcccccggccctcaccctcatcttcgaccgccatcccatcgccgccctcctgtgctacccggccgcgcgataccttatgggcagcatgaccccccaggccgtgctggcgttcgtggccctcatcccgccgaccttgcccggcacaaacatcgtgttgggggcccttccggaggacagacacatcgaccgcctggccaaacgccagcgccccggcgagcggcttgacctggctatgctggccgcgattcgccgcgtttacgggctgcttgccaatacggtgcggtatctgcagggcggcgggtcgtggcgggaggattggggacagctttcggggacggccgtgccgccccagggtgccgagccccagagcaacgcgggcccacgaccccatatcggggacacgttatttaccctgtttcgggcccccgagttgctggcccccaacggcgacctgtacaacgtgtttgcctgggccttggacgtcttggccaaacgcctccgtcccatgcacgtctttatcctggattacgaccaatcgcccgccggctgccgggacgccctgctgcaacttacctccgggatgatccagacccacgtcaccaccccaggctccataccgacgatctgcgacctggcgcgcacgtttgcccgggagatgggggaggctaactga

SEQ ID NO: 6787 - RNA, 1131 nt, synthetic construct
  misc_feature 1..1131: note = derived and/or modified sequence opt1 fromThymidine_Kinase_TK__Herpes_Simplex_Virus_1_(HSV-1)__AA A45814
  source 1..1131: mol_type = other RNA
atggccagctaccccggccaccagcacgcctccgcgttcgaccaggccgcccgcagccgggggcactccaaccgccggaccgccctgcgcccgcggcgccagcaggaggccaccgaggtgcggcccgagcagaagatgcccacgctcctgcgcgtctacatcgacggcccccacgggatgggcaagaccaccaccacgcagctgctcgtggcgctggggagccgggacgacatcgtgtacgtcccggagcccatgacctactggcgcgtgctgggcgcctccgagaccatcgccaacatctacaccacgcagcaccggctcgaccagggcgagatcagcgccggggacgcggccgtggtcatgacctccgcccagatcaccatcggcatgccctacgccgtgaccgacgccgtgctggcgccccacatcgggggcgaggccgggagctcccacgccccgccgcccgccctgacgctcatcttcgaccgccaccccatcgccgcgctgctgtgctaccccgccgcccggtacctcatgggcagcatgacgccccaggccgtcctggccttcgtggcgctgatcccgcccaccctccccggcaccaacatcgtgctgggggccctgcccgaggaccgccacatcgaccggctcgccaagcgccagcggcccggcgagcgcctggacctggccatgctcgccgcgatccggcgcgtctacgggctgctggccaacaccgtgcggtacctccagggcggcgggtcctggcgcgaggactggggccagctgagcgggaccgccgtgcccccgcagggcgccgagccccagtccaacgcggggccccgcccccacatcggcgacaccctgttcaccctcttccgggccccggagctgctggcccccaacggcgacctctacaacgtcttcgcctgggccctggacgtgctggcgaagcgcctccggcccatgcacgtgttcatcctggactacgaccagagccccgccgggtgccgcgacgccctgctccagctgacgtccggcatgatccagacccacgtcaccaccccggggagcatccccacgatctgcgacctggcccggaccttcgcccgcgagatgggcgaggcgaactga

SEQ ID NO: 6788 - RNA, 1131 nt, synthetic construct
  misc_feature 1..1131: note = derived and/or modified sequence opt2 fromThymidine_Kinase_TK__Herpes_Simplex_Virus_1_(HSV-1)__AA A45814
  source 1..1131: mol_type = other RNA
atggcctcctaccccggccaccagcacgcctccgccttcgaccaggccgcccgctcccgcggccactccaaccgccgcaccgccctccgcccccgccgccagcaggaggccaccgaggtccgccccgagcagaagatgcccaccctcctccgcgtctacatcgacggcccccacggcatgggcaagaccaccaccacccagctcctcgtcgccctcggctcccgcgacgacatcgtctacgtccccgagcccatgacctactggcgcgtcctcggcgcctccgagaccatcgccaacatctacaccacccagcaccgcctcgaccagggcgagatctccgccggcgacgccgccgtcgtcatgacctccgcccagatcaccatcggcatgccctacgccgtcaccgacgccgtcctcgccccccacatcggcggcgaggccggctcctcccacgcccccccccccgccctcaccctcatcttcgaccgccaccccatcgccgccctcctctgctaccccgccgcccgctacctcatgggctccatgaccccccaggccgtcctcgccttcgtcgccctcatcccccccaccctccccggcaccaacatcgtcctcggcgccctccccgaggaccgccacatcgaccgcctcgccaagcgccagcgccccggcgagcgcctcgacctcgccatgctcgccgccatccgccgcgtctacggcctcctcgccaacaccgtccgctacctccagggcggcggctcctggcgcgaggactggggccagctctccggcaccgccgtccccccccagggcgccgagccccagtccaacgccggcccccgcccccacatcggcgacaccctcttcaccctcttccgcgcccccgagctcctcgcccccaacggcgacctctacaacgtcttcgcctgggccctcgacgtcctcgccaagcgcctccgccccatgcacgtcttcatcctcgactacgaccagtcccccgccggctgccgcgacgccctcctccagctcacctccggcatgatccagacccacgtcaccacccccggctccatccccaccatctgcgacctcgcccgcaccttcgcccgcgagatgggcgaggccaactga

SEQ ID NO: 6789 - RNA, 1131 nt, synthetic construct
  misc_feature 1..1131: note = derived and/or modified sequence opt3 fromThymidine_Kinase_TK__Herpes_Simplex_Virus_1_(HSV-1)__AA A45814
  source 1..1131: mol_type = other RNA
atggccagctaccccggccaccagcatgcttccgcattcgaccaagccgcgagatctagggggcactcaaaccggcgcaccgctctgcgacctcgtagacagcaggaggccacagaagtgaggccagagcagaagatgccgactctccttcgggtctatatcgatggaccccatggtatgggcaaaacgaccacaactcaactgttggttgcattagggagtcgcgacgatattgtgtacgtacctgaaccaatgacctattggagagtgctgggagccagcgagacaatagctaatatctacaccactcagcacaggctagaccagggcgaaatttccgccggtgatgcagctgtcgtgatgacatctgcccagatcaccattgggatgccctatgcggttacggacgcagtgctcgcccctcatatcggaggcgaggctggctcgtcacacgccccaccccctgcactgactcttatatttgatcggcacccaatcgctgccctgttgtgctacccggcggcccgctatctcatggggagcatgacgccccaagcagtcctggctttcgtggccctgattcctccaacactccccggaactaacatcgtattaggtgctctgcctgaggaccgacatattgatagacttgccaagaggcagcggccaggcgaacgtttggacctggcaatgctagccgctatccgcagagtttacgggctcctggcgaataccgtgaggtaccttcagggaggcggtagttggcgggaggattgggggcagctgtccggaacagcagtgcccccgcaaggcgccgaacctcagtctaacgctggcccccgaccacacataggggacaccttgtttaccctcttccgcgcccctgagctgttagcacccaatggagatctgtataacgtctttgcctgggctctcgacgtgcttgccaaaagactgaggccaatgcatgtcttcattttggactacgatcagagccccgcaggttgtcgggacgcgctactgcaactcacttccggcatgatccagacacacgttaccactcctgggtcaattccaacaatctgcgatctggctcgcacctttgccagagagatgggagaagcaaattga

SEQ ID NO: 6790 - RNA, 1131 nt, synthetic construct
  misc_feature 1..1131: note = derived and/or modified sequence opt4 fromThymidine_Kinase_TK__Herpes_Simplex_Virus_1_(HSV-1)__AA A45814
  source 1..1131: mol_type = other RNA
atggccagctaccccggccaccagcacgccagcgccttcgaccaggccgccagaagcagaggccacagcaacagaagaaccgccctgagacccagaagacagcaggaggccaccgaggtgagacccgagcagaagatgcccaccctgctgagagtgtacatcgacggcccccacggcatgggcaagaccaccaccacccagctgctggtggccctgggcagcagagacgacatcgtgtacgtgcccgagcccatgacctactggagagtgctgggcgccagcgagaccatcgccaacatctacaccacccagcacagactggaccagggcgagatcagcgccggcgacgccgccgtggtgatgaccagcgcccagatcaccatcggcatgccctacgccgtgaccgacgccgtgctggccccccacatcggcggcgaggccggcagcagccacgcccccccccccgccctgaccctgatcttcgacagacaccccatcgccgccctgctgtgctaccccgccgccagatacctgatgggcagcatgaccccccaggccgtgctggccttcgtggccctgatcccccccaccctgcccggcaccaacatcgtgctgggcgccctgcccgaggacagacacatcgacagactggccaagagacagagacccggcgagagactggacctggccatgctggccgccatcagaagagtgtacggcctgctggccaacaccgtgagatacctgcagggcggcggcagctggagagaggactggggccagctgagcggcaccgccgtgcccccccagggcgccgagccccagagcaacgccggccccagaccccacatcggcgacaccctgttcaccctgttcagagcccccgagctgctggcccccaacggcgacctgtacaacgtgttcgcctgggccctggacgtgctggccaagagactgagacccatgcacgtgttcatcctggactacgaccagagccccgccggctgcagagacgccctgctgcagctgaccagcggcatgatccagacccacgtgaccacccccggcagcatccccaccatctgcgacctggccagaaccttcgccagagagatgggcgaggccaactga

SEQ ID NO: 6791 - RNA, 1131 nt, synthetic construct
  misc_feature 1..1131: note = derived and/or modified sequence opt5 fromThymidine_Kinase_TK__Herpes_Simplex_Virus_1_(HSV-1)__AA A45814
  source 1..1131: mol_type = other RNA
atggccagctaccccggccaccagcatgcttccgccttcgaccaagcggctagatctcgggggcacagcaaccgcagaaccgccctgcggcctcgcagacagcaggaggccacagaagtgcggccggagcagaagatgcccacgctcctgcgcgtctatatcgatggacctcatggcatggggaaaaccacaaccacacaacttctggttgctctcggatccagagacgatattgtgtacgtgcccgaacctatgacctattggcgggtcctgggcgcctctgagacaatcgctaatatttacaccacgcagcaccgccttgaccagggggaaatcagcgccggagatgcggccgtggttatgacctccgctcagattacaatcggcatgccctatgccgtgaccgacgctgtcctggcccctcatatcggcggggaggcgggatctagccacgccccgccccctgctctcacactgatttttgatagacaccccatcgccgctctgctctgctaccctgccgcccggtatctgatgggctccatgacgccccaagctgtgcttgcgttcgttgccctgattccgcctaccctccccgggacaaacatcgtgctgggagcccttcctgaggaccgccatattgatagactggctaagcggcagcgccccggcgaaagactcgacctggccatgctggctgccatccggagagtctacgggctcctggcgaataccgtgcgctaccttcagggaggcggcagctggcgggaggattgggggcagctgtctggaacagctgtgccccctcaaggcgccgaaccgcagtccaacgccgggcccagacctcacattggagacaccctctttaccctgttccgcgctcccgagcttctggcccctaatggcgatctctataacgtctttgcttgggccctggacgttctggcgaaacggctcagacccatgcatgtgttcatcctggactacgatcagagcccggccgggtgtcgcgacgcccttctgcaactcacatctggaatgatccagacgcacgtgaccacacctggctccattcccaccatctgcgatctggctcggacatttgctagagagatgggcgaagccaattga

SEQ ID NO: 6792 - RNA, 1131 nt, synthetic construct
  misc_feature 1..1131: note = derived and/or modified sequence opt6 fromThymidine_Kinase_TK__Herpes_Simplex_Virus_1_(HSV-1)__AA A45814
  source 1..1131: mol_type = other RNA
atggcatcatatccaggacatcaacatgcatcagcattcgatcaagcagcaagatcaagaggacatagcaatcgtagaacagcattacgaccaagacgacaacaagaagcaacagaagtaagaccagaacaaaaaatgccaacattactaagagtatatatagatggtccacatggaatgggaaaaacaacaacaactcaattattagtagcactaggatcaagagatgatatagtttacgtaccagaaccaatgacatattggagagtactaggagcctcagaaactatagcaaatatatacacaacacaacacagattagatcaaggagaaataagtgcaggtgacgctgcagttgttatgacaagtgcacaaataactataggcatgccttatgcagtaactgatgctgtcctagcaccacatataggaggagaagcaggatcatcacacgctcctccacctgccctcacattaatatttgatcgacaccccatagctgcactattatgttatccagcagcaagatatctcatgggatccatgacaccacaagctgttttagcctttgtagcattaattccaccaactctcccaggcacaaatattgtattaggagccctaccagaagatcgacatatagatagattagcaaaaagacaaagaccaggagaaagattagatttagctatgctagctgctatacgtcgagtatatggattactagcaaatacagtaagatatttacaaggaggaggaagttggagagaagactggggacaattatcaggaacagctgtaccaccacaaggagcagaaccacaatcaaatgcaggaccaagaccacacataggtgatacactatttaccttattcagagcaccagaactattagctccaaatggagacctatataacgtatttgcatgggccttagacgtattagctaaaagactaagaccaatgcatgtttttattctcgactatgatcaatcaccagccggttgtagagacgcattactacaattaacttcaggtatgatacaaacacatgtaacaacacctggatcaataccaaccatatgcgacctagcaaggacatttgcaagagaaatgggagaagcaaattaa

SEQ ID NO: 6793 - protein, 376 aa, synthetic construct
  REGION 1..376: note Thymidine_Kinase_TK__Herpes_Simplex_Virus_1_(HSV-1)__Q9DLP2
MASYPCHQHASAFDQAARSRGHSNRRTALRPRRQQEATEVRLEQKMPTLLRVYIDGPHGMGKTTTTQLLVALGSRDDIVYVPEPMTYWQVLGASETIANIYTTQHRLDQGEISAGDAAVVMTSAQITMGMPYAVTDAVLAPHIGGEAGSSHAPPPALTLIFDRHPIAALLCYPAARYLMGSMTPQAVLAFVALIPPTLPGTNIVLGALPEDRHIDRLAKRQRPGERLDLAMLAAIRRVYGLLANTVRYLQGGGSWREDWGQLSGTAVPPQGAEPQSNAGPRPHIGDTLFTLFRAPELLAPNGDLYNVFAWALDVLAKRLRPMHVFILDYDQSPAGCRDALLQLTSGMVQTHVTTPGSIPTICDLARTFARGVGEAN

SEQ ID NO: 6794 - RNA, 1131 nt, synthetic construct
  misc_feature 1..1131: note Thymidine_Kinase_TK__Herpes_Simplex_Virus_1_(HSV-1)__AAG408 42
  source 1..1131: mol_type = other RNA
atggcttcgtacccctgccatcaacacgcgtctgcgttcgaccaggctgcgcgttctcgcggccatagcaaccgacgtacggcgttgcgccctcgccggcagcaagaagccacggaagtccgcctggagcagaaaatgcccacgctactgcgggtttatatagacggtcctcacgggatggggaaaaccaccaccacgcaactgctggtggccctgggttcgcgcgacgatatcgtctacgtacccgagccgatgacttactggcaggtgctgggggcttccgagacaatcgcgaacatctacaccacacaacaccgcctcgaccagggtgagatatcggccggggacgcggcggtggtaatgacaagcgcccagataacaatgggcatgccttatgccgtgaccgacgccgttctggctcctcatatcgggggggaggctgggagctcacatgccccgcccccggccctcaccctcatcttcgaccgccatcccatcgccgccctcctgtgctacccggccgcgcgataccttatgggcagcatgaccccccaggccgtgctggcgttcgtggccctcatcccgccgaccttgcccggcacaaacatcgtgttgggggcccttccggaggacagacacatcgaccgcctggccaaacgccagcgccccggcgagcggcttgacctggctatgctggccgcgattcgccgcgtttacgggctgcttgccaatacggtgcggtatctgcagggcggcgggtcgtggcgggaggattggggacagctttcggggacggccgtgccgccccagggtgccgagccccagagcaacgcgggcccacgaccccatatcggggacacgttatttaccctgtttcgggcccccgagttgctggcccccaacggcgacctgtataacgtgtttgcctgggccttggacgtcttggccaaacgcctccgtcccatgcacgtctttatcctggattacgaccaatcgcccgccggctgccgggacgccctgctgcaacttacctccgggatggtccagacccacgtcaccacccccggctccataccgacgatctgcgacctggcgcgcacgtttgcccggggagtgggggaggctaactga

SEQ ID NO: 6795 - RNA, 1131 nt, synthetic construct
  misc_feature 1..1131: note = derived and/or modified sequence opt1 fromThymidine_Kinase_TK__Herpes_Simplex_Virus_1_(HSV-1)__AA G40842
  source 1..1131: mol_type = other RNA
atggccagctacccctgccaccagcacgcctccgcgttcgaccaggccgcccggagccggggccactccaaccgccggaccgccctgcgcccgcggcgccagcaggaggccaccgaggtgcggctcgagcagaagatgcccacgctgctgcgcgtctacatcgacgggccccacggcatggggaagaccaccaccacgcagctcctggtggcgctgggcagccgggacgacatcgtgtacgtccccgagccgatgacctactggcaggtcctcggggcctccgagaccatcgccaacatctacaccacgcagcaccgcctggaccagggcgagatcagcgccggcgacgcggccgtggtgatgacctccgcccagatcaccatggggatgccctacgccgtgaccgacgccgtgctggcgccccacatcggcggggaggccggcagctcccacgcgcccccgcccgccctcacgctgatcttcgaccggcaccccatcgccgccctgctctgctaccccgccgcccgctacctgatggggagcatgaccccgcaggccgtcctggccttcgtggcgctcatcccgcccaccctgcccggcaccaacatcgtgctgggcgccctccccgaggaccggcacatcgaccgcctggccaagcggcagcgccccggggagcggctggacctcgccatgctggccgcgatccgccgggtctacggcctgctcgccaacacggtgcgctacctgcagggcgggggctcctggcgggaggactgggggcagctgagcggcaccgccgtgccgccccagggggccgagccccagtccaacgcgggcccccgcccccacatcggggacaccctcttcaccctgttccgcgcccccgagctgctcgccccgaacggcgacctgtacaacgtcttcgcctgggccctggacgtgctcgcgaagcggctgcgccccatgcacgtgttcatcctggactacgaccagagccccgccggctgccgggacgccctcctgcagctgacgtccgggatggtccagacccacgtgaccacccccggcagcatcccgacgatctgcgacctcgcccgcaccttcgcccgcggggtgggcgaggcgaactga

SEQ ID NO: 6796 - RNA, 1131 nt, synthetic construct
  misc_feature 1..1131: note = derived and/or modified sequence opt2 fromThymidine_Kinase_TK__Herpes_Simplex_Virus_1_(HSV-1)__AA G40842
  source 1..1131: mol_type = other RNA
atggcctcctacccctgccaccagcacgcctccgccttcgaccaggccgcccgctcccgcggccactccaaccgccgcaccgccctccgcccccgccgccagcaggaggccaccgaggtccgcctcgagcagaagatgcccaccctcctccgcgtctacatcgacggcccccacggcatgggcaagaccaccaccacccagctcctcgtcgccctcggctcccgcgacgacatcgtctacgtccccgagcccatgacctactggcaggtcctcggcgcctccgagaccatcgccaacatctacaccacccagcaccgcctcgaccagggcgagatctccgccggcgacgccgccgtcgtcatgacctccgcccagatcaccatgggcatgccctacgccgtcaccgacgccgtcctcgccccccacatcggcggcgaggccggctcctcccacgcccccccccccgccctcaccctcatcttcgaccgccaccccatcgccgccctcctctgctaccccgccgcccgctacctcatgggctccatgaccccccaggccgtcctcgccttcgtcgccctcatcccccccaccctccccggcaccaacatcgtcctcggcgccctccccgaggaccgccacatcgaccgcctcgccaagcgccagcgccccggcgagcgcctcgacctcgccatgctcgccgccatccgccgcgtctacggcctcctcgccaacaccgtccgctacctccagggcggcggctcctggcgcgaggactggggccagctctccggcaccgccgtccccccccagggcgccgagccccagtccaacgccggcccccgcccccacatcggcgacaccctcttcaccctcttccgcgcccccgagctcctcgcccccaacggcgacctctacaacgtcttcgcctgggccctcgacgtcctcgccaagcgcctccgccccatgcacgtcttcatcctcgactacgaccagtcccccgccggctgccgcgacgccctcctccagctcacctccggcatggtccagacccacgtcaccacccccggctccatccccaccatctgcgacctcgcccgcaccttcgcccgcggcgtcggcgaggccaactga

SEQ ID NO: 6797 - RNA, 1131 nt, synthetic construct
  misc_feature 1..1131: note = derived and/or modified sequence opt3 fromThymidine_Kinase_TK__Herpes_Simplex_Virus_1_(HSV-1)__AA G40842
  source 1..1131: mol_type = other RNA
atggccagctacccctgccaccagcatgcttccgcattcgaccaagccgcgagatctaggggccactcaaaccggcgcaccgctctgcgacctcgtagacagcaggaggccacagaagtgaggctcgagcagaagatgccaactcttctgcgggtctatatcgatgggccgcatggaatgggtaaaacgaccacaactcaattgttagttgcactgggcagtcgcgacgatattgtgtacgtacccgaacctatgacctattggcaagtgctaggggccagcgagacaatagctaatatctacaccactcagcacagactcgaccagggagaaatttccgcaggcgatgccgctgtcgtgatgacatctgcccagatcaccatgggtatgccatatgcggttacggacgcagtgctggctccccatattgggggagaggctggctcgtcacacgcccctccacccgcacttactctgatctttgataggcaccctatagctgccttgctctgttacccagcggcccggtatctgatgggcagcatgaccccgcaggcagtcctggctttcgtggccctcattccccctacattaccagggactaacatcgtactgggagcccttcccgaggaccgccatatcgatcgattggccaagagacagaggcctggtgaacggctggacctagcaatgctcgccgctattcgtcgcgtttacggcctgcttgcgaataccgtgagatacctgcaagggggaggcagttggagggaggattggggtcagttgtccgggacagcagtcccaccccagggagccgaaccgcagtctaacgctggccctcggccccacatcggcgacaccctctttacgctgttccgagccccagagttactggcacctaatggggatctctataacgtgtttgcctgggctcttgacgtgctggccaaacgcttgagacccatgcatgtcttcatactagactacgatcaaagcccagcaggatgcagggacgcgctgctccagctgacttccggtatggttcagacacacgtgaccactcccggctcaattcctacaatctgtgatcttgctcggacctttgcccgcggggtaggagaggcaaattga

SEQ ID NO: 6798 - RNA, 1131 nt, synthetic construct
  misc_feature 1..1131: note = derived and/or modified sequence opt4 fromThymidine_Kinase_TK__Herpes_Simplex_Virus_1_(HSV-1)__AA G40842
  source 1..1131: mol_type = other RNA
atggccagctacccctgccaccagcacgccagcgccttcgaccaggccgccagaagcagaggccacagcaacagaagaaccgccctgagacccagaagacagcaggaggccaccgaggtgagactggagcagaagatgcccaccctgctgagagtgtacatcgacggcccccacggcatgggcaagaccaccaccacccagctgctggtggccctgggcagcagagacgacatcgtgtacgtgcccgagcccatgacctactggcaggtgctgggcgccagcgagaccatcgccaacatctacaccacccagcacagactggaccagggcgagatcagcgccggcgacgccgccgtggtgatgaccagcgcccagatcaccatgggcatgccctacgccgtgaccgacgccgtgctggccccccacatcggcggcgaggccggcagcagccacgcccccccccccgccctgaccctgatcttcgacagacaccccatcgccgccctgctgtgctaccccgccgccagatacctgatgggcagcatgaccccccaggccgtgctggccttcgtggccctgatcccccccaccctgcccggcaccaacatcgtgctgggcgccctgcccgaggacagacacatcgacagactggccaagagacagagacccggcgagagactggacctggccatgctggccgccatcagaagagtgtacggcctgctggccaacaccgtgagatacctgcagggcggcggcagctggagagaggactggggccagctgagcggcaccgccgtgcccccccagggcgccgagccccagagcaacgccggccccagaccccacatcggcgacaccctgttcaccctgttcagagcccccgagctgctggcccccaacggcgacctgtacaacgtgttcgcctgggccctggacgtgctggccaagagactgagacccatgcacgtgttcatcctggactacgaccagagccccgccggctgcagagacgccctgctgcagctgaccagcggcatggtgcagacccacgtgaccacccccggcagcatccccaccatctgcgacctggccagaaccttcgccagaggcgtgggcgaggccaactga

SEQ ID NO: 6799 - RNA, 1131 nt, synthetic construct
  misc_feature 1..1131: note = derived and/or modified sequence opt5 fromThymidine_Kinase_TK__Herpes_Simplex_Virus_1_(HSV-1)__AA G40842
  source 1..1131: mol_type = other RNA
atggccagctacccctgccaccagcatgcttccgccttcgaccaagcggctagatctcggggccacagcaaccgcagaaccgccctgcggcctcgcagacagcaggaggccacagaagtgcggctcgagcagaagatgccgacgctgcttcgcgtctatatcgatgggccccatggaatgggcaaaaccacaaccacacaactgctcgttgctctggggtccagagacgatattgtgtacgtgcctgaacccatgacctattggcaggtccttggagcctctgagacaatcgctaatatttacaccacgcagcaccggctggaccagggcgaaatcagcgccggggatgcggccgtggttatgacctccgctcaaattacaatgggaatgccttatgccgtgaccgacgctgtcctcgcgccccatatcggcggcgaggccgggtctagccacgcccctccgcccgctctgacactgatctttgatcgccaccctattgccgctctcctgtgttaccccgccgccagatatcttatgggatccatgacccctcaggctgtgctggcgttcgttgccctcattcccccgacgctgcctggcacaaacatcgtgcttggggctctgcccgaggaccggcatatcgatcgcctcgccaagagacagcggcctggagaacgcctggacctggccatgctcgctgccattagacgggtctacggcctgcttgcgaataccgtgagatacctgcaagggggaggcagctggcgcgaggattggggccagctctctgggacagctgtgcctccccagggagccgaaccccagtccaacgccggcccgcggccccacatcggggacaccctgtttacccttttcagagctcctgagctgctcgcccccaatggagatctgtataacgtctttgcttgggccctggacgttctcgcgaaacgcctgcggcctatgcatgtgttcattcttgactacgatcaaagccccgccggctgcagagacgctctgctccagctgacatctgggatggtgcagacgcacgtcaccacaccgggatccatccctaccatctgtgatcttgcccgcacatttgctcggggcgtgggcgaggccaattga

SEQ ID NO: 6800 - RNA, 1131 nt, synthetic construct
  misc_feature 1..1131: note = derived and/or modified sequence opt6 fromThymidine_Kinase_TK__Herpes_Simplex_Virus_1_(HSV-1)__AA G40842
  source 1..1131: mol_type = other RNA
atggcttcatatccatgtcatcaacacgcatcagcattcgatcaagccgcaagatcaagaggtcattcaaatagaagaacagcactaagaccaagaagacaacaagaagcaactgaagtaagactagaacaaaaaatgccaactttactaagagtttatattgatggcccacatggcatgggaaaaacaactacaacacaactcctagtagcattaggctcacgagatgatatagtatacgtcccagaaccaatgacatattggcaagtattaggagcatcagaaacaatagctaatatatatacaacacaacatagactcgatcaaggtgaaatatcagcaggtgatgcagcagtagtaatgacatcagcacaaataacaatgggaatgccatacgcagtaacagacgcagtactagcaccccacataggaggtgaagccggttcatcacatgcaccaccacctgcactaacactaatatttgatcgacatcccatagctgcattattatgttaccctgcagcaagatatctaatgggatcaatgacaccacaagcagtattagcatttgtcgcactaataccaccaactttaccaggaacaaatatagtattaggagcactaccagaagacaggcatatagatagactagcaaaaagacaaagaccaggagaacgcttagatctagcaatgctagcagcaattaggagagtatatggattattagcaaatacagttagatatttacaaggcggtggatcatggagagaggattggggacaattatcaggtactgcagtaccacctcaaggagcagaaccacaatcaaacgccggaccgagaccacatataggtgatacattattcacattatttagagccccagaactactagcaccaaatggtgatttatataacgtattcgcatgggccttagatgtactagcaaaaaggttaagacccatgcatgttttcatattagattatgatcaaagtccagcaggatgtagagatgctctactacaattaacaagtggaatggttcaaactcatgtaacaacaccaggatccataccaacaatatgtgatttagcaagaactttcgcaagaggagtaggtgaagcaaattaa

SEQ ID NO: 6801 - protein, 280 aa, synthetic construct
  REGION 1..280: note Thymidine_Kinase_TK__Herpes_Simplex_Virus_1_(HSV-1)__Q9ENS0
MASYPCHQHASAFDQAARSRGHSNRRTALRPRRQQEATEVRLEQKMPTLLRVYIDGPHGMGKTTTTQLLVALGSRDDIVYVPEPMTYWQVLGASETIANIYTTQHRLDQGEISAGDAAVVMTSAQITMGMPYAVTDAVLAPHIGGEAGSSHAPPPALTLIFDRHPIAALLCYPAARYLMGSMTPQAVLAFVALIPPTLPGTNIVLGALPEDRHIDRLAKRQRPGERLDLAMLAAIRRVYGLLANTVRYLQGGGSWREDWGQLSGTAVPPQGAEPQSNAGP

SEQ ID NO: 6802 - RNA, 843 nt, synthetic construct
  misc_feature 1..843: note Thymidine_Kinase_TK__Herpes_Simplex_Virus_1_(HSV-1)__AEL300 83
  source 1..843: mol_type = other RNA
atggcttcgtacccctgccatcaacacgcgtctgcgttcgaccaggctgcgcgttctcgcggccatagcaaccgacgtacggcgttgcgccctcgccggcagcaagaagccacggaagtccgcctggagcagaaaatgcccacgctactgcgggtttatatagacggtcctcacgggatggggaaaaccaccaccacgcaactgctggtggccctgggttcgcgcgacgatatcgtctacgtacccgagccgatgacttactggcaggtgctgggggcttccgagacaatcgcgaacatctacaccacacaacaccgcctcgaccagggtgagatatcggccggggacgcggcggtggtaatgacaagcgcccagataacaatgggcatgccttatgccgtgaccgacgccgttctggctcctcatatcgggggggaggctgggagctcacatgccccgcccccggccctcaccctcatcttcgaccgccatcccatcgccgccctcctgtgctacccggccgcgcgataccttatgggcagcatgaccccccaggccgtgctggcgttcgtggccctcatcccgccgaccttgcccggcacaaacatcgtgttgggggcccttccggaggacagacacatcgaccgcctggccaaacgccagcgccccggcgagcggcttgacctggctatgctggccgcgattcgccgcgtttacgggctgcttgccaatacggtgcggtatctgcagggcggcgggtcgtggcgggaggattggggacagctttcggggacggccgtgccgccccagggtgccgagccccagagcaacgcgggcccatga

SEQ ID NO: 6803 - RNA, 843 nt, synthetic construct
  misc_feature 1..843: note = derived and/or modified sequence opt1 fromThymidine_Kinase_TK__Herpes_Simplex_Virus_1_(HSV-1)__AE L30083
  source 1..843: mol_type = other RNA
atggccagctacccctgccaccagcacgcctccgcgttcgaccaggccgcccgcagccggggccactccaaccgccggaccgccctgcgcccgcggcgccagcaggaggccaccgaggtgcggctcgagcagaagatgcccacgctgctgcgcgtctacatcgacgggccccacggcatggggaagaccaccaccacgcagctcctggtggcgctgggcagccgggacgacatcgtgtacgtccccgagccgatgacctactggcaggtcctcggggcctccgagaccatcgccaacatctacaccacgcagcaccgcctggaccagggcgagatcagcgccggcgacgcggccgtggtgatgacctccgcccagatcaccatggggatgccctacgccgtgaccgacgccgtgctggcgccccacatcggcggggaggccggcagctcccacgcgcccccgcccgccctcacgctgatcttcgaccggcaccccatcgccgccctgctctgctaccccgccgcccgctacctgatggggagcatgaccccgcaggccgtcctggccttcgtggcgctcatcccgcccaccctgcccggcaccaacatcgtgctgggcgccctccccgaggaccggcacatcgaccgcctggccaagcggcagcgccccggggagcggctggacctcgccatgctggccgcgatccgccgggtctacggcctgctcgccaacacggtgcgctacctgcagggcgggggctcctggcgggaggactgggggcagctgagcggcaccgccgtgccgccccagggggccgagccccagtccaacgcgggcccctga

SEQ ID NO: 6804 - RNA, 843 nt, synthetic construct
  misc_feature 1..843: note = derived and/or modified sequence opt2 fromThymidine_Kinase_TK__Herpes_Simplex_Virus_1_(HSV-1)__AE L30083
  source 1..843: mol_type = other RNA
atggcctcctacccctgccaccagcacgcctccgccttcgaccaggccgcccgctcccgcggccactccaaccgccgcaccgccctccgcccccgccgccagcaggaggccaccgaggtccgcctcgagcagaagatgcccaccctcctccgcgtctacatcgacggcccccacggcatgggcaagaccaccaccacccagctcctcgtcgccctcggctcccgcgacgacatcgtctacgtccccgagcccatgacctactggcaggtcctcggcgcctccgagaccatcgccaacatctacaccacccagcaccgcctcgaccagggcgagatctccgccggcgacgccgccgtcgtcatgacctccgcccagatcaccatgggcatgccctacgccgtcaccgacgccgtcctcgccccccacatcggcggcgaggccggctcctcccacgcccccccccccgccctcaccctcatcttcgaccgccaccccatcgccgccctcctctgctaccccgccgcccgctacctcatgggctccatgaccccccaggccgtcctcgccttcgtcgccctcatcccccccaccctccccggcaccaacatcgtcctcggcgccctccccgaggaccgccacatcgaccgcctcgccaagcgccagcgccccggcgagcgcctcgacctcgccatgctcgccgccatccgccgcgtctacggcctcctcgccaacaccgtccgctacctccagggcggcggctcctggcgcgaggactggggccagctctccggcaccgccgtccccccccagggcgccgagccccagtccaacgccggcccctga

SEQ ID NO: 6805 - RNA, 843 nt, synthetic construct
  misc_feature 1..843: note = derived and/or modified sequence opt3 fromThymidine_Kinase_TK__Herpes_Simplex_Virus_1_(HSV-1)__AE L30083
  source 1..843: mol_type = other RNA
atggccagctacccctgccaccagcatgcttccgcattcgaccaagccgcgagatctaggggccactcaaaccggcgcaccgctctgcgacctcgtagacagcaggaggccacagaagtgaggctcgagcagaagatgccaactcttctgcgggtctatatcgatgggccgcatggaatgggtaaaacgaccacaactcaattgttagttgcactgggcagtcgcgacgatattgtgtacgtacccgaacctatgacctattggcaagtgctaggggccagcgagacaatagctaatatctacaccactcagcacagactcgaccagggagaaatttccgcaggcgatgccgctgtcgtgatgacatctgcccagatcaccatgggtatgccatatgcggttacggacgcagtgctggctccccatattgggggagaggctggctcgtcacacgcccctccacccgcacttactctgatctttgataggcaccctatagctgccttgctctgttacccagcggcccggtatctgatgggcagcatgaccccgcaggcagtcctggctttcgtggccctcattccccctacattaccagggactaacatcgtactgggagcccttcccgaggaccgccatatcgatcgattggccaagagacagaggcctggtgaacggctggacctagcaatgctcgccgctattcgtcgcgtttacggcctgcttgcgaataccgtgagatacctgcaagggggaggcagttggagggaggattggggtcagttgtccgggacagcagtcccaccccagggagccgaaccgcagtctaacgctggcccttga

SEQ ID NO: 6806 - RNA, 843 nt, synthetic construct
  misc_feature 1..843: note = derived and/or modified sequence opt4 fromThymidine_Kinase_TK__Herpes_Simplex_Virus_1_(HSV-1)__AE L30083
  source 1..843: mol_type = other RNA
atggccagctacccctgccaccagcacgccagcgccttcgaccaggccgccagaagcagaggccacagcaacagaagaaccgccctgagacccagaagacagcaggaggccaccgaggtgagactggagcagaagatgcccaccctgctgagagtgtacatcgacggcccccacggcatgggcaagaccaccaccacccagctgctggtggccctgggcagcagagacgacatcgtgtacgtgcccgagcccatgacctactggcaggtgctgggcgccagcgagaccatcgccaacatctacaccacccagcacagactggaccagggcgagatcagcgccggcgacgccgccgtggtgatgaccagcgcccagatcaccatgggcatgccctacgccgtgaccgacgccgtgctggccccccacatcggcggcgaggccggcagcagccacgcccccccccccgccctgaccctgatcttcgacagacaccccatcgccgccctgctgtgctaccccgccgccagatacctgatgggcagcatgaccccccaggccgtgctggccttcgtggccctgatcccccccaccctgcccggcaccaacatcgtgctgggcgccctgcccgaggacagacacatcgacagactggccaagagacagagacccggcgagagactggacctggccatgctggccgccatcagaagagtgtacggcctgctggccaacaccgtgagatacctgcagggcggcggcagctggagagaggactggggccagctgagcggcaccgccgtgcccccccagggcgccgagccccagagcaacgccggcccctga

SEQ ID NO: 6807 - RNA, 843 nt, synthetic construct
  misc_feature 1..843: note = derived and/or modified sequence opt5 fromThymidine_Kinase_TK__Herpes_Simplex_Virus_1_(HSV-1)__AE L30083
  source 1..843: mol_type = other RNA
atggccagctacccctgccaccagcatgcttccgccttcgaccaagcggctagatctcggggccacagcaaccgcagaaccgccctgcggcctcgcagacagcaggaggccacagaagtgcggctcgagcagaagatgccgacgctgcttcgcgtctatatcgatgggccccatggaatgggcaaaaccacaaccacacaactgctcgttgctctggggtccagagacgatattgtgtacgtgcctgaacccatgacctattggcaggtccttggagcctctgagacaatcgctaatatttacaccacgcagcaccggctggaccagggcgaaatcagcgccggggatgcggccgtggttatgacctccgctcaaattacaatgggaatgccttatgccgtgaccgacgctgtcctcgcgccccatatcggcggcgaggccgggtctagccacgcccctccgcccgctctgacactgatctttgatcgccaccctattgccgctctcctgtgttaccccgccgccagatatcttatgggatccatgacccctcaggctgtgctggcgttcgttgccctcattcccccgacgctgcctggcacaaacatcgtgcttggggctctgcccgaggaccggcatatcgatcgcctcgccaagagacagcggcctggagaacgcctggacctggccatgctcgctgccattagacgggtctacggcctgcttgcgaataccgtgagatacctgcaagggggaggcagctggcgcgaggattggggccagctctctgggacagctgtgcctccccagggagccgaaccccagtccaacgccggcccgtga

SEQ ID NO: 6808 - RNA, 843 nt, synthetic construct
  misc_feature 1..843: note = derived and/or modified sequence opt6 fromThymidine_Kinase_TK__Herpes_Simplex_Virus_1_(HSV-1)__AE L30083
  source 1..843: mol_type = other RNA
atggcatcatatccatgccatcaacatgcaagcgcatttgatcaagcagcaagatcaagaggacatagcaatagaagaactgcattaagaccaagaagacaacaagaagcaacagaagtaagattagaacaaaaaatgccaacactactaagagtatatatagatggaccacacggcatgggaaaaaccacaactacacaactattagtagctctaggaagcagagatgatatagtatatgttccagaaccaatgacatattggcaagtactcggagcatcagaaacaatagcaaatatatacacaacacaacatagacttgatcaaggagaaataagcgcaggtgatgcagctgttgttatgacaagcgcacaaataacaatgggaatgccatatgcagtaaccgatgcagtattagcacctcacataggaggagaagcaggaagtagccatgcaccaccaccagcattaacactaatatttgaccgacacccaatagcagcattactatgttatccagcagcaagatatctaatgggaagtatgacaccacaagcagtactagcatttgtagcattaatacccccaacattaccaggaacaaatatagtattaggagcactaccagaagatagacatatagatagattagcaaaaagacaaagaccaggagaaagattagatttagcaatgttagcagcaataaggagagtatatggattattagcaaatacagtaagatatttacaaggaggaggatcatggagagaagactggggacaattatcaggaacagcagtaccaccacaaggagcagaacctcaatcaaatgcaggaccataa

SEQ ID NO: 6809 - protein, 108 aa, synthetic construct
  REGION 1..108: note Thymidine_Kinase_TK__Herpes_Simplex_Virus_1_(HSV-1)__Q9ENS1
MASYPCHQHASAFDQAARSRGHSNRRTALRPRRQQEATEVRLEQKMPTLLRVYIDGPHGMGKTTTTQLLVALGSRDDIVYVPEPMTYWQVLGASETIANIYTTQHRLD

SEQ ID NO: 6810 - RNA, 327 nt, synthetic construct
  misc_feature 1..327: note Thymidine_Kinase_TK__Herpes_Simplex_Virus_1_(HSV-1)__BAB119 46
  source 1..327: mol_type = other RNA
atggcttcgtacccctgccatcaacacgcgtctgcgttcgaccaggctgcgcgttctcgcggccatagcaaccgacgtacggcgttgcgccctcgccggcagcaagaagccacggaagtccgcctggagcagaaaatgcccacgctactgcgggtttatatagacggtcctcacgggatggggaaaaccaccaccacgcaactgctggtggccctgggttcgcgcgacgatatcgtctacgtacccgagccgatgacttactggcaggtgctgggggcttccgagacaatcgcgaacatctacaccacacaacaccgcctcgactag

SEQ ID NO: 6811 - RNA, 327 nt, synthetic construct
  misc_feature 1..327: note = derived and/or modified sequence opt1 fromThymidine_Kinase_TK__Herpes_Simplex_Virus_1_(HSV-1)__BA B11946
  source 1..327: mol_type = other RNA
atggccagctacccctgccaccagcacgcctccgcgttcgaccaggccgcccgcagccggggccactccaaccgccggaccgccctgcgcccgcggcgccagcaggaggccaccgaggtgcggctcgagcagaagatgcccacgctgctgcgcgtgtacatcgacgggccccacggcatggggaagaccaccaccacgcagctcctggtggcgctgggcagccgggacgacatcgtgtacgtccccgagccgatgacctactggcaggtcctcggggcctccgagaccatcgccaacatctacaccacgcagcaccgcctggactga

SEQ ID NO: 6812 - RNA, 327 nt, synthetic construct
  misc_feature 1..327: note = derived and/or modified sequence opt2 fromThymidine_Kinase_TK__Herpes_Simplex_Virus_1_(HSV-1)__BA B11946
  source 1..327: mol_type = other RNA
atggcctcctacccctgccaccagcacgcctccgccttcgaccaggccgcccgctcccgcggccactccaaccgccgcaccgccctccgcccccgccgccagcaggaggccaccgaggtccgcctcgagcagaagatgcccaccctcctccgcgtctacatcgacggcccccacggcatgggcaagaccaccaccacccagctcctcgtcgccctcggctcccgcgacgacatcgtctacgtccccgagcccatgacctactggcaggtcctcggcgcctccgagaccatcgccaacatctacaccacccagcaccgcctcgactga

SEQ ID NO: 6813 - RNA, 327 nt, synthetic construct
  misc_feature 1..327: note = derived and/or modified sequence opt3 fromThymidine_Kinase_TK__Herpes_Simplex_Virus_1_(HSV-1)__BA B11946
  source 1..327: mol_type = other RNA
atggccagctacccctgccaccagcatgcttccgcattcgaccaggccgcgagatctaggggccactcaaaccggcgcaccgctctgcgacctcgtagacagcaggaggccacagaagtgaggctcgagcagaagatgccaactcttctgcgggtctatatcgatgggccgcatggaatgggtaaaacgaccacaactcaattgttagttgcactgggcagtcgcgacgatattgtgtacgtacccgaacctatgacctattggcaagtgctaggggccagcgagacaatagctaatatctacaccactcagcacagactcgactga

SEQ ID NO: 6814 - RNA, 327 nt, synthetic construct
  misc_feature 1..327: note = derived and/or modified sequence opt4 fromThymidine_Kinase_TK__Herpes_Simplex_Virus_1_(HSV-1)__BA B11946
  source 1..327: mol_type = other RNA
atggccagctacccctgccaccagcacgccagcgccttcgaccaggccgccagaagcagaggccacagcaacagaagaaccgccctgagacccagaagacagcaggaggccaccgaggtgagactggagcagaagatgcccaccctgctgagagtgtacatcgacggcccccacggcatgggcaagaccaccaccacccagctgctggtggccctgggcagcagagacgacatcgtgtacgtgcccgagcccatgacctactggcaggtgctgggcgccagcgagaccatcgccaacatctacaccacccagcacagactggactga

SEQ ID NO: 6815 - RNA, 327 nt, synthetic construct
  misc_feature 1..327: note = derived and/or modified sequence opt5 fromThymidine_Kinase_TK__Herpes_Simplex_Virus_1_(HSV-1)__BA B11946
  source 1..327: mol_type = other RNA
atggccagctacccctgccaccagcatgcttccgccttcgaccaagcggctagatctcggggccacagcaaccgcagaaccgccctgcggcctcgcagacagcaggaggccacagaagtgcggctcgagcagaagatgccgacgctgcttcgcgtctatatcgatgggccccatggaatgggcaaaaccacaaccacacaactgctcgttgctctggggtccagagacgatattgtgtacgtgcctgaacccatgacctattggcaggtccttggagcctctgagacaatcgctaatatttacaccacgcagcaccggctggactga

SEQ ID NO: 6816 - RNA, 327 nt, synthetic construct
  misc_feature 1..327: note = derived and/or modified sequence opt6 fromThymidine_Kinase_TK__Herpes_Simplex_Virus_1_(HSV-1)__BA B11946
  source 1..327: mol_type = other RNA
atggcatcatacccatgccaccaacacgcatcagcattcgaccaagcagcaagatcaagaggacactcaaacagaagaacagcactaagaccaagaagacaacaagaagcaacagaagtaagactagaacaaaaaatgccaacactactaagagtatacatagacggaccacacggaatgggaaaaacaacaacaacacaactactagtagcactaggatcaagagacgacatagtatacgtaccagaaccaatgacatactggcaagtactaggagcatcagaaacaatagcaaacatatacacaacacaacacagactagactaa

SEQ ID NO: 6817 - protein, 103 aa, synthetic construct
  REGION 1..103: note Thymidine_Kinase_TK__Herpes_Simplex_Virus_1_(HSV-1)__Q9ENS2
MASYPCHQHASAFDQAARSRGHSNRRTALRPRRQQEATEVRLEQKMPTLLRVYIDGPHGMGKTTTTQLLVALGSRDDIVYVPEPMTYWQVLGASETIANIYTT

SEQ ID NO: 6818 - RNA, 312 nt, synthetic construct
  misc_feature 1..312: note Thymidine_Kinase_TK__Herpes_Simplex_Virus_1_(HSV-1)__BAB119 45
  source 1..312: mol_type = other RNA
atggcttcgtacccctgccatcaacacgcgtctgcgttcgaccaggctgcgcgttctcgcggccatagcaaccgacgtacggcgttgcgccctcgccggcagcaagaagccacggaagtccgcctggagcagaaaatgcccacgctactgcgggtttatatagacggtcctcacgggatggggaaaaccaccaccacgcaactgctggtggccctgggttcgcgcgacgatatcgtctacgtacccgagccgatgacttactggcaggtgctgggggcttccgagacaatcgcgaacatctacaccacataa

SEQ ID NO: 6819 - RNA, 312 nt, synthetic construct
  misc_feature 1..312: note = derived and/or modified sequence opt1 fromThymidine_Kinase_TK__Herpes_Simplex_Virus_1_(HSV-1)__BA B11945
  source 1..312: mol_type = other RNA
atggccagctacccctgccaccagcacgcctccgcgttcgaccaggccgcccgcagccggggccactccaaccgccggaccgccctgcgcccgcggcgccagcaggaggccaccgaggtgcggctcgagcagaagatgcccacgctgctgcgcgtgtacatcgacgggccccacggcatggggaagaccaccaccacgcagctcctggtggcgctgggcagccgggacgacatcgtgtacgtccccgagccgatgacctactggcaggtcctcggggcctccgagaccatcgccaacatctacaccacgtga

SEQ ID NO: 6820 - RNA, 312 nt, synthetic construct
  misc_feature 1..312: note = derived and/or modified sequence opt2 fromThymidine_Kinase_TK__Herpes_Simplex_Virus_1_(HSV-1)__BA B11945
  source 1..312: mol_type = other RNA
atggcctcctacccctgccaccagcacgcctccgccttcgaccaggccgcccgctcccgcggccactccaaccgccgcaccgccctccgcccccgccgccagcaggaggccaccgaggtccgcctcgagcagaagatgcccaccctcctccgcgtctacatcgacggcccccacggcatgggcaagaccaccaccacccagctcctcgtcgccctcggctcccgcgacgacatcgtctacgtccccgagcccatgacctactggcaggtcctcggcgcctccgagaccatcgccaacatctacaccacctga

SEQ ID NO: 6821 - RNA, 312 nt, synthetic construct
  misc_feature 1..312: note = derived and/or modified sequence opt3 fromThymidine_Kinase_TK__Herpes_Simplex_Virus_1_(HSV-1)__BA B11945
  source 1..312: mol_type = other RNA
atggccagctacccctgccaccagcatgcttccgcattcgaccaggccgcgagatctaggggccactcaaaccggcgcaccgctctgcgacctcgtagacagcaggaggccacagaagtgaggctcgagcagaagatgccaactcttctgcgggtctatatcgatgggccgcatggaatgggtaaaacgaccacaactcaattgttagttgcactgggcagtcgcgacgatattgtgtacgtacccgaacctatgacctattggcaagtgctaggggccagcgagacaatagctaatatctacaccacttga

SEQ ID NO: 6822 - RNA, 312 nt, synthetic construct
  misc_feature 1..312: note = derived and/or modified sequence opt4 fromThymidine_Kinase_TK__Herpes_Simplex_Virus_1_(HSV-1)__BA B11945
  source 1..312: mol_type = other RNA
atggccagctacccctgccaccagcacgccagcgccttcgaccaggccgccagaagcagaggccacagcaacagaagaaccgccctgagacccagaagacagcaggaggccaccgaggtgagactggagcagaagatgcccaccctgctgagagtgtacatcgacggcccccacggcatgggcaagaccaccaccacccagctgctggtggccctgggcagcagagacgacatcgtgtacgtgcccgagcccatgacctactggcaggtgctgggcgccagcgagaccatcgccaacatctacaccacctga

SEQ ID NO: 6823 - RNA, 312 nt, synthetic construct
  misc_feature 1..312: note = derived and/or modified sequence opt5 fromThymidine_Kinase_TK__Herpes_Simplex_Virus_1_(HSV-1)__BA B11945
  source 1..312: mol_type = other RNA
atggccagctacccctgccaccagcatgcttccgccttcgaccaagcggctagatctcggggccacagcaaccgcagaaccgccctgcggcctcgcagacagcaggaggccacagaagtgcggctcgagcagaagatgccgacgctgcttcgcgtctatatcgatgggccccatggaatgggcaaaaccacaaccacacaactgctcgttgctctggggtccagagacgatattgtgtacgtgcctgaacccatgacctattggcaggtccttggagcctctgagacaatcgctaatatttacaccacgtga

SEQ ID NO: 6824 - RNA, 312 nt, synthetic construct
  misc_feature 1..312: note = derived and/or modified sequence opt6 fromThymidine_Kinase_TK__Herpes_Simplex_Virus_1_(HSV-1)__BA B11945
  source 1..312: mol_type = other RNA
atggcatcatacccatgccaccaacacgcatcagcattcgaccaagcagcaagatcaagaggacactcaaacagaagaacagcactaagaccaagaagacaacaagaagcaacagaagtaagactagaacaaaaaatgccaacactactaagagtatacatagacggaccacacggaatgggaaaaacaacaacaacacaactactagtagcactaggatcaagagacgacatagtatacgtaccagaaccaatgacatactggcaagtactaggagcatcagaaacaatagcaaacatatacacaacataa

SEQ ID NO: 6825 - protein, 262 aa, synthetic construct
  REGION 1..262: note Thymidine_Kinase_TK__Herpes_Simplex_Virus_1_(HSV-1)__Q9ENS3
MASYPCHQHASAFDQAARSRGHSNRRTALRPRRQQEATEVRLEQKMPTLLRVYIDGPHGMGKTTTTQLLVALGSRDDIVYVPEPMTYWQVLGASETIANIYTTQHRLDQGEISAGDAAVVMTSAQITMGMPYAAHDPISGTRYLPCFGPPSCWPPTATCITCLPGPWTSWPNASVPCTSLSWITTNRPPAAGTPCCNLPPGWSRPTSPPQAPYRRSATWRARLPGRWGRLTETRKETIPEGTRAMTAIKRQNKTHGCWVVCS

SEQ ID NO: 6826 - RNA, 789 nt, synthetic construct
  misc_feature 1..789: note Thymidine_Kinase_TK__Herpes_Simplex_Virus_1_(HSV-1)__BAB119 44
  source 1..789: mol_type = other RNA
atggcttcgtacccctgccatcaacacgcgtctgcgttcgaccaggctgcgcgttctcgcggccatagcaaccgacgtacggcgttgcgccctcgccggcagcaagaagccacggaagtccgcctggagcagaaaatgcccacgctactgcgggtttatatagacggtcctcacgggatggggaaaaccaccaccacgcaactgctggtggccctgggttcgcgcgacgatatcgtctacgtacccgagccgatgacttactggcaggtgctgggggcttccgagacaatcgcgaacatctacaccacacaacaccgcctcgaccagggtgagatatcggccggggacgcggcggtggtaatgacaagcgcccagataacaatgggcatgccttatgccgcccacgaccccatatcggggacacgttatttaccctgtttcgggcccccgagttgctggcccccaacggcgacctgtataacgtgtttgcctgggccttggacgtcttggccaaacgcctccgtcccatgcacgtctttatcctggattacgaccaatcgcccgccggctgccgggacgccctgctgcaacttacctccgggatggtccagacccacgtcaccaccccaggctccataccgacgatctgcgacctggcgcgcacgtttgcccgggagatgggggaggctaactgaaacacggaaggagacaataccggaaggaacccgcgctatgacggcaataaaaagacagaataaaacgcacgggtgttgggtcgtttgttcataa

SEQ ID NO: 6827 - RNA, 789 nt, synthetic construct
  misc_feature 1..789: note = derived and/or modified sequence opt1 fromThymidine_Kinase_TK__Herpes_Simplex_Virus_1_(HSV-1)__BA B11944
  source 1..789: mol_type = other RNA
atggccagctacccctgccaccagcacgcctccgcgttcgaccaggccgcccgcagccggggccactccaaccgccggaccgccctgcgcccgcggcgccagcaggaggccaccgaggtgcggctcgagcagaagatgcccacgctgctgcgcgtctacatcgacgggccccacggcatggggaagaccaccaccacgcagctcctggtggcgctgggcagccgggacgacatcgtgtacgtccccgagccgatgacctactggcaggtcctcggggcctccgagaccatcgccaacatctacaccacgcagcaccgcctggaccagggcgagatcagcgccggcgacgcggccgtggtgatgacctccgcccagatcaccatggggatgccctacgccgcccacgaccccatcagcggcacccggtacctgccctgcttcgggccgccctcctgctggccgcccacggcgacctgcatcacgtgcctccccggcccctggaccagctggcccaacgcctccgtgccctgcaccagcctgtcctggatcaccaccaaccgcccgcccgccgccgggaccccctgctgcaacctgcccccgggctggagccggcccacgtccccgccccaggccccctaccgccggagcgcgacctggcgcgcccggctccccggccgctgggggcggctgaccgagacccgcaaggagacgatccccgagggcacccgggccatgaccgccatcaagcgccagaacaagacccacgggtgctgggtggtctgctcctga

SEQ ID NO: 6828 - RNA, 789 nt, synthetic construct
  misc_feature 1..789: note = derived and/or modified sequence opt2 fromThymidine_Kinase_TK__Herpes_Simplex_Virus_1_(HSV-1)__BA B11944
  source 1..789: mol_type = other RNA
atggcctcctacccctgccaccagcacgcctccgccttcgaccaggccgcccgctcccgcggccactccaaccgccgcaccgccctccgcccccgccgccagcaggaggccaccgaggtccgcctcgagcagaagatgcccaccctcctccgcgtctacatcgacggcccccacggcatgggcaagaccaccaccacccagctcctcgtcgccctcggctcccgcgacgacatcgtctacgtccccgagcccatgacctactggcaggtcctcggcgcctccgagaccatcgccaacatctacaccacccagcaccgcctcgaccagggcgagatctccgccggcgacgccgccgtcgtcatgacctccgcccagatcaccatgggcatgccctacgccgcccacgaccccatctccggcacccgctacctcccctgcttcggccccccctcctgctggccccccaccgccacctgcatcacctgcctccccggcccctggacctcctggcccaacgcctccgtcccctgcacctccctctcctggatcaccaccaaccgcccccccgccgccggcaccccctgctgcaacctcccccccggctggtcccgccccacctcccccccccaggccccctaccgccgctccgccacctggcgcgcccgcctccccggccgctggggccgcctcaccgagacccgcaaggagaccatccccgagggcacccgcgccatgaccgccatcaagcgccagaacaagacccacggctgctgggtcgtctgctcctga

SEQ ID NO: 6829 - RNA, 789 nt, synthetic construct
  misc_feature 1..789: note = derived and/or modified sequence opt3 fromThymidine_Kinase_TK__Herpes_Simplex_Virus_1_(HSV-1)__BA B11944
  source 1..789: mol_type = other RNA
atggccagctacccctgccaccagcatgcttccgcattcgaccaagccgcgagatctaggggccactcaaaccggcgcaccgctctgcgacctcgtagacagcaggaggccacagaagtgaggctcgagcagaagatgccaactcttctgcgggtctatatcgatgggccgcatggaatgggtaaaacgaccacaactcaattgttagttgcactgggcagtcgcgacgatattgtgtacgtacccgaacctatgacctattggcaagtgctaggggccagcgagacaatagctaatatctacaccactcagcacagactcgaccagggagaaatttccgcaggcgatgccgctgtcgtgatgacatctgcccagatcaccatgggtatgccatatgcggcacatgaccccatttcggggacgaggtacctgccttgttttggaccaccctcatgctggcctccaactgccacctgtatcacatgccttccgggcccctggactagctggcctaacgctagtgttccatgtacctccctgtcttggataacaaccaatcggccccctgccgcaggcacgccatgctgtaacttgcccccggggtggagccgccctacttcacccccacaggctccttatcgaagatccgccacatggagggcgcggctccccggacgttggggtcgcctgaccgagactagaaaggagacaatcccagaaggcaccagggccatgacggcaattaaacggcagaataagacccacgggtgctgggtggtctgtagttga

SEQ ID NO: 6830 - RNA, 789 nt, synthetic construct
  misc_feature 1..789: note = derived and/or modified sequence opt4 fromThymidine_Kinase_TK__Herpes_Simplex_Virus_1_(HSV-1)__BA B11944
  source 1..789: mol_type = other RNA
atggccagctacccctgccaccagcacgccagcgccttcgaccaggccgccagaagcagaggccacagcaacagaagaaccgccctgagacccagaagacagcaggaggccaccgaggtgagactggagcagaagatgcccaccctgctgagagtgtacatcgacggcccccacggcatgggcaagaccaccaccacccagctgctggtggccctgggcagcagagacgacatcgtgtacgtgcccgagcccatgacctactggcaggtgctgggcgccagcgagaccatcgccaacatctacaccacccagcacagactggaccagggcgagatcagcgccggcgacgccgccgtggtgatgaccagcgcccagatcaccatgggcatgccctacgccgcccacgaccccatcagcggcaccagatacctgccctgcttcggcccccccagctgctggccccccaccgccacctgcatcacctgcctgcccggcccctggaccagctggcccaacgccagcgtgccctgcaccagcctgagctggatcaccaccaacagaccccccgccgccggcaccccctgctgcaacctgccccccggctggagcagacccaccagccccccccaggccccctacagaagaagcgccacctggagagccagactgcccggcagatggggcagactgaccgagaccagaaaggagaccatccccgagggcaccagagccatgaccgccatcaagagacagaacaagacccacggctgctgggtggtgtgcagctga

SEQ ID NO: 6831 - RNA, 789 nt, synthetic construct
  misc_feature 1..789: note = derived and/or modified sequence opt5 fromThymidine_Kinase_TK__Herpes_Simplex_Virus_1_(HSV-1)__BA B11944
  source 1..789: mol_type = other RNA
atggccagctacccctgccaccagcatgcttccgccttcgaccaagcggctagatctcggggccacagcaaccgcagaaccgccctgcggcctcgcagacagcaggaggccacagaagtgcggctcgagcagaagatgccgacgctgcttcgcgtctatatcgatgggccccatggaatgggcaaaaccacaaccacacaactgctcgttgctctggggtccagagacgatattgtgtacgtgcctgaacccatgacctattggcaggtccttggagcctctgagacaatcgctaatatttacaccacgcagcaccggctggaccagggcgaaatcagcgccggggatgcggccgtggttatgacctccgctcaaattacaatgggaatgccttatgccgctcatgaccccatctctggcacccgctacctcccttgttttggcccgcccagctgctggcctcccacagccacctgtatcacgtgcctgcctgggccctggacatcctggccgaacgcgagcgtgccttgtacctctctgtcctggattacaaccaatagaccccctgccgctggaaccccctgctgtaacctgccccctggctggagccggccgacatctccccctcaggccccctatcgcagatccgctacgtggcgggcccgcctccctgggagatggggacggcttaccgagacaagaaaggagaccatccccgaaggcacacgcgccatgaccgctattaaacggcagaataagacgcacgggtgctgggtcgtgtgtagctga

SEQ ID NO: 6832 - RNA, 789 nt, synthetic construct
  misc_feature 1..789: note = derived and/or modified sequence opt6 fromThymidine_Kinase_TK__Herpes_Simplex_Virus_1_(HSV-1)__BA B11944
  source 1..789: mol_type = other RNA
atggcatcctacccttgccatcaacatgcctcagcatttgaccaagcagctagatcaagaggacactcaaacagaagaacagcattaagaccaagacgacaacaagaagcaacagaagtaagactagaacaaaaaatgccaacactactaagagtatatatagatggaccacatggaatgggaaaaacaacaacaacacaactcttagtagcactaggatcaagagacgatatagtatacgtaccagaaccaatgacatattggcaagtattaggagcatcagaaacaatagcaaacatatatacaacacaacatcgattagatcaaggagaaatatcagcaggagacgcagcagtggtaatgacatcagcacaaatcactatgggaatgccatacgcagcacatgaccccatatccggaacaagatatctaccatgcttcggaccaccatcatgctggccaccaacagcaacatgtataacatgcttaccaggaccatggacatcatggcctaacgcctcagtaccatgtacctcattatcatggattacaacaaacagaccaccagcagcaggaacaccatgttgcaatctaccaccaggatggtctagaccaacatcaccaccacaagcaccttatagaagatcagcaacatggagagcaagacttccaggtagatggggacgcttaaccgaaaccagaaaagaaacaataccagaaggaacaagagctatgacagcaataaaacgacaaaacaaaacacatggatgctgggtagtatgttcataa

SEQ ID NO: 6833 - protein, 407 aa, synthetic construct
  REGION 1..407: note Thymidine_Kinase_TK__Herpes_Simplex_Virus_1_(HSV-1)__Q9ENS4
MASYPCHQHASAFDQAARSRGHSNRRTALRPRRQQEATEVRLEQKMPTLLRVYIDGPHGMGKTTTTQLLVALGSRDDIVYVPEPMTYWQVLGASETIANIYTTQHRLDQGEISAGDAAVVMTSAQITMGMPYAVTDAVLAPHIGGEAGSSHAPPPALTLIFDRHPIAALLCYPAARYLMGSMTPRPCWRSWPSSRRPCPAQTSCWGPFRRTDTSTAWPNASAPASGLTWLCWPRFAAFTGCLPIRCGICRAAGRGGRIGDSFRGRPCRPRVPSPRATRAHDPISGTRYLPCFGPPSCWPPTATCITCLPGPWTSWPNASVPCTSLSWITTNRPPAAGTPCCNLPPGWSRPTSPPQAPYRRSATWRARLPGRWGRLTETRKETIPEGTRAMTAIKRQNKTHGCWVVCS

SEQ ID NO: 6834 - RNA, 1224 nt, synthetic construct
  misc_feature 1..1224: note Thymidine_Kinase_TK__Herpes_Simplex_Virus_1_(HSV-1)__BAB119 43
  source 1..1224: mol_type = other RNA
atggcttcgtacccctgccatcaacacgcgtctgcgttcgaccaggctgcgcgttctcgcggccatagcaaccgacgtacggcgttgcgccctcgccggcagcaagaagccacggaagtccgcctggagcagaaaatgcccacgctactgcgggtttatatagacggtcctcacgggatggggaaaaccaccaccacgcaactgctggtggccctgggttcgcgcgacgatatcgtctacgtacccgagccgatgacttactggcaggtgctgggggcttccgagacaatcgcgaacatctacaccacacaacaccgcctcgaccagggtgagatatcggccggggacgcggcggtggtaatgacaagcgcccagataacaatgggcatgccttatgccgtgaccgacgccgttctggctcctcatatcgggggggaggctgggagctcacatgccccgcccccggccctcaccctcatcttcgaccgccatcccatcgccgccctcctgtgctacccggccgcgcgataccttatgggcagcatgacccccaggccgtgctggcgttcgtggccctcatcccgccgaccttgcccggcacaaacatcgtgttgggggcccttccggaggacagacacatcgaccgcctggccaaacgccagcgccccggcgagcggcttgacctggctatgctggccgcgattcgccgcgtttacgggctgcttgccaatacggtgcggtatctgcagggcggcgggtcgtggcgggaggattggggacagctttcggggacggccgtgccgccccagggtgccgagccccagagcaacgcgggcccacgaccccatatcggggacacgttatttaccctgtttcgggcccccgagttgctggcccccaacggcgacctgtataacgtgtttgcctgggccttggacgtcttggccaaacgcctccgtcccatgcacgtctttatcctggattacgaccaatcgcccgccggctgccgggacgccctgctgcaacttacctccgggatggtccagacccacgtcaccaccccaggctccataccgacgatctgcgacctggcgcgcacgtttgcccgggagatgggggaggctaactgaaacacggaaggagacaataccggaaggaacccgcgctatgacggcaataaaaagacagaataaaacgcacgggtgttgggtcgtttgttcataa

SEQ ID NO: 6835 - RNA, 1224 nt, synthetic construct
  misc_feature 1..1224: note = derived and/or modified sequence opt1 fromThymidine_Kinase_TK__Herpes_Simplex_Virus_1_(HSV-1)__BA B11943
  source 1..1224: mol_type = other RNA
atggccagctacccctgccaccagcacgcctccgcgttcgaccaggccgcccgcagccggggccactccaaccgccggaccgccctgcgcccccggcgccagcaggaggccaccgaggtgcggctcgagcagaagatgcccacgctgctgcgcgtctacatcgacgggccccacggcatggggaagaccaccaccacgcagctcctggtggcgctgggcagccgggacgacatcgtgtacgtccccgagccgatgacctactggcaggtcctcggggcctccgagaccatcgccaacatctacaccacgcagcaccgcctggaccagggcgagatcagcgccggcgacgcggccgtggtgatgacctccgcccagatcaccatggggatgccctacgccgtgaccgacgccgtgctggcgccccacatcggcggggaggccggcagctcccacgcgcccccgcccgccctcacgctgatcttcgaccggcaccccatcgccgccctgctctgctaccccgccgcccgctacctgatggggagcatgaccccgcggccctgctggcgctcctggcccagctcccggcgcccctgcccggcccagaccagctgctggggccccttccggcgcaccgacacgtccaccgcctggcccaacgcgagcgcccccgcctccggcctgacctggctctgctggccgcggttcgccgccttcaccgggtgcctgcccatccgctgcggcatctgccgggcggccgggcgcggcggccgcatcggggacagcttccggggccgcccctgccggccccgcgtcccgagcccccgggccacgcgcgcccacgaccccatctccgggacccggtacctgccctgcttcggcccgcccagctgctggcccccgaccgcgacctgcatcacgtgcctccccgggccctggacctcctggcccaacgccagcgtgccgtgcacctccctgagctggatcaccacgaaccgcccgcccgccgccggcaccccctgctgcaacctgccgcccggctggtcccggcccaccagcccgccccaggccccctaccgccggtccgcgacctggcgcgcccggctccccgggcgctggggccggctgacggagacccgcaaggagaccatccccgaggggacccgggccatgacggccatcaagcgccagaacaagacccacggctgctgggtggtctgcagctga

SEQ ID NO: 6836 - RNA, 1224 nt, synthetic construct
  misc_feature 1..1224: note = derived and/or modified sequence opt2 fromThymidine_Kinase_TK__Herpes_Simplex_Virus_1_(HSV-1)__BA B11943
  source 1..1224: mol_type = other RNA
atggcctcctacccctgccaccagcacgcctccgccttcgaccaggccgcccgctcccgcggccactccaaccgccgcaccgccctccgcccccgccgccagcaggaggccaccgaggtccgcctcgagcagaagatgcccaccctcctccgcgtctacatcgacggcccccacggcatgggcaagaccaccaccacccagctcctcgtcgccctcggctcccgcgacgacatcgtctacgtccccgagcccatgacctactggcaggtcctcggcgcctccgagaccatcgccaacatctacaccacccagcaccgcctcgaccagggcgagatctccgccggcgacgccgccgtcgtcatgacctccgcccagatcaccatgggcatgccctacgccgtcaccgacgccgtcctcgccccccacatcggcggcgaggccggctcctcccacgcccccccccccgccctcaccctcatcttcgaccgccaccccatcgccgccctcctctgctaccccgccgcccgctacctcatgggctccatgaccccccgcccctgctggcgctcctggccctcctcccgccgcccctgccccgcccagacctcctgctggggccccttccgccgcaccgacacctccaccgcctggcccaacgcctccgcccccgcctccggcctcacctggctctgctggccccgcttcgccgccttcaccggctgcctccccatccgctgcggcatctgccgcgccgccggccgcggcggccgcatcggcgactccttccgcggccgcccctgccgcccccgcgtcccctccccccgcgccacccgcgcccacgaccccatctccggcacccgctacctcccctgcttcggccccccctcctgctggccccccaccgccacctgcatcacctgcctccccggcccctggacctcctggcccaacgcctccgtcccctgcacctccctctcctggatcaccaccaaccgcccccccgccgccggcaccccctgctgcaacctcccccccggctggtcccgccccacctcccccccccaggccccctaccgccgctccgccacctggcgcgcccgcctccccggccgctggggccgcctcaccgagacccgcaaggagaccatccccgagggcacccgcgccatgaccgccatcaagcgccagaacaagacccacggctgctgggtcgtctgctcctga

SEQ ID NO: 6837 - RNA, 1224 nt, synthetic construct
  misc_feature 1..1224: note = derived and/or modified sequence opt3 fromThymidine_Kinase_TK__Herpes_Simplex_Virus_1_(HSV-1)__BA B11943
  source 1..1224: mol_type = other RNA
atggccagctacccctgccaccagcatgcttccgcattcgaccaagccgcgagatctaggggccactcaaaccggcgcaccgctctgcgacctcgtagacagcaggaggccacagaagtgaggctcgagcagaagatgccaactcttctgcgggtctatatcgatgggccgcatggaatgggtaaaacgaccacaactcaattgttagttgcactgggcagtcgcgacgatattgtgtacgtacccgaacctatgacctattggcaagtgctaggggccagcgagacaatagctaatatctacaccactcagcacagactcgaccagggagaaatttccgcaggcgatgccgctgtcgtgatgacatctgcccagatcaccatgggtatgccatatgcggttacggacgcagtgctggctccccatattgggggagaggccggctcgtcacacgcccctccacccgcacttactctgatctttgataggcaccctatagctgccttgctctgttacccagcggcccggtatctgatgggcagcatgaccccgcgcccctgctggcgaagttggccttcctctagaaggccatgtcccgcacagacaagctgctgggggcctttccggcgtactgacacctccacagcttggccaaacgcctcagctcccgccagtggactgacctggctctgttggccgcgctttgcagccttcacgggttgcttacctatcagatgtggcatttgcagggctgcggggcggggaggccgaatcggtgatagctttcgcgggagaccctgtaggccacgggtcccttctccccgcgcaactagagcccatgacccaatttccggaacaaggtacctgccctgcttcggccctccatcatgttggccgcccaccgctacttgcatcacatgccttcctggcccatggaccagctggcccaatgccagtgtgccttgtacgtctttgtcctggataaccacaaaccgtccacccgcagccgggactccgtgctgtaatctgcctccaggatggagccggcccacctcgcctccccaggctccataccgaagatctgccacatggagggcacgcctacctggtcggtggggcagactcactgagaccaggaaggaaacaattcccgaggggacccgcgcgatgactgctatcaaacgacagaacaagacgcacggatgctgggtagtttgttcctga

SEQ ID NO: 6838 - RNA, 1224 nt, synthetic construct
  misc_feature 1..1224: note = derived and/or modified sequence opt4 fromThymidine_Kinase_TK__Herpes_Simplex_Virus_1_(HSV-1)__BA B11943
  source 1..1224: mol_type = other RNA
atggccagctacccctgccaccagcacgccagcgccttcgaccaggccgccagaagcagaggccacagcaacagaagaaccgccctgagacccagaagacagcaggaggccaccgaggtgagactggagcagaagatgcccaccctgctgagagtgtacatcgacggcccccacggcatgggcaagaccaccaccacccagctgctggtggccctgggcagcagagacgacatcgtgtacgtgcccgagcccatgacctactggcaggtgctgggcgccagcgagaccatcgccaacatctacaccacccagcacagactggaccagggcgagatcagcgccggcgacgccgccgtggtgatgaccagcgcccagatcaccatgggcatgccctacgccgtgaccgacgccgtgctggccccccacatcggcggcgaggccggcagcagccacgcccccccccccgccctgaccctgatcttcgacagacaccccatcgccgccctgctgtgctaccccgccgccagatacctgatgggcagcatgacccccagaccctgctggagaagctggcccagcagcagaagaccctgccccgcccagaccagctgctggggccccttcagaagaaccgacaccagcaccgcctggcccaacgccagcgcccccgccagcggcctgacctggctgtgctggcccagattcgccgccttcaccggctgcctgcccatcagatgcggcatctgcagagccgccggcagaggcggcagaatcggcgacagcttcagaggcagaccctgcagacccagagtgcccagccccagagccaccagagcccacgaccccatcagcggcaccagatacctgccctgcttcggcccccccagctgctggccccccaccgccacctgcatcacctgcctgcccggcccctggaccagctggcccaacgccagcgtgccctgcaccagcctgagctggatcaccaccaacagaccccccgccgccggcaccccctgctgcaacctgccccccggctggagcagacccaccagccccccccaggccccctacagaagaagcgccacctggagagccagactgcccggcagatggggcagactgaccgagaccagaaaggagaccatccccgagggcaccagagccatgaccgccatcaagagacagaacaagacccacggctgctgggtggtgtgcagctga

SEQ ID NO: 6839 - RNA, 1224 nt, synthetic construct
  misc_feature 1..1224: note = derived and/or modified sequence opt5 fromThymidine_Kinase_TK__Herpes_Simplex_Virus_1_(HSV-1)__BA B11943
  source 1..1224: mol_type = other RNA
atggccagctacccctgccaccagcatgcttccgccttcgaccaagcggctagatctcggggccacagcaaccgcagaaccgccctgcggcctcgcagacagcaggaggccacagaagtgcggctcgagcagaagatgccgacgctgcttcgcgtctatatcgatgggccccatggaatgggcaaaaccacaaccacacaactgctcgttgctctggggtccagagacgatattgtgtacgtgcctgaacccatgacctattggcaggtccttggagcctctgagacaatcgctaatatttacaccacgcagcaccggctggaccagggcgaaatcagcgccggggatgcggccgtggttatgacctccgctcaaattacaatgggaatgccttatgccgtgaccgacgctgtcctcgcgccccatatcggcggcgaggccgggtctagccacgcccctccgcccgctctgacactgatctttgatcgccaccctattgccgctctcctgtgttaccccgccgccagatatcttatgggatccatgacccctcggccctgctggcgcagctggccgtcttccagacggccttgtcccgctcagacgagctgctggggccctttccgcagaacagacacctctacagcgtggcccaacgcctccgctcccgccagcgggctgacctggctctgttggcctcggtttgccgctttcaccggatgcctgccgatcagatgtggcatttgccgcgccgcggggcggggaggcagaatcggcgattcttttcgcgggcggccctgtagacctcgcgtgccctcccctcgggctacaagagcccatgaccccattagcggaacgcgctaccttccgtgcttcggccctccctcctgttggcctcccaccgccacatgcattacctgcctgcctgggccctggacatcttggccgaatgctagcgttccttgtacctccctcagctggatcacgacaaaccggcctcccgccgctggaaccccctgctgtaatctgccgcccggctggtctagacctacctcccctccccaggccccctaccgccggagcgcgacatggagagcccggctgcctgggcgctggggaagactcaccgagacacggaaggaaacgatccccgagggcaccagagctatgacagccatcaaacgccagaacaagacccacggctgctgggtggtctgttcttga

SEQ ID NO: 6840 - RNA, 1224 nt, synthetic construct
  misc_feature 1..1224: note = derived and/or modified sequence opt6 fromThymidine_Kinase_TK__Herpes_Simplex_Virus_1_(HSV-1)__BA B11943
  source 1..1224: mol_type = other RNA
atggcaagttatccatgtcatcaacatgcatcagcatttgatcaagcagcaagaagcaggggacattcaaatagaagaactgctcttagacccaggagacaacaagaagcaacagaagttagattagaacaaaaaatgcctacattattacgagtatacatagacggaccacatggaatgggaaaaacaacaacaacgcaattactagtagctttaggatcaagagatgacatagtatacgttccggaaccaatgacatattggcaagtacttggagcaagtgaaacaatagcaaacatatatactacccaacatcgattagatcaaggagaaataagcgcaggagatgctgctgtagtaatgacatcagcacaaataacaatggggatgccatatgcagttaccgatgcagtattagcacctcatataggcggagaagcaggaagtagtcatgcaccaccaccagcacttactttaatatttgataggcatcctatagcagcattattatgttatcccgcagcaagatatttaatgggaagcatgacaccaagaccatgttggagatcatggccgtcatcaagaagaccatgtcctgcacaaacatcatgttggggaccatttagaagaacagacactagtacagcttggccaaatgcaagtgctccagcatcaggactaacatggctctgttggccaagatttgcagcattcacaggatgtttgccaataagatgcggaatatgtagagcagcaggacgaggaggaagaataggtgattcattcagaggaagaccttgtagaccaagagtacctagtccaagagcaactagagcccatgatccaattagcggaacaagatatttaccatgttttggaccacctagttgttggccaccaacagcaacatgtataacttgtttaccaggaccgtggacatcatggcctaacgcaagtgtaccatgtacctcactatcatggataacaacaaatagaccaccagccgcaggtacaccttgctgcaatttaccccctggatggtcaagaccaacttccccacctcaagcaccatacagaaggtccgcaacatggcgtgcaagattaccaggaagatggggaagactcacagaaacaagaaaagaaacaataccagaaggaactagagctatgactgcaataaaaagacaaaataaaacacatggatgctgggtagtatgttcataa

SEQ ID NO: 6841 - protein, 407 aa, synthetic construct
  REGION 1..407: note Thymidine_Kinase_TK__Herpes_Simplex_Virus_1_(HSV-1)__Q9ENS5
MASYPCHQHASAFDQAARSRGHSNRRTALRPRRQQEATEVRLEQKMPTLLRVYIDGPHGMGKTTTTQLLVALGSRDDIVYVPEPMTYWQVLGASETIANIYTTQHRLDQGEISAGDAAVVMTSAQITMGMPYAVTDAVLAPHIGGEAGSSHAPPPALTLIFDRHPIAALLCYPAARYLMGSMTPQAVLAFVALIPPTLPGTNIVLGALPEDRHIDRLAKRQRPGERLDLAMLAAIRRVYGLLANTVRYLQGGGSWREDWGQLSGTAVPPQGAEPQSNAGPRPHIGDTLFTLFRAPELLAPNGDLYNVFAWALDVLAKRLRPMHVFILDYDQSPAGCRDALLQLTSGMVQTHVTTQAPYRRSATWRARLPGRWGRLTETRKETIPEGTRAMTAIKRQNKTHGCWVVCS

SEQ ID NO: 6842 - RNA, 1224 nt, synthetic construct
  misc_feature 1..1224: note Thymidine_Kinase_TK__Herpes_Simplex_Virus_1_(HSV-1)__BAB119 42
  source 1..1224: mol_type = other RNA
atggcttcgtacccctgccatcaacacgcgtctgcgttcgaccaggctgcgcgttctcgcggccatagcaaccgacgtacggcgttgcgccctcgccggcagcaagaagccacggaagtccgcctggagcagaaaatgcccacgctactgcgggtttatatagacggtcctcacgggatggggaaaaccaccaccacgcaactgctggtggccctgggttcgcgcgacgatatcgtctacgtacccgagccgatgacttactggcaggtgctgggggcttccgagacaatcgcgaacatctacaccacacaacaccgcctcgaccagggtgagatatcggccggggacgcggcggtggtaatgacaagcgcccagataacaatgggcatgccttatgccgtgaccgacgccgttctggctcctcatatcgggggggaggctgggagctcacatgccccgcccccggccctcaccctcatcttcgaccgccatcccatcgccgccctcctgtgctacccggccgcgcgataccttatgggcagcatgaccccccaggccgtgctggcgttcgtggccctcatcccgccgaccttgcccggcacaaacatcgtgttgggggcccttccggaggacagacacatcgaccgcctggccaaacgccagcgccccggcgagcggcttgacctggctatgctggccgcgattcgccgcgtttacgggctgcttgccaatacggtgcggtatctgcagggcggcgggtcgtggcgggaggattggggacagctttcggggacggccgtgccgccccagggtgccgagccccagagcaacgcgggcccacgaccccatatcggggacacgttatttaccctgtttcgggcccccgagttgctggcccccaacggcgacctgtataacgtgtttgcctgggccttggacgtcttggccaaacgcctccgtcccatgcacgtctttatcctggattacgaccaatcgcccgccggctgccgggacgccctgctgcaacttacctccgggatggtccagacccacgtcaccacccaggctccataccgacgatctgcgacctggcgcgcacgtttgcccgggagatgggggaggctaactgaaacacggaaggagacaataccggaaggaacccgcgctatgacggcaataaaaagacagaataaaacgcacgggtgttgggtcgtttgttcataa

SEQ ID NO: 6843 - RNA, 1224 nt, synthetic construct
  misc_feature 1..1224: note = derived and/or modified sequence opt1 fromThymidine_Kinase_TK__Herpes_Simplex_Virus_1_(HSV-1)__BA B11942
  source 1..1224: mol_type = other RNA
atggccagctacccctgccaccagcacgcctccgcgttcgaccaggccgcccgcagccggggccactccaaccgccggaccgccctgcgcccgcggcgccagcaggaggccaccgaggtgcggctcgagcagaagatgcccacgctgctgcgcgtctacatcgacgggccccacggcatggggaagaccaccaccacgcagctcctggtggcgctgggcagccgggacgacatcgtgtacgtccccgagccgatgacctactggcaggtcctcggggcctccgagaccatcgccaacatctacaccacgcagcaccgcctggaccagggcgagatcagcgccggcgacgcggccgtggtgatgacctccgcccagatcaccatggggatgccctacgccgtgaccgacgccgtgctggcgccccacatcggcggggaggccggcagctcccacgcgcccccgcccgccctcacgctgatcttcgaccggcaccccatcgccgccctgctctgctaccccgccgcccgctacctgatggggagcatgaccccgcaggccgtcctggccttcgtggcgctcatcccgcccaccctgcccggcaccaacatcgtgctgggcgccctccccgaggaccggcacatcgaccgcctggccaagcggcagcgccccggggagcggctggacctcgccatgctggccgcgatccgccgggtctacggcctgctcgccaacacggtgcgctacctgcagggcgggggctcctggcgggaggactgggggcagctgagcggcaccgccgtgccgccccagggggccgagccccagtccaacgcgggcccccgcccccacatcggggacaccctcttcaccctgttccgcgcccccgagctgctcgccccgaacggcgacctgtacaacgtcttcgcctgggccctggacgtgctcgcgaagcggctgcgccccatgcacgtgttcatcctggactacgaccagagccccgccggctgccgggacgccctcctgcagctgacgtccgggatggtccagacccacgtgaccacccaggccccctaccgccggagcgccacgtggcgcgcgcggctcccgggccgctgggggcggctgaccgagacccgcaaggagaccatccccgagggcacgcgggccatgaccgccatcaagcgccagaacaagacccacgggtgctgggtggtctgctcctga

SEQ ID NO: 6844 - RNA, 1224 nt, synthetic construct
  misc_feature 1..1224: note = derived and/or modified sequence opt2 fromThymidine_Kinase_TK__Herpes_Simplex_Virus_1_(HSV-1)__BA B11942
  source 1..1224: mol_type = other RNA
atggcctcctacccctgccaccagcacgcctccgccttcgaccaggccgcccgctcccgcggccactccaaccgccgcaccgccctccgcccccgccgccagcaggaggccaccgaggtccgcctcgagcagaagatgcccaccctcctccgcgtctacatcgacggcccccacggcatgggcaagaccaccaccacccagctcctcgtcgccctcggctcccgcgacgacatcgtctacgtccccgagcccatgacctactggcaggtcctcggcgcctccgagaccatcgccaacatctacaccacccagcaccgcctcgaccagggcgagatctccgccggcgacgccgccgtcgtcatgacctccgcccagatcaccatgggcatgccctacgccgtcaccgacgccgtcctcgccccccacatcggcggcgaggccggctcctcccacgcccccccccccgccctcaccctcatcttcgaccgccaccccatcgccgccctcctctgctaccccgccgcccgctacctcatgggctccatgaccccccaggccgtcctcgccttcgtcgccctcatcccccccaccctccccggcaccaacatcgtcctcggcgccctccccgaggaccgccacatcgaccgcctcgccaagcgccagcgccccggcgagcgcctcgacctcgccatgctcgccgccatccgccgcgtctacggcctcctcgccaacaccgtccgctacctccagggcggcggctcctggcgcgaggactggggccagctctccggcaccgccgtccccccccagggcgccgagccccagtccaacgccggcccccgcccccacatcggcgacaccctcttcaccctcttccgcgcccccgagctcctcgcccccaacggcgacctctacaacgtcttcgcctgggccctcgacgtcctcgccaagcgcctccgccccatgcacgtcttcatcctcgactacgaccagtcccccgccggctgccgcgacgccctcctccagctcacctccggcatggtccagacccacgtcaccacccaggccccctaccgccgctccgccacctggcgcgcccgcctccccggccgctggggccgcctcaccgagacccgcaaggagaccatccccgagggcacccgcgccatgaccgccatcaagcgccagaacaagacccacggctgctgggtcgtctgctcctga

SEQ ID NO: 6845 - RNA, 1224 nt, synthetic construct
  misc_feature 1..1224: note = derived and/or modified sequence opt3 fromThymidine_Kinase_TK__Herpes_Simplex_Virus_1_(HSV-1)__BA B11942
  source 1..1224: mol_type = other RNA
atggccagctacccctgccaccagcatgcttccgcattcgaccaagccgcgagatctaggggccactcaaaccggcgcaccgctctgcgacctcgtagacagcaggaggccacagaagtgaggctcgagcagaagatgccaactcttctgcgggtctatatcgatgggccgcatggaatgggtaaaacgaccacaactcaattgttagttgcactgggcagtcgcgacgatattgtgtacgtacccgaacctatgacctattggcaagtgctaggggccagcgagacaatagctaatatctacaccactcagcacagactcgaccagggagaaatttccgcaggcgatgccgctgtcgtgatgacatctgcccagatcaccatgggtatgccatatgcggttacggacgcagtgctggctccccatattgggggagaggctggctcgtcacacgcccctccacccgcacttactctgatctttgataggcaccctatagctgccttgctctgttacccagcggcccggtatctgatgggcagcatgaccccgcaggcagtcctggctttcgtggccctcattccccctacattaccagggactaacatcgtactgggagcccttcccgaggaccgccatatcgatcgattggccaagagacagaggcctggtgaacggctggacctagcaatgctcgccgctattcgtcgcgtttacggcctgcttgcgaataccgtgagatacctgcaagggggaggcagttggagggaggattggggtcagttgtccgggacagcagtcccaccccagggagccgaaccgcagtctaacgctggccctcggccccacatcggcgacaccctctttacgctgttccgagccccagagttactggcacctaatggggatctctataacgtgtttgcctgggctcttgacgtgctggccaaacgcttgagacccatgcatgtcttcatactagactacgatcaaagcccagcaggatgcagggacgcgctgctccagctgacttccggtatggttcagacacacgtgaccactcaggctccctatcggcgctcagccacatggagagcaaggcttcctggccgttgggggcggctgaccgagacgcgaaaggaaaccattccagagggaacaagagccatgactgctatcaaaaggcaaaataagacccacggctgttgggtagtgtgcagttga

SEQ ID NO: 6846 - RNA, 1224 nt, synthetic construct
  misc_feature 1..1224: note = derived and/or modified sequence opt4 fromThymidine_Kinase_TK__Herpes_Simplex_Virus_1_(HSV-1)__BA B11942
  source 1..1224: mol_type = other RNA
atggccagctacccctgccaccagcacgccagcgccttcgaccaggccgccagaagcagaggccacagcaacagaagaaccgccctgagacccagaagacagcaggaggccaccgaggtgagactggagcagaagatgcccaccctgctgagagtgtacatcgacggcccccacggcatgggcaagaccaccaccacccagctgctggtggccctgggcagcagagacgacatcgtgtacgtgcccgagcccatgacctactggcaggtgctgggcgccagcgagaccatcgccaacatctacaccacccagcacagactggaccagggcgagatcagcgccggcgacgccgccgtggtgatgaccagcgcccagatcaccatgggcatgccctacgccgtgaccgacgccgtgctggccccccacatcggcggcgaggccggcagcagccacgcccccccccccgccctgaccctgatcttcgacagacaccccatcgccgccctgctgtgctaccccgccgccagatacctgatgggcagcatgaccccccaggccgtgctggccttcgtggccctgatcccccccaccctgcccggcaccaacatcgtgctgggcgccctgcccgaggacagacacatcgacagactggccaagagacagagacccggcgagagactggacctggccatgctggccgccatcagaagagtgtacggcctgctggccaacaccgtgagatacctgcagggcggcggcagctggagagaggactggggccagctgagcggcaccgccgtgcccccccagggcgccgagccccagagcaacgccggccccagaccccacatcggcgacaccctgttcaccctgttcagagcccccgagctgctggcccccaacggcgacctgtacaacgtgttcgcctgggccctggacgtgctggccaagagactgagacccatgcacgtgttcatcctggactacgaccagagccccgccggctgcagagacgccctgctgcagctgaccagcggcatggtgcagacccacgtgaccacccaggccccctacagaagaagcgccacctggagagccagactgcccggcagatggggcagactgaccgagaccagaaaggagaccatccccgagggcaccagagccatgaccgccatcaagagacagaacaagacccacggctgctgggtggtgtgcagctga

SEQ ID NO: 6847 - RNA, 1224 nt, synthetic construct
  misc_feature 1..1224: note = derived and/or modified sequence opt5 fromThymidine_Kinase_TK__Herpes_Simplex_Virus_1_(HSV-1)__BA B11942
  source 1..1224: mol_type = other RNA
atggccagctacccctgccaccagcatgcttccgccttcgaccaagcggctagatctcggggccacagcaaccgcagaaccgccctgcggcctcgcagacagcaggaggccacagaagtgcggctcgagcagaagatgccgacgctgcttcgcgtctatatcgatgggccccatggaatgggcaaaaccacaaccacacaactgctcgttgctctggggtccagagacgatattgtgtacgtgcctgaacccatgacctattggcaggtccttggagcctctgagacaatcgctaatatttacaccacgcagcaccggctggaccagggcgaaatcagcgccggggatgcggccgtggttatgacctccgctcaaattacaatgggaatgccttatgccgtgaccgacgctgtcctcgcgccccatatcggcggcgaggccgggtctagccacgcccctccgcccgctctgacactgatctttgatcgccaccctattgccgctctcctgtgttaccccgccgccagatatcttatgggatccatgacccctcaggctgtgctggcgttcgttgccctcattcccccgacgctgcctggcacaaacatcgtgcttggggctctgcccgaggaccggcatatcgatcgcctcgccaagagacagcggcctggagaacgcctggacctggccatgctcgctgccattagacgggtctacggcctgcttgcgaataccgtgagatacctgcaagggggaggcagctggcgcgaggattggggccagctctctgggacagctgtgcctccccagggagccgaaccccagtccaacgccggcccgcggccccacatcggggacaccctgtttacccttttcagagctcctgagctgctcgcccccaatggagatctgtataacgtctttgcttgggccctggacgttctcgcgaaacgcctgcggcctatgcatgtgttcattcttgactacgatcaaagccccgccggctgcagagacgctctgctccagctgacatctgggatggtgcagacgcacgtcaccacacaggccccgtatcgccggtccgctacctggagagcccgccttcctggacggtggggcagactgacagagacccgcaaggaaacgatccccgagggcacacgggcgatgaccgccatcaaaagacaaaataagacccacgggtgttgggtggtttgcagctga

SEQ ID NO: 6848 - RNA, 1224 nt, synthetic construct
  misc_feature 1..1224: note = derived and/or modified sequence opt6 fromThymidine_Kinase_TK__Herpes_Simplex_Virus_1_(HSV-1)__BA B11942
  source 1..1224: mol_type = other RNA
atggcaagttatccttgccatcaacacgcaagtgcatttgaccaagcagcacgaagtagaggtcacagtaatagacgaacagcacttagaccacgaagacaacaagaagccacagaagtacgattagaacaaaaaatgcccacactattaagagtatacatagatggtcctcatggaatgggcaaaacaacaactacacaattattagtagcattaggaagtagagatgatatagtatatgttccggaaccaatgacatattggcaagtattaggagcctcagaaacgatagcaaacatatacactacacaacataggctagatcaaggagaaataagtgctggagatgcagcagtcgtaatgacatcagcccaaataacaatgggaatgccatatgcagtaacagatgccgtattagctccacatataggaggagaagcaggatcatcacatgctccacccccagctctaactctcatatttgatagacatccaatagctgcactattatgttatcctgcagctagatatctgatgggaagcatgacaccacaagcagtattagcattcgtagctttaattcccccaacattaccaggcacaaatatagttcttggagctttaccagaagatagacatatagatagattggccaaaagacaaagaccaggagaaagactagatttagctatgttagcagcaataagaagagtttacggtttattagcaaacacagtaagatatctacaaggaggaggtagttggagagaagattggggacaattaagtggaacagctgtaccaccacaaggagcagaaccacaatcaaatgctggaccacgaccacatataggagacacactatttacactatttagagcaccagaactcttagctcccaatggagatttatataatgtttttgcctgggccttagatgtactagctaaaagattaaggccaatgcacgtatttatactagattacgatcaatcacccgcaggatgtcgagacgcactactacaactaacctcaggaatggtccaaactcatgtaactacacaagcaccatatcgaaggagcgcaacatggagagcaagattaccaggaagatggggaaggctaacggaaactagaaaagaaacaattccagaaggaactagagcaatgacagcaataaaaagacaaaacaaaacacatggatgttgggtagtctgtagttaa

SEQ ID NO: 6849 - protein, 227 aa, synthetic construct
  REGION 1..227: note Thymidine_Kinase_TK__Herpes_Simplex_Virus_1_(HSV-1)__Q9IYZ7
MASYPCHQHASAFDQAARSRGHSNRRTALRPRRQQEATEVRLEQKMPTLLRVYIDGPHGMGKTTTTQLLVALGSRDNIVYVPEPMTYWQVLGASETIANIYTTQHRLDQGEISAGDAAVVMTSAQITMGMPYAVTDAVLAPHIGGGGWELTCPAPGPHPHLRPPSHRRPPVLPGRAIPYGQHDPPGRAGVRGPHPADLARHKHRVGGPSGGQTHRPPGQTPAPRRAA

SEQ ID NO: 6850 - RNA, 684 nt, synthetic construct
  misc_feature 1..684: note Thymidine_Kinase_TK__Herpes_Simplex_Virus_1_(HSV-1)__AAF725 05
  source 1..684: mol_type = other RNA
atggcttcgtacccctgccatcaacacgcgtctgcgttcgaccaggctgcgcgttctcgcggccatagcaaccgacgtacggcgttgcgccctcgccggcagcaagaagccacggaagtccgcctggagcagaaaatgcccacgctactgcgggtttatatagacggtcctcacgggatggggaaaaccaccaccacgcaactgctggtggccctgggttcgcgcgacaatatcgtctacgtacccgagccgatgacttactggcaggtgctgggggcttccgagacaatcgcgaacatctacaccacacaacaccgcctcgaccagggtgagatatcggccggggacgcggcggtggtaatgacaagcgcccagataacaatgggcatgccttatgccgtgaccgacgccgttctggctcctcatatcggggggggaggctgggagctcacatgccccgcccccggccctcaccctcatcttcgaccgccatcccatcgccgccctcctgtgctacccggccgcgcgataccttatgggcagcatgaccccccaggccgtgctggcgttcgtggccctcatcccgccgaccttgcccggcacaaacatcgtgttgggggcccttccggaggacagacacatcgaccgcctggccaaacgccagcgccccggcgagcggcttga

SEQ ID NO: 6851 - RNA, 684 nt, synthetic construct
  misc_feature 1..684: note = derived and/or modified sequence opt1 fromThymidine_Kinase_TK__Herpes_Simplex_Virus_1_(HSV-1)__AA F72505
  source 1..684: mol_type = other RNA
atggccagctacccctgccaccagcacgcctccgccttcgaccaggccgcccgcagccggggccactccaaccgccggaccgccctgcgcccgcggcgccagcaggaggccaccgaggtgcggctcgagcagaagatgcccacgctgctgcgcgtctacatcgacgggccccacggcatggggaagaccaccaccacgcagctcctggtggcgctgggcagccgggacaacatcgtgtacgtccccgagccgatgacctactggcaggtcctcggggcctccgagaccatcgccaacatctacaccacgcagcaccgcctggaccagggcgagatcagcgccggcgacgcggccgtggtgatgacctccgcccagatcaccatggggatgccctacgccgtgaccgacgccgtgctggcgccccacatcggcgggggcgggtgggagctcacgtgccccgccccgggcccccacccccacctccggcccccgagccaccgccggccgcccgtcctgcccggccgcgccatcccctacgggcagcacgacccgcccggccgggccggggtgcgcggcccccaccccgccgacctggcgcggcacaagcaccgcgtgggcgggccctccggcgggcagacccaccggccgcccggccagacccccgcgccccgccgggccgcctga

SEQ ID NO: 6852 - RNA, 684 nt, synthetic construct
  misc_feature 1..684: note = derived and/or modified sequence opt2 fromThymidine_Kinase_TK__Herpes_Simplex_Virus_1_(HSV-1)__AA F72505
  source 1..684: mol_type = other RNA
atggcctcctacccctgccaccagcacgcctccgccttcgaccaggccgcccgctcccgcggccactccaaccgccgcaccgccctccgcccccgccgccagcaggaggccaccgaggtccgcctcgagcagaagatgcccaccctcctccgcgtctacatcgacggcccccacggcatgggcaagaccaccaccacccagctcctcgtcgccctcggctcccgcgacaacatcgtctacgtccccgagcccatgacctactggcaggtcctcggcgcctccgagaccatcgccaacatctacaccacccagcaccgcctcgaccagggcgagatctccgccggcgacgccgccgtcgtcatgacctccgcccagatcaccatgggcatgccctacgccgtcaccgacgccgtcctcgccccccacatcggcggcggcggctgggagctcacctgccccgcccccggcccccacccccacctccgccccccctcccaccgccgcccccccgtcctccccggccgcgccatcccctacggccagcacgacccccccggccgcgccggcgtccgcggcccccaccccgccgacctcgcccgccacaagcaccgcgtcggcggcccctccggcggccagacccaccgcccccccggccagacccccgccccccgccgcgccgcctga

SEQ ID NO: 6853 - RNA, 684 nt, synthetic construct
  misc_feature 1..684: note = derived and/or modified sequence opt3 fromThymidine_Kinase_TK__Herpes_Simplex_Virus_1_(HSV-1)__AA F72505
  source 1..684: mol_type = other RNA
atggccagctacccctgccaccagcatgcttccgcattcgaccaagccgcgagatctaggggccactcaaaccggcgcaccgctctgcgacctcgtagacagcaggaggccacagaagtgaggctcgagcagaagatgccaactcttctgcgggtctatatcgatgggccgcatggaatgggtaaaacgaccacaactcaattgttagttgcactgggcagtcgcgacaatattgtgtacgtacccgaacctatgacctattggcaagtgctaggggccagcgagacaatagctaacatctacaccactcagcacagactcgatcagggagaaatttccgcaggcgacgccgctgtcgtgatgacatctgcccagatcaccatgggtatgccatatgcggttacggatgcagtgctggcccctcatattgggggaggcggctgggagcttacttgtcctgctccagggccccaccctcacctgaggccaccgtcgcatcggcgaccccctgtcttgccaggacgcgccatcccctacggtcagcacgaccctccaggcagagcaggggtgaggggaccccatccggctgatctcgcccggcacaagcaccgtgtaggcggtccttcagggggacagacccatagacccccaggccagacacccgcgccccgcagggccgcatga

SEQ ID NO: 6854 - RNA, 684 nt, synthetic construct
  misc_feature 1..684: note = derived and/or modified sequence opt4 fromThymidine_Kinase_TK__Herpes_Simplex_Virus_1_(HSV-1)__AA F72505
  source 1..684: mol_type = other RNA
atggccagctacccctgccaccagcacgccagcgccttcgaccaggccgccagaagcagaggccacagcaacagaagaaccgccctgagacccagaagacagcaggaggccaccgaggtgagactggagcagaagatgcccaccctgctgagagtgtacatcgacggcccccacggcatgggcaagaccaccaccacccagctgctggtggccctgggcagcagagacaacatcgtgtacgtgcccgagcccatgacctactggcaggtgctgggcgccagcgagaccatcgccaacatctacaccacccagcacagactggaccagggcgagatcagcgccggcgacgccgccgtggtgatgaccagcgcccagatcaccatgggcatgccctacgccgtgaccgacgccgtgctggccccccacatcggcggcggcggctgggagctgacctgccccgcccccggcccccacccccacctgagaccccccagccacagaagaccccccgtgctgcccggcagagccatcccctacggccagcacgacccccccggcagagccggcgtgagaggcccccaccccgccgacctggccagacacaagcacagagtgggcggccccagcggcggccagacccacagaccccccggccagacccccgcccccagaagagccgcctga

SEQ ID NO: 6855 - RNA, 684 nt, synthetic construct
  misc_feature 1..684: note = derived and/or modified sequence opt5 fromThymidine_Kinase_TK__Herpes_Simplex_Virus_1_(HSV-1)__AA F72505
  source 1..684: mol_type = other RNA
atggccagctacccctgccaccagcatgcttccgccttcgaccaagcggctagatctcggggccacagcaaccgcagaaccgccctgcggcctcgcagacagcaggaggccacagaagtgcggctcgagcagaagatgccgacgctgcttcgcgtctatatcgatgggccccatggaatgggcaaaaccacaaccacacaactgctcgttgctctggggtccagagacaatattgtgtacgtgcctgaacccatgacctattggcaggtccttggagcctctgagacaatcgctaacatttacaccacgcagcaccggctggatcagggcgaaatcagcgccggggacgcggccgtggttatgacctccgctcaaattacaatgggaatgccttatgccgtgaccgatgctgtcctcgcgccccatatcggcggcgggggatgggagctgacatgtcctgccccgggcccccaccctcacctgagacccccttctcatcgccggcccccggtgctccctgggcgcgccatcccctacggacagcacgaccctcccggcagagctggggttcggggaccccatcctgccgatctggctcgccacaagcacagagtgggcggcccgagcgggggacagacccatcggccccctggccagacgcccgcccctagacgcgccgcttga

SEQ ID NO: 6856 - RNA, 684 nt, synthetic construct
  misc_feature 1..684: note = derived and/or modified sequence opt6 fromThymidine_Kinase_TK__Herpes_Simplex_Virus_1_(HSV-1)__AA F72505
  source 1..684: mol_type = other RNA
atggcaagttatccatgccatcaacacgcatcagcattcgatcaagcagcaagatcaagaggacattcaaatagaagaacagcattaagaccaagaagacaacaagaagcaacagaagtacgattagaacaaaaaatgccaacattattacgagtatacatagacggaccacatggaatgggtaaaacaacaacaacacaactactagtagcattaggatcaagagataatatagtatatgtaccagaacctatgacatactggcaagtactaggagcatcagaaacaatagcaaacatttacacaacacaacacagactagatcaaggagaaataagtgcaggagatgcagcagtagtaatgacatcagcacaaataacaatgggaatgccatatgcagtaacagatgcagtactagcgccacatatagggggcggaggatgggaactaacatgtccagcaccaggaccacatccacatttaagaccaccatcacatagaagaccaccagtactaccaggaagagcaataccatatggtcaacatgatccaccaggacgagcaggtgtaagaggacctcatccagcagacttagcaagacataaacatagagtaggaggcccatcaggaggacaaacacatagaccaccaggacaaacacccgcacccagaagagcagcataa

SEQ ID NO: 6857 - protein, 181 aa, synthetic construct
  REGION 1..181: note Thymidine_Kinase_TK__Herpes_Simplex_Virus_1_(HSV-1)__Q9IYZ9
MASYPCHQHASAFDQAARSRGHSNRRTALRPRRQQEATEVRLEQKMPTLLRVYIDGPHGMGKTTTTQLLVALGSRDDIVYVPEPMTYWQVLGASETIANIYTTQHRLDQGEISAGDAAVVMTSAQITMGMPYAVTDAVLAPHIGGRLGAHMPRPRPSPSSSTAIPSPPSCATRPRDTLWAA

SEQ ID NO: 6858 - RNA, 546 nt, synthetic construct
  misc_feature 1..546: note Thymidine_Kinase_TK__Herpes_Simplex_Virus_1_(HSV-1)__AAF725 03
  source 1..546: mol_type = other RNA
atggcttcgtacccctgccatcaacacgcgtctgcgttcgaccaggctgcgcgttctcgcggccatagcaaccgacgtacggcgttgcgccctcgccggcagcaagaagccacggaagtccgcctggagcagaaaatgcccacgctactgcgggtttatatagacggtcctcacgggatggggaaaaccaccaccacgcaactgctggtggccctgggttcgcgcgacgatatcgtctacgtacccgagccgatgacttactggcaggtgctgggggcttccgagacaatcgcgaacatctacaccacacaacaccgcctcgaccagggtgagatatcggccggggacgcggcggtggtaatgacaagcgcccagataacaatgggcatgccttatgccgtgaccgacgccgttctggctcctcatatcggggggaggctgggagctcacatgccccgcccccggccctcaccctcatcttcgaccgccatcccatcgccgccctcctgtgctacccggccgcgcgataccttatgggcagcatga

SEQ ID NO: 6859 - RNA, 546 nt, synthetic construct
  misc_feature 1..546: note = derived and/or modified sequence opt1 fromThymidine_Kinase_TK__Herpes_Simplex_Virus_1_(HSV-1)__AA F72503
  source 1..546: mol_type = other RNA
atggccagctacccctgccaccagcacgcctccgcgttcgaccaggccgcccgcagccggggccactccaaccgccggaccgccctgcgcccgcggcgccagcaggaggccaccgaggtgcggctcgagcagaagatgcccacgctgctgcgcgtctacatcgacgggccccacggcatggggaagaccaccaccacgcagctcctggtggcgctgggcagccgggacgacatcgtgtacgtccccgagccgatgacctactggcaggtcctcggggcctccgagaccatcgccaacatctacaccacgcagcaccgcctggaccagggcgagatcagcgccggcgacgcggccgtggtgatgacctccgcccagatcaccatggggatgccctacgccgtgaccgacgccgtgctggcgccccacatcggcgggcggctcggcgcccacatgccccgcccgcggcccagcccctccagctccacggccatccccagcccgccctcctgcgccacccgcccccgggacaccctgtgggccgcgtga

SEQ ID NO: 6860 - RNA, 546 nt, synthetic construct
  misc_feature 1..546: note = derived and/or modified sequence opt2 fromThymidine_Kinase_TK__Herpes_Simplex_Virus_1_(HSV-1)__AA F72503
  source 1..546: mol_type = other RNA
atggcctcctacccctgccaccagcacgcctccgccttcgaccaggccgcccgctcccgcggccactccaaccgccgcaccgccctccgcccccgccgccagcaggaggccaccgaggtccgcctcgagcagaagatgcccaccctcctccgcgtctacatcgacggcccccacggcatgggcaagaccaccaccacccagctcctcgtcgccctcggctcccgcgacgacatcgtctacgtccccgagcccatgacctactggcaggtcctcggcgcctccgagaccatcgccaacatctacaccacccagcaccgcctcgaccagggcgagatctccgccggcgacgccgccgtcgtcatgacctccgcccagatcaccatgggcatgccctacgccgtcaccgacgccgtcctcgccccccacatcggcggccgcctcggcgcccacatgccccgcccccgcccctccccctcctcctccaccgccatcccctcccccccctcctgcgccacccgcccccgcgacaccctctgggccgcctga

SEQ ID NO: 6861 - RNA, 546 nt, synthetic construct
  misc_feature 1..546: note = derived and/or modified sequence opt3 fromThymidine_Kinase_TK__Herpes_Simplex_Virus_1_(HSV-1)__AA F72503
  source 1..546: mol_type = other RNA
atggccagctacccctgccaccagcatgcttccgcattcgaccaagccgcgagatctaggggccactcaaaccggcgcaccgctctgcgacctcgtagacagcaggaggccacagaagtgaggctcgagcagaagatgccaactcttctgcgggtctatatcgatgggccgcatggaatgggtaaaacgaccacaactcaattgttagttgcactgggcagtcgcgacgatattgtgtacgtacccgaacctatgacctattggcaagtgctaggggccagcgagacaatagctaatatctacaccactcagcacagactcgaccagggagaaatttccgcaggcgatgccgctgtcgtgatgacatctgcccagatcaccatgggtatgccatatgcggttacggacgcagtgctggctccccatattgggggaaggcttggcgcccacatgcctcggccacgcccctcgccttcaagcagtactgccatcccatccccgccctcttgtgcaacccgacctagagatacactgtgggctgcctga

SEQ ID NO: 6862 - RNA, 546 nt, synthetic construct
  misc_feature 1..546: note = derived and/or modified sequence opt4 fromThymidine_Kinase_TK__Herpes_Simplex_Virus_1_(HSV-1)__AA F72503
  source 1..546: mol_type = other RNA
atggccagctacccctgccaccagcacgccagcgccttcgaccaggccgccagaagcagaggccacagcaacagaagaaccgccctgagacccagaagacagcaggaggccaccgaggtgagactggagcagaagatgcccaccctgctgagagtgtacatcgacggcccccacggcatgggcaagaccaccaccacccagctgctggtggccctgggcagcagagacgacatcgtgtacgtgcccgagcccatgacctactggcaggtgctgggcgccagcgagaccatcgccaacatctacaccacccagcacagactggaccagggcgagatcagcgccggcgacgccgccgtggtgatgaccagcgcccagatcaccatgggcatgccctacgccgtgaccgacgccgtgctggccccccacatcggcggcagactgggcgcccacatgcccagacccagacccagccccagcagcagcaccgccatccccagcccccccagctgcgccaccagacccagagacaccctgtgggccgcctga

SEQ ID NO: 6863 - RNA, 546 nt, synthetic construct
  misc_feature 1..546: note = derived and/or modified sequence opt5 fromThymidine_Kinase_TK__Herpes_Simplex_Virus_1_(HSV-1)__AA F72503
  source 1..546: mol_type = other RNA
atggccagctacccctgccaccagcatgcttccgccttcgaccaagcggctagatctcggggccacagcaaccgcagaaccgccctgcggcctcgcagacagcaggaggccacagaagtgcggctcgagcagaagatgccgacgctgcttcgcgtctatatcgatgggccccatggaatgggcaaaaccacaaccacacaactgctcgttgctctggggtccagagacgatattgtgtacgtgcctgaacccatgacctattggcaggtccttggagcctctgagacaatcgctaatatttacaccacgcagcaccggctggaccagggcgaaatcagcgccggggatgcggccgtggttatgacctccgctcaaattacaatgggaatgccttatgccgtgaccgacgctgtcctcgcgccccatatcggcggccgcctgggggcccacatgcctagaccgcggccctctcctagctccagcacagccatcccctctcctccctcctgtgctacccgcccgagagatacgctgtgggccgcttga

SEQ ID NO: 6864 - RNA, 546 nt, synthetic construct
  misc_feature 1..546: note = derived and/or modified sequence opt6 fromThymidine_Kinase_TK__Herpes_Simplex_Virus_1_(HSV-1)__AA F72503
  source 1..546: mol_type = other RNA
atggcatcatacccatgccaccaacacgcatcagcattcgaccaagcagcaagatcaagaggacactcaaaccgaagaacagcactaagaccaagaagacaacaagaagcaacagaagtaagactagaacaaaaaatgccaacactactaagagtatacatagatggcccacacggaatgggaaaaacaacaacaacacaactacttgtagcattaggatcaagagacgacatagtatacgtaccagaaccaatgacatactggcaagtactaggagcatcagaaacaatagcaaacatatacacaacacaacacagactagaccaaggagaaatatcagcaggagacgcagcagtagtaatgacatcagcacaaataacaatgggaatgccatacgcagtaacagacgcagtattagcaccacacataggaggaagactaggagcacacatgccaagaccaagaccatcaccaagctcaagcacagcaataccatcaccaccatcatgcgcaacaagaccaagagacacactatgggcagcataa

SEQ ID NO: 6865 - protein, 119 aa, synthetic construct
  REGION 1..119: note Thymidine_Kinase_TK__Herpes_Simplex_Virus_1_(HSV-1)__Q9IZ02
MASYPCHQHASAFDQAARSRGHNNRRTALRPRRQQKATEVRLEQKMPTLLRVYIDGPHGMGKTTTTQLLVALGSRDDIVYVPEPMTYWRVLGLPRQSRTSTPHNTASTRVRYRPGTRRW

SEQ ID NO: 6866 - RNA, 360 nt, synthetic construct
  misc_feature 1..360: note Thymidine_Kinase_TK__Herpes_Simplex_Virus_1_(HSV-1)__AAF724 99
  source 1..360: mol_type = other RNA
atggcttcgtacccctgccatcaacacgcgtctgcgttcgaccaggctgcgcgttctcgcggccataacaaccgacgtacggcgttgcgccctcgccggcagcaaaaagccacggaagtccgcctggagcagaaaatgcccacgctactgcgggtttatatagacggtccccacgggatggggaaaaccaccaccacgcaactgctggtggccctgggttcgcgcgacgatatcgtctacgtacccgagccgatgacttactggcgggtgttggggcttccgagacaatcgcgaacatctacaccacacaacaccgcctcgaccagggtgagatatcggccggggacgcggcggtggtaa

SEQ ID NO: 6867 - RNA, 360 nt, synthetic construct
  misc_feature 1..360: note = derived and/or modified sequence opt1 fromThymidine_Kinase_TK__Herpes_Simplex_Virus_1_(HSV-1)__AA F72499
  source 1..360: mol_type = other RNA
atggccagctacccctgccaccagcacgcctccgcgttcgaccaggccgcccgcagccggggccacaacaaccgccggaccgccctgcgcccgcggcgccagcagaaggccaccgaggtgcggctcgagcagaagatgcccacgctgctgcgcgtctacatcgacgggccccacggcatggggaagaccaccaccacgcagctcctggtggcgctgggctcccgggacgacatcgtgtacgtccccgagccgatgacctactggcgcgtgctcgggctgccccggcagagccgcacctccacgccccacaacaccgccagcacccgggtgcgctaccggcccggcacccgccggtggtga

SEQ ID NO: 6868 - RNA, 360 nt, synthetic construct
  misc_feature 1..360: note = derived and/or modified sequence opt2 fromThymidine_Kinase_TK__Herpes_Simplex_Virus_1_(HSV-1)__AA F72499
  source 1..360: mol_type = other RNA
atggcctcctacccctgccaccagcacgcctccgccttcgaccaggccgcccgctcccgcggccacaacaaccgccgcaccgccctccgcccccgccgccagcagaaggccaccgaggtccgcctcgagcagaagatgcccaccctcctccgcgtctacatcgacggcccccacggcatgggcaagaccaccaccacccagctcctcgtcgccctcggctcccgcgacgacatcgtctacgtccccgagcccatgacctactggcgcgtcctcggcctcccccgccagtcccgcacctccaccccccacaacaccgcctccacccgcgtccgctaccgccccggcacccgccgctggtga

SEQ ID NO: 6869 - RNA, 360 nt, synthetic construct
  misc_feature 1..360: note = derived and/or modified sequence opt3 fromThymidine_Kinase_TK__Herpes_Simplex_Virus_1_(HSV-1)__AA F72499
  source 1..360: mol_type = other RNA
atggccagctacccctgccaccagcatgcttccgcattcgaccaagccgcgagatctaggggccacaacaatcggcgcaccgctctgcgacctcgtagacagcagaaggccacagaggtgaggctcgaacagaaaatgccaactcttctgcgggtctatatcgatgggccgcatggaatgggtaagacgaccacaactcaattgttagttgcactgggctcacgcgacgatattgtgtacgtacccgagcctatgacctattggagagtgctagggctcccaaggcagagtcggacaagcactccccacaacaccgcctccacacgcgtccgatacagacctggaaccaggcggtggtga

SEQ ID NO: 6870 - RNA, 360 nt, synthetic construct
  misc_feature 1..360: note = derived and/or modified sequence opt4 fromThymidine_Kinase_TK__Herpes_Simplex_Virus_1_(HSV-1)__AA F72499
  source 1..360: mol_type = other RNA
atggccagctacccctgccaccagcacgccagcgccttcgaccaggccgccagaagcagaggccacaacaacagaagaaccgccctgagacccagaagacagcagaaggccaccgaggtgagactggagcagaagatgcccaccctgctgagagtgtacatcgacggcccccacggcatgggcaagaccaccaccacccagctgctggtggccctgggcagcagagacgacatcgtgtacgtgcccgagcccatgacctactggagagtgctgggcctgcccagacagagcagaaccagcaccccccacaacaccgccagcaccagagtgagatacagacccggcaccagaagatggtga

SEQ ID NO: 6871 - RNA, 360 nt, synthetic construct
  misc_feature 1..360: note = derived and/or modified sequence opt5 fromThymidine_Kinase_TK__Herpes_Simplex_Virus_1_(HSV-1)__AA F72499
  source 1..360: mol_type = other RNA
atggccagctacccctgccaccagcatgcttccgccttcgaccaagcggctagatctcggggccacaacaatcgcagaaccgccctgcggcctcgcagacagcagaaggccacagaggtgcggctcgaacagaaaatgccgacgctgcttcgcgtctatatcgatgggccccatggaatgggcaagaccacaaccacacaactgctcgttgctctggggagcagagacgatattgtgtacgtgcctgagcccatgacctattggcgggtccttggactgcctcgccagtccagaacatctacgccccacaacaccgccagcacccgggtgcgctacagacctggcacacggcgctggtga

SEQ ID NO: 6872 - RNA, 360 nt, synthetic construct
  misc_feature 1..360: note = derived and/or modified sequence opt6 fromThymidine_Kinase_TK__Herpes_Simplex_Virus_1_(HSV-1)__AA F72499
  source 1..360: mol_type = other RNA
atggcaagctatccatgtcaccaacacgcaagcgcattcgatcaagcagcaagaagcagaggacataacaatagaagaacagcattaagaccaagaagacaacaaaaagcaacagaagtaagattagaacaaaaaatgccaacactattaagagtatacatagacggaccacacggaatgggaaaaacaacaacaacacaattattagtagcattaggatcaagagatgacatagtatatgtaccagaaccaatgacatactggagagtactaggactaccaagacaaagcagaacatcaacaccacacaatacagcaagcacaagagtaagatatagaccaggaacaagaagatggtaa

SEQ ID NO: 6873 - protein, 103 aa, synthetic construct
  REGION 1..103: note Thymidine_Kinase_TK__Herpes_Simplex_Virus_1_(HSV-1)__Q9IZ03
MASYPCHQHASAFDQAARSRGHSNRRTALRPRRQQEATEVRLEQKMPTLLRVYIDGPHGMGKTTTTQLLVALGSRDDIVYVPEPITYWQVLGASETIANIYTT

SEQ ID NO: 6874 - RNA, 312 nt, synthetic construct
  misc_feature 1..312: note Thymidine_Kinase_TK__Herpes_Simplex_Virus_1_(HSV-1)__AAF724 98
  source 1..312: mol_type = other RNA
atggcttcgtacccctgccatcaacacgcgtctgcgttcgaccaggctgcgcgttctcgcggccatagcaaccgacgtacggcgttgcgccctcgccggcaacaagaagccacggaagtccgcctggagcagaaaatgcccacgctactgcgggtttatatagacggtcctcacgggatggggaaaaccaccaccacgcaactgctggtggccctgggttcgcgcgacgatatcgtctacgtacccgagccgataacttactggcaggtgctgggggcttccgagacaatcgcgaacatctacaccacataa

SEQ ID NO: 6875 - RNA, 312 nt, synthetic construct
  misc_feature 1..312: note = derived and/or modified sequence opt1 fromThymidine_Kinase_TK__Herpes_Simplex_Virus_1_(HSV-1)__AA F72498
  source 1..312: mol_type = other RNA
atggccagctacccctgccaccagcacgcctccgcgttcgaccaggccgcccgcagccggggccactccaaccgccggaccgccctgcgcccgcggcgccagcaggaggccaccgaggtgcggctcgagcagaagatgcccacgctgctgcgcgtgtacatcgacgggccccacggcatggggaagaccaccaccacgcagctcctggtggcgctgggcagccgggacgacatcgtgtacgtccccgagccgatcacctactggcaggtcctcggggcctccgagaccatcgccaacatctacaccacgtga

SEQ ID NO: 6876 - RNA, 312 nt, synthetic construct
  misc_feature 1..312: note = derived and/or modified sequence opt2 fromThymidine_Kinase_TK__Herpes_Simplex_Virus_1_(HSV-1)__AA F72498
  source 1..312: mol_type = other RNA
atggcctcctacccctgccaccagcacgcctccgccttcgaccaggccgcccgctcccgcggccactccaaccgccgcaccgccctccgcccccgccgccagcaggaggccaccgaggtccgcctcgagcagaagatgcccaccctcctccgcgtctacatcgacggcccccacggcatgggcaagaccaccaccacccagctcctcgtcgccctcggctcccgcgacgacatcgtctacgtccccgagcccatcacctactggcaggtcctcggcgcctccgagaccatcgccaacatctacaccacctga

SEQ ID NO: 6877 - RNA, 312 nt, synthetic construct
  misc_feature 1..312: note = derived and/or modified sequence opt3 fromThymidine_Kinase_TK__Herpes_Simplex_Virus_1_(HSV-1)__AA F72498
  source 1..312: mol_type = other RNA
atggccagctacccctgccaccagcatgcttccgcattcgaccaggccgcgagatctaggggccactcaaaccggcgcaccgctctgcgacctcgtagacagcaggaggccacagaagtgaggctcgagcagaagatgccaactcttctgcgggtctatatcgatgggccgcatggaatgggtaaaacgaccacaactcaattgttagttgcactgggcagtcgcgacgatattgtgtacgtacccgaacctataacctattggcaagtgctaggggccagcgagacaatcgctaatatttacaccacttga

SEQ ID NO: 6878 - RNA, 312 nt, synthetic construct
  misc_feature 1..312: note = derived and/or modified sequence opt4 fromThymidine_Kinase_TK__Herpes_Simplex_Virus_1_(HSV-1)__AA F72498
  source 1..312: mol_type = other RNA
atggccagctacccctgccaccagcacgccagcgccttcgaccaggccgccagaagcagaggccacagcaacagaagaaccgccctgagacccagaagacagcaggaggccaccgaggtgagactggagcagaagatgcccaccctgctgagagtgtacatcgacggcccccacggcatgggcaagaccaccaccacccagctgctggtggccctgggcagcagagacgacatcgtgtacgtgcccgagcccatcacctactggcaggtgctgggcgccagcgagaccatcgccaacatctacaccacctga

SEQ ID NO: 6879 - RNA, 312 nt, synthetic construct
  misc_feature 1..312: note = derived and/or modified sequence opt5 fromThymidine_Kinase_TK__Herpes_Simplex_Virus_1_(HSV-1)__AA F72498
  source 1..312: mol_type = other RNA
atggccagctacccctgccaccagcatgcttccgccttcgaccaagcggctagatctcggggccacagcaaccgcagaaccgccctgcggcctcgcagacagcaggaggccacagaagtgcggctcgagcagaagatgccgacgctgcttcgcgtctatatcgatgggccccatggaatgggcaaaaccacaaccacacaactgctcgttgctctggggtccagagacgatattgtgtacgtgcctgaacccatcacctattggcaggtccttggagcctctgagacaattgctaatatctacaccacgtga

SEQ ID NO: 6880 - RNA, 312 nt, synthetic construct
  misc_feature 1..312: note = derived and/or modified sequence opt6 fromThymidine_Kinase_TK__Herpes_Simplex_Virus_1_(HSV-1)__AA F72498
  source 1..312: mol_type = other RNA
atggcatcatacccatgccaccaacacgcatcagcattcgaccaagcagcaagatcaagaggacactcaaacagaagaacagcactaagaccaagaagacaacaagaagcaacagaagtaagactagaacaaaaaatgccaacactactaagagtatacatagacggaccacacggaatgggaaaaacaacaacaacacaactactagtagcactaggatcaagagacgacatagtatacgtaccagaaccaataacatactggcaagtactaggagcatcagaaacaatagcaaacatatacacaacataa

SEQ ID NO: 6881 - protein, 224 aa, synthetic construct
  REGION 1..224: note Thymidine_Kinase_TK__Herpes_Simplex_Virus_1_(HSV-1)__Q9IZ07
MASYPGHQHASAFDQAARSRGHSNRRTALRPRRQQEATEVRLEQKMPTLLRVYIDGPHGMGKTTTTQLLVALGSRDDIVYVPEPMTYWRVLGASETIANIYTTQHRLDQGEISAGDAAVVMTSAQITMGMPYAVTDAVLAPHIGGGGWELTCPAPGPHPHLRPASHRRPPVLPGRAVPYGQHDPPGRAGVRGPHPADLARHKHRVGGPSGGQTHRPPGQTPAPR

SEQ ID NO: 6882 - RNA, 675 nt, synthetic construct
  misc_feature 1..675: note Thymidine_Kinase_TK__Herpes_Simplex_Virus_1_(HSV-1)__AAF724 94
  source 1..675: mol_type = other RNA
atggcttcgtaccccggccatcaacacgcgtctgcgttcgaccaggctgcgcgttctcgcggccatagcaaccgacgtacggcgttgcgccctcgccggcagcaagaagccacggaagtccgcctggagcagaaaatgcccacgctactgcgggtttatatagacggtcctcacgggatggggaaaaccaccaccacgcaactgctggtggccctgggttcgcgcgacgatatcgtctacgtacccgagccgatgacttactggcgggtgctgggggcttccgagacaatcgcgaacatctacaccacacaacaccgcctcgaccagggtgagatatcggccggggacgcggcggtggtaatgacaagcgcccagataacaatgggcatgccttatgccgtgaccgacgccgttctggctcctcatatcggggggggaggctgggagctcacatgccccgcccccggccctcaccctcatcttcgaccggcatcccatcgccgccctcctgtgctacccggccgcgcggtaccttatgggcagcatgaccccccaggccgtgctggcgttcgtggccctcatcccgccgaccttgcccggcacaaacatcgtgttgggggcccttccggaggacagacacatcgaccgcctggccaaacgccagcgccccggtga

SEQ ID NO: 6883 - RNA, 675 nt, synthetic construct
  misc_feature 1..675: note = derived and/or modified sequence opt1 fromThymidine_Kinase_TK__Herpes_Simplex_Virus_1_(HSV-1)__AA F72494
  source 1..675: mol_type = other RNA
atggccagctaccccggccaccagcacgcctccgccttcgaccaggccgcccgcagccgggggcactccaaccgccggaccgccctgcgcccgcggcgccagcaggaggccaccgaggtgcggctcgagcagaagatgcccacgctgctgcgcgtctacatcgacggcccccacgggatgggcaagaccaccaccacgcagctcctggtggcgctggggagccgggacgacatcgtgtacgtccccgagccgatgacctactggcgcgtgctcggcgcctccgagaccatcgccaacatctacaccacgcagcaccggctggaccagggcgagatcagcgccggggacgcggccgtggtcatgacctccgcccagatcaccatgggcatgccctacgccgtgaccgacgccgtgctggcgccccacatcgggggcgggggctgggagctcacgtgccccgccccgggcccccacccccacctccgccccgccagccaccggcgcccgcccgtcctgcccgggcgggccgtgccctacggccagcacgacccgcccgggcgcgccggcgtgcggggcccccaccccgcggacctggcccgccacaagcaccgggtcgggggcccgtccgggggccagacccaccgcccgcccgggcagacccccgcgccccggtga

SEQ ID NO: 6884 - RNA, 675 nt, synthetic construct
  misc_feature 1..675: note = derived and/or modified sequence opt2 fromThymidine_Kinase_TK__Herpes_Simplex_Virus_1_(HSV-1)__AA F72494
  source 1..675: mol_type = other RNA
atggcctcctaccccggccaccagcacgcctccgccttcgaccaggccgcccgctcccgcggccactccaaccgccgcaccgccctccgcccccgccgccagcaggaggccaccgaggtccgcctcgagcagaagatgcccaccctcctccgcgtctacatcgacggcccccacggcatgggcaagaccaccaccacccagctcctcgtcgccctcggctcccgcgacgacatcgtctacgtccccgagcccatgacctactggcgcgtcctcggcgcctccgagaccatcgccaacatctacaccacccagcaccgcctcgaccagggcgagatctccgccggcgacgccgccgtcgtcatgacctccgcccagatcaccatgggcatgccctacgccgtcaccgacgccgtcctcgccccccacatcggcggcggcggctgggagctcacctgccccgcccccggcccccacccccacctccgccccgcctcccaccgccgcccccccgtcctccccggccgcgccgtcccctacggccagcacgacccccccggccgcgccggcgtccgcggcccccaccccgccgacctcgcccgccacaagcaccgcgtcggcggcccctccggcggccagacccaccgcccccccggccagacccccgccccccgctga

SEQ ID NO: 6885 - RNA, 675 nt, synthetic construct
  misc_feature 1..675: note = derived and/or modified sequence opt3 fromThymidine_Kinase_TK__Herpes_Simplex_Virus_1_(HSV-1)__AA F72494
  source 1..675: mol_type = other RNA
atggccagctaccccggccaccagcatgcttccgcattcgaccaagccgcgagatctagggggcactcaaaccggcgcaccgctctgcgacctcgtagacagcaggaggccacagaagtgaggctcgagcagaagatgccaactcttctgcgggtctatatcgatggaccgcatggtatgggcaaaacgaccacaactcaattgttagttgcactggggagtcgcgacgatattgtgtacgtacccgaacctatgacctattggagagtgctaggagccagcgagacaatagctaatatctacaccactcagcacaggctcgaccagggcgaaatttccgccggtgatgccgctgtcgtgatgacatctgcccagatcaccatggggatgccatatgcggttacggacgcagtgctggcaccccatattggaggcggcgggtgggagcttacttgccctgctccaggaccccaccctcatctgcggccagcctcgcaccgccgaccgcccgtcttgcctggtagagcagtgccatacggccaacacgatccccctgggagggctggagtacggggcccacatcccgccgacctcgcgcgtcacaagcaccgcgttggtgggccgtcaggaggccagacccatagacctcccggccagacaccagcccctaggtga

SEQ ID NO: 6886 - RNA, 675 nt, synthetic construct
  misc_feature 1..675: note = derived and/or modified sequence opt4 fromThymidine_Kinase_TK__Herpes_Simplex_Virus_1_(HSV-1)__AA F72494
  source 1..675: mol_type = other RNA
atggccagctaccccggccaccagcacgccagcgccttcgaccaggccgccagaagcagaggccacagcaacagaagaaccgccctgagacccagaagacagcaggaggccaccgaggtgagactggagcagaagatgcccaccctgctgagagtgtacatcgacggcccccacggcatgggcaagaccaccaccacccagctgctggtggccctgggcagcagagacgacatcgtgtacgtgcccgagcccatgacctactggagagtgctgggcgccagcgagaccatcgccaacatctacaccacccagcacagactggaccagggcgagatcagcgccggcgacgccgccgtggtgatgaccagcgcccagatcaccatgggcatgccctacgccgtgaccgacgccgtgctggccccccacatcggcggcggcggctgggagctgacctgccccgcccccggcccccacccccacctgagacccgccagccacagaagaccccccgtgctgcccggcagagccgtgccctacggccagcacgacccccccggcagagccggcgtgagaggcccccaccccgccgacctggccagacacaagcacagagtgggcggccccagcggcggccagacccacagaccccccggccagacccccgcccccagatga

SEQ ID NO: 6887 - RNA, 675 nt, synthetic construct
  misc_feature 1..675: note = derived and/or modified sequence opt5 fromThymidine_Kinase_TK__Herpes_Simplex_Virus_1_(HSV-1)__AA F72494
  source 1..675: mol_type = other RNA
atggccagctaccccggccaccagcatgcttccgccttcgaccaagcggctagatctcgggggcacagcaaccgcagaaccgccctgcggcctcgcagacagcaggaggccacagaagtgcggctcgagcagaagatgccgacgctgcttcgcgtctatatcgatggaccccatggcatggggaaaaccacaaccacacaactgctcgttgctctgggatccagagacgatattgtgtacgtgcctgaacccatgacctattggcgggtccttggcgcctctgagacaatcgctaatatttacaccacgcagcaccgcctggaccagggggaaatcagcgccggagatgcggccgtggttatgacctccgctcagattacaatgggcatgccttatgccgtgaccgacgctgtcctcgcgccccatatcggcgggggaggctgggagctgacatgccctgccccggggccccaccctcacctgagacccgcctctcatcggcgccctcccgtgctcccgggacgcgctgttccttacggccaacacgatccccctgggcgggccggagtgcgcggcccccatcccgctgacctggccagacacaagcaccgggtcggcgggcctagcggaggccagacccatagaccgcccgggcagacgcctgcccccagatga

SEQ ID NO: 6888 - RNA, 675 nt, synthetic construct
  misc_feature 1..675: note = derived and/or modified sequence opt6 fromThymidine_Kinase_TK__Herpes_Simplex_Virus_1_(HSV-1)__AA F72494
  source 1..675: mol_type = other RNA
atggcatcatatccaggacaccaacacgccagcgcatttgatcaagcagcacgaagcagaggacattcaaataggagaacagcattacgaccacgaagacaacaagaagcaacagaagtaagactagaacaaaaaatgccaacattactaagagtatacatagatggaccacatggaatgggaaaaacaacaacaacacaactattagtagcattaggctcaagagacgatatagtatatgtaccagaaccaatgacctactggagagtactaggagcatcagaaacaatagcaaacatatatacaacacaacatagattagatcaaggagaaatatcagcaggagacgcagcagtagtaatgacatcagcacaaataaccatgggaatgccatatgcagtaacagatgcagtactagcaccacatataggaggaggaggatgggaattaacatgtccagcaccaggaccacatccacatttaagaccagcatcacatagaaggccaccagtattaccaggaagagcagtcccatacggacaacatgatcctccaggaagagcaggagtaagaggaccacatccagcagacctagcaagacacaaacacagagtaggaggaccatcaggaggacaaacacatagaccaccaggacaaacaccagcaccaagataa

SEQ ID NO: 6889 - protein, 376 aa, synthetic construct
  REGION 1..376: note Thymidine_Kinase_TK__Herpes_Simplex_Virus_1_(HSV-1)__Q9QNF7
MASYPCHQHASAFDQAARSRGHSNRRTALRPRRQQEATEVRLEQKMPTLLRVYIDGPHGMGKTTTTQLLVALGSRDDIVYVPEPMTYWQVLGASETIANIYTTQHRLDQGEISAGDAAVVMTSAQITMGMPYAVTDAVLAPHIGGEAGSSHAPPPALTLIFDRHPIAALLCYPAARYLMGSMTPQAVLAFVALIPPTLPGTNIVLGALPEDRHIDRLAKRQRPGERLDLAMLAAIRRVYGLLANTVRYLQGGGSWREDWGQLSGTAVPPQGAEPQSNAGPRPHIGDTLFTLFRAPELLAPNGDLYNVFAWALDVLAKRLRPMHVFILDYDQSPAGCRDALLQLTSGMVQTHVTTPGSIPTICDLARTFAREMGEAN

SEQ ID NO: 6890 - RNA, 1131 nt, synthetic construct
  misc_feature 1..1131: note Thymidine_Kinase_TK__Herpes_Simplex_Virus_1_(HSV-1)__AAF724 91
  source 1..1131: mol_type = other RNA
atggcttcgtacccctgccatcaacacgcgtctgcgttcgaccaggctgcgcgttctcgcggccatagcaaccgacgtacggcgttgcgccctcgccggcagcaagaagccacggaagtccgcctggagcagaaaatgcccacgctactgcgggtttatatagacggtcctcacgggatggggaaaaccaccaccacgcaactgctggtggccctgggttcgcgcgacgatatcgtctacgtacccgagccgatgacttactggcaggtgctgggggcttccgagacaatcgcgaacatctacaccacacaacaccgcctcgaccagggtgagatatcggccggggacgcggcggtggtaatgacaagcgcccagataacaatgggcatgccttatgccgtgaccgacgccgttctggctcctcatatcgggggggaggctgggagctcacatgccccgcccccggccctcaccctcatcttcgaccgccatcccatcgccgccctcctgtgctacccggccgcgcgataccttatgggcagcatgaccccccaggccgtgctggcgttcgtggccctcatcccgccgaccttgcccggcacaaacatcgtgttgggggcccttccggaggacagacacatcgaccgcctggccaaacgccagcgccccggcgagcggcttgacctggctatgctggccgcgattcgccgcgtttacgggctgcttgccaatacggtgcggtatctgcagggcggcgggtcgtggcgggaggattggggacagctttcggggacggccgtgccgccccagggtgccgagccccagagcaacgcgggcccacgaccccatatcggggacacgttatttaccctgtttcgggcccccgagttgctggcccccaacggcgacctgtataacgtgtttgcctgggccttggacgtcttggccaaacgcctccgtcccatgcacgtctttatcctggattacgaccaatcgcccgccggctgccgggacgccctgctgcaacttacctccgggatggtccagacccacgtcaccaccccaggctccataccgacgatctgcgacctggcgcgcacgtttgcccgggagatgggggaggctaactga

SEQ ID NO: 6891 - RNA, 1131 nt, synthetic construct
  misc_feature 1..1131: note = derived and/or modified sequence opt1 fromThymidine_Kinase_TK__Herpes_Simplex_Virus_1_(HSV-1)__AA F72491
  source 1..1131: mol_type = other RNA
atggccagctacccctgccaccagcacgcctccgcgttcgaccaggccgcccgcagccggggccactccaaccgccggaccgccctgcgcccgcggcgccagcaggaggccaccgaggtgcggctcgagcagaagatgcccacgctgctgcgcgtctacatcgacgggccccacggcatggggaagaccaccaccacgcagctcctggtggcgctgggcagccgggacgacatcgtgtacgtccccgagccgatgacctactggcaggtcctcggggcctccgagaccatcgccaacatctacaccacgcagcaccgcctggaccagggcgagatcagcgccggcgacgcggccgtggtgatgacctccgcccagatcaccatggggatgccctacgccgtgaccgacgccgtgctggcgccccacatcggcggggaggccggcagctcccacgcgcccccgcccgccctcacgctgatcttcgaccggcaccccatcgccgccctgctctgctaccccgccgcccgctacctgatggggagcatgaccccgcaggccgtcctggccttcgtggcgctcatcccgcccaccctgcccggcaccaacatcgtgctgggcgccctccccgaggaccggcacatcgaccgcctggccaagcggcagcgccccggggagcggctggacctcgccatgctggccgcgatccgccgggtctacggcctgctcgccaacacggtgcgctacctgcagggcgggggctcctggcgggaggactgggggcagctgagcggcaccgccgtgccgccccagggggccgagccccagtccaacgcgggcccccgcccccacatcggggacaccctcttcaccctgttccgcgcccccgagctgctcgccccgaacggcgacctgtacaacgtcttcgcctgggccctggacgtgctcgcgaagcggctgcgccccatgcacgtgttcatcctggactacgaccagagccccgccggctgccgggacgccctcctgcagctgacgtccgggatggtccagacccacgtgaccacccccggcagcatcccgacgatctgcgacctcgcccgcaccttcgcccgggagatgggggaggcgaactga

SEQ ID NO: 6892 - RNA, 1131 nt, synthetic construct
  misc_feature 1..1131: note = derived and/or modified sequence opt2 fromThymidine_Kinase_TK__Herpes_Simplex_Virus_1_(HSV-1)__AA F72491
  source 1..1131: mol_type = other RNA
atggcctcctacccctgccaccagcacgcctccgccttcgaccaggccgcccgctcccgcggccactccaaccgccgcaccgccctccgcccccgccgccagcaggaggccaccgaggtccgcctcgagcagaagatgcccaccctcctccgcgtctacatcgacggcccccacggcatgggcaagaccaccaccacccagctcctcgtcgccctcggctcccgcgacgacatcgtctacgtccccgagcccatgacctactggcaggtcctcggcgcctccgagaccatcgccaacatctacaccacccagcaccgcctcgaccagggcgagatctccgccggcgacgccgccgtcgtcatgacctccgcccagatcaccatgggcatgccctacgccgtcaccgacgccgtcctcgccccccacatcggcggcgaggccggctcctcccacgcccccccccccgccctcaccctcatcttcgaccgccaccccatcgccgccctcctctgctaccccgccgcccgctacctcatgggctccatgaccccccaggccgtcctcgccttcgtcgccctcatcccccccaccctccccggcaccaacatcgtcctcggcgccctccccgaggaccgccacatcgaccgcctcgccaagcgccagcgccccggcgagcgcctcgacctcgccatgctcgccgccatccgccgcgtctacggcctcctcgccaacaccgtccgctacctccagggcggcggctcctggcgcgaggactggggccagctctccggcaccgccgtccccccccagggcgccgagccccagtccaacgccggcccccgcccccacatcggcgacaccctcttcaccctcttccgcgcccccgagctcctcgcccccaacggcgacctctacaacgtcttcgcctgggccctcgacgtcctcgccaagcgcctccgccccatgcacgtcttcatcctcgactacgaccagtcccccgccggctgccgcgacgccctcctccagctcacctccggcatggtccagacccacgtcaccacccccggctccatccccaccatctgcgacctcgcccgcaccttcgcccgcgagatgggcgaggccaactga

SEQ ID NO: 6893 - RNA, 1131 nt, synthetic construct
  misc_feature 1..1131: note = derived and/or modified sequence opt3 fromThymidine_Kinase_TK__Herpes_Simplex_Virus_1_(HSV-1)__AA F72491
  source 1..1131: mol_type = other RNA
atggccagctacccctgccaccagcatgcttccgcattcgaccaagccgcgagatctaggggccactcaaaccggcgcaccgctctgcgacctcgtagacagcaggaggccacagaagtgaggctcgagcagaagatgccaactcttctgcgggtctatatcgatgggccgcatggaatgggtaaaacgaccacaactcaattgttagttgcactgggcagtcgcgacgatattgtgtacgtacccgaacctatgacctattggcaagtgctaggggccagcgagacaatagctaatatctacaccactcagcacagactcgaccagggagaaatttccgcaggcgatgccgctgtcgtgatgacatctgcccagatcaccatgggtatgccatatgcggttacggacgcagtgctggctccccatattgggggagaggctggctcgtcacacgcccctccacccgcacttactctgatctttgataggcaccctatagctgccttgctctgttacccagcggcccggtatctgatgggcagcatgaccccgcaggcagtcctggctttcgtggccctcattccccctacattaccagggactaacatcgtactgggagcccttcccgaggaccgccatatcgatcgattggccaagagacagaggcctggtgaacggctggacctagcaatgctcgccgctattcgtcgcgtttacggcctgcttgcgaataccgtgagatacctgcaagggggaggcagttggagggaggattggggtcagttgtccgggacagcagtcccaccccagggagccgaaccgcagtctaacgctggccctcggccccacatcggcgacaccctctttacgctgttccgagccccagagttactggcacctaatggggatctctataacgtgtttgcctgggctcttgacgtgctggccaaacgcttgagacccatgcatgtcttcatactagactacgatcaaagcccagcaggatgcagggacgcgctgctccagctgacttccggtatggttcagacacacgtgaccactcccggctcaattcctacaatctgtgatcttgctcggacctttgcccgcgagatgggggaagcaaattga

SEQ ID NO: 6894 - RNA, 1131 nt, synthetic construct
  misc_feature 1..1131: note = derived and/or modified sequence opt4 fromThymidine_Kinase_TK__Herpes_Simplex_Virus_1_(HSV-1)__AA F72491
  source 1..1131: mol_type = other RNA
atggccagctacccctgccaccagcacgccagcgccttcgaccaggccgccagaagcagaggccacagcaacagaagaaccgccctgagacccagaagacagcaggaggccaccgaggtgagactggagcagaagatgcccaccctgctgagagtgtacatcgacggcccccacggcatgggcaagaccaccaccacccagctgctggtggccctgggcagcagagacgacatcgtgtacgtgcccgagcccatgacctactggcaggtgctgggcgccagcgagaccatcgccaacatctacaccacccagcacagactggaccagggcgagatcagcgccggcgacgccgccgtggtgatgaccagcgcccagatcaccatgggcatgccctacgccgtgaccgacgccgtgctggccccccacatcggcggcgaggccggcagcagccacgcccccccccccgccctgaccctgatcttcgacagacaccccatcgccgccctgctgtgctaccccgccgccagatacctgatgggcagcatgaccccccaggccgtgctggccttcgtggccctgatcccccccaccctgcccggcaccaacatcgtgctgggcgccctgcccgaggacagacacatcgacagactggccaagagacagagacccggcgagagactggacctggccatgctggccgccatcagaagagtgtacggcctgctggccaacaccgtgagatacctgcagggcggcggcagctggagagaggactggggccagctgagcggcaccgccgtgcccccccagggcgccgagccccagagcaacgccggccccagaccccacatcggcgacaccctgttcaccctgttcagagcccccgagctgctggcccccaacggcgacctgtacaacgtgttcgcctgggccctggacgtgctggccaagagactgagacccatgcacgtgttcatcctggactacgaccagagccccgccggctgcagagacgccctgctgcagctgaccagcggcatggtgcagacccacgtgaccacccccggcagcatccccaccatctgcgacctggccagaaccttcgccagagagatgggcgaggccaactga

SEQ ID NO: 6895 - RNA, 1131 nt, synthetic construct
  misc_feature 1..1131: note = derived and/or modified sequence opt5 fromThymidine_Kinase_TK__Herpes_Simplex_Virus_1_(HSV-1)__AA F72491
  source 1..1131: mol_type = other RNA
atggccagctacccctgccaccagcatgcttccgccttcgaccaagcggctagatctcggggccacagcaaccgcagaaccgccctgcggcctcgcagacagcaggaggccacagaagtgcggctcgagcagaagatgccgacgctgcttcgcgtctatatcgatgggccccatggaatgggcaaaaccacaaccacacaactgctcgttgctctggggtccagagacgatattgtgtacgtgcctgaacccatgacctattggcaggtccttggagcctctgagacaatcgctaatatttacaccacgcagcaccggctggaccagggcgaaatcagcgccggggatgcggccgtggttatgacctccgctcaaattacaatgggaatgccttatgccgtgaccgacgctgtcctcgcgccccatatcggcggcgaggccgggtctagccacgcccctccgcccgctctgacactgatctttgatcgccaccctattgccgctctcctgtgttaccccgccgccagatatcttatgggatccatgacccctcaggctgtgctggcgttcgttgccctcattcccccgacgctgcctggcacaaacatcgtgcttggggctctgcccgaggaccggcatatcgatcgcctcgccaagagacagcggcctggagaacgcctggacctggccatgctcgctgccattagacgggtctacggcctgcttgcgaataccgtgagatacctgcaagggggaggcagctggcgcgaggattggggccagctctctgggacagctgtgcctccccagggagccgaaccccagtccaacgccggcccgcggccccacatcggggacaccctgtttacccttttcagagctcctgagctgctcgcccccaatggagatctgtataacgtctttgcttgggccctggacgttctcgcgaaacgcctgcggcctatgcatgtgttcattcttgactacgatcaaagccccgccggctgcagagacgctctgctccagctgacatctgggatggtgcagacgcacgtcaccacaccgggatccatccctaccatctgtgatcttgcccgcacatttgctcgggagatgggcgaagccaattga

SEQ ID NO: 6896 - RNA, 1131 nt, synthetic construct
  misc_feature 1..1131: note = derived and/or modified sequence opt6 fromThymidine_Kinase_TK__Herpes_Simplex_Virus_1_(HSV-1)__AA F72491
  source 1..1131: mol_type = other RNA
atggcaagttacccatgccatcaacacgcctcagcatttgatcaagcagcaagatctagaggtcatagtaatagaagaacagctctcagaccaagaagacaacaagaagcaacagaagtacgattagaacaaaaaatgccaacactactaagagtatatatagacggaccacatggaatgggcaaaacaacaacaacacaattattagtagcattaggttcacgagatgatatagtatatgtaccagaaccaatgacatattggcaagtattaggagcaagcgaaactatagcaaatatatatacaacacaacatagactagatcaaggtgaaataagcgcaggagatgcagccgtagtaatgacatcagctcaaataacaatgggaatgccatatgcagtaactgatgcagtattagcaccacacataggaggagaagcaggctcatcacatgccccacccccagcattaacactaatattcgatcgacacccaatagctgcactattgtgttatccagcagctagatatttaatgggaagcatgactccacaagcagttttagcatttgtagcattaatacctccaacattaccaggaacaaacattgtactaggagcactaccagaagatagacatatagatagattagcaaaaagacaaagaccaggagaaagattagatcttgcaatgttagctgcaataagaagagtatatggattattagcaaacactgtaagatacctacaaggaggaggatcctggagagaagattggggacaattaagtggaacagcagtacccccacaaggtgcagaacctcaatccaacgcaggaccaagaccccatataggagacactttattcacattatttagagccccagaattattagcaccaaatggcgatttatataacgtatttgcatgggcattagacgtacttgcaaaaagactaagacctatgcacgtattcatattagattatgaccaatcaccagcaggctgtcgagatgccttattacaacttacatctggaatggtacaaacacacgtaacaacaccagggtccataccaacaatctgtgatttagcacgaacatttgctagagaaatgggtgaagccaattaa

SEQ ID NO: 6897 - protein, 281 aa, synthetic construct [sequence omitted]

SEQ ID NO: 6898 - RNA, 846 nt, synthetic construct
  misc_feature 1..846: note = Apo2L/TRAIL__Homo_sapiens__AAB01233
  source 1..846: mol_type = other RNA
atggctatgatggaggtccaggggggacccagcctgggacagacctgcgtgctgatcgtgatcttcacagtgctcctgcagtctctctgtgtggctgtaacttacgtgtactttaccaacgagctgaagcagatgcaggacaagtactccaaaagtggcattgcttgtttcttaaaagaagatgacagttattgggaccccaatgacgaagagagtatgaacagcccctgctggcaagtcaagtggcaactccgtcagctcgttagaaagatgattttgagaacctctgaggaaaccatttctacagttcaagaaaagcaacaaaatatttctcccctagtgagagaaagaggtcctcagagagtagcagctcacataactgggaccagaggaagaagcaacacattgtcttctccaaactccaagaatgaaaaggctctgggccgcaaaataaactcctgggaatcatcaaggagtgggcattcattcctgagcaacttgcacttgaggaatggtgaactggtcatccatgaaaaagggttttactacatctattcccaaacatactttcgatttcaggaggaaataaaagaaaacacaaagaacgacaaacaaatggtccaatatatttacaaatacacaagttatcctgaccctatattgttgatgaaaagtgctagaaatagttgttggtctaaagatgcagaatatggactctattccatctatcaagggggaatatttgagcttaaggaaaatgacagaatttttgtttctgtaacaaatgagcacttgatagacatggaccatgaagccagttttttcggggcctttttagttggctaa

SEQ ID NO: 6899 - RNA, 846 nt, synthetic construct
  misc_feature 1..846: note = derived and/or modified sequence opt1 fromApo2L/TRAIL__Homo_sapiens__AAB01233
  source 1..846: mol_type = other RNA
atggccatgatggaggtgcagggcgggcccagcctgggccagacctgcgtcctcatcgtgatcttcaccgtgctgctgcagtccctctgcgtcgccgtgacgtacgtgtacttcaccaacgagctgaagcagatgcaggacaagtacagcaagtccgggatcgcgtgcttcctgaaggaggacgacagctactgggacccgaacgacgaggagtccatgaacagcccctgctggcaggtcaagtggcagctccgccagctggtgcggaagatgatcctgcgcacctccgaggagaccatcagcacggtgcaggagaagcagcagaacatcagccccctcgtccgggagcgcggcccccagcgggtggccgcccacatcaccgggacccgcggccggtccaacaccctgtccagcccgaactccaagaacgagaaggccctgggccgcaagatcaacagctgggagtccagccggtccgggcacagcttcctctccaacctgcacctccgcaacggcgagctggtgatccacgagaaggggttctactacatctacagccagacgtacttccggttccaggaggagatcaaggagaacaccaagaacgacaagcagatggtccagtacatctacaagtacaccagctaccccgaccccatcctgctgatgaagtccgcccgcaacagctgctggtccaaggacgcggagtacggcctctacagcatctaccagggcgggatcttcgagctgaaggagaacgaccggatcttcgtgtccgtgaccaacgagcacctgatcgacatggaccacgaggccagcttcttcggcgccttcctcgtcgggtga

SEQ ID NO: 6900 - RNA, 846 nt, synthetic construct
  misc_feature 1..846: note = derived and/or modified sequence opt2 fromApo2L/TRAIL__Homo_sapiens__AAB01233
  source 1..846: mol_type = other RNA
atggccatgatggaggtccagggcggcccctccctcggccagacctgcgtcctcatcgtcatcttcaccgtcctcctccagtccctctgcgtcgccgtcacctacgtctacttcaccaacgagctcaagcagatgcaggacaagtactccaagtccggcatcgcctgcttcctcaaggaggacgactcctactgggaccccaacgacgaggagtccatgaactccccctgctggcaggtcaagtggcagctccgccagctcgtccgcaagatgatcctccgcacctccgaggagaccatctccaccgtccaggagaagcagcagaacatctcccccctcgtccgcgagcgcggcccccagcgcgtcgccgcccacatcaccggcacccgcggccgctccaacaccctctcctcccccaactccaagaacgagaaggccctcggccgcaagatcaactcctgggagtcctcccgctccggccactccttcctctccaacctccacctccgcaacggcgagctcgtcatccacgagaagggcttctactacatctactcccagacctacttccgcttccaggaggagatcaaggagaacaccaagaacgacaagcagatggtccagtacatctacaagtacacctcctaccccgaccccatcctcctcatgaagtccgcccgcaactcctgctggtccaaggacgccgagtacggcctctactccatctaccagggcggcatcttcgagctcaaggagaacgaccgcatcttcgtctccgtcaccaacgagcacctcatcgacatggaccacgaggcctccttcttcggcgccttcctcgtcggctga

SEQ ID NO: 6901 - RNA, 846 nt, synthetic construct
  misc_feature 1..846: note = derived and/or modified sequence opt3 fromApo2L/TRAIL__Homo_sapiens__AAB01233
  source 1..846: mol_type = other RNA
atggccatgatggaggtgcagggcgggcccagcctgggacaaacctgcgtcctcatcgttattttcacagtgcttctgcagtccttgtgtgtagctgtgacttacgtctattttacgaacgaattaaagcagatgcaggacaaatactctaagtcaggtatagcatgcttcctgaaagaggatgacagttattgggatcctaatgacgaagagagcatgaactccccatgttggcaagtgaagtggcagctaagacagctcgttaggaaaatgatcctgcggacctctgaagagacaatttcgactgtgcaggagaagcaacagaatatctcaccgcttgtccgcgaacgaggcccccagcgtgtggccgcgcacattaccgggacaagaggaaggagcaacaccctgagttcccctaattctaagaacgagaaggctttgggccggaaaatcaatagctgggaatcctcacgcagtggtcatagctttctctctaacctgcacctgagaaatggggagctcgtaatacatgagaaaggattctactatatctactcccagacttattttaggttccaagaagagattaaggaaaacaccaaaaatgataagcagatggttcagtacatctacaagtatacatcatacccagaccccattttactgatgaaaagcgcccggaacagttgctggtctaaggatgcagagtatggcctttactccatctatcaaggcgggatatttgaattgaaagagaatgaccgcattttcgtgagcgtcacgaacgagcacctgatcgatatggaccatgaagcctcgtttttcggagcttttctagtgggttga

SEQ ID NO: 6902 - RNA, 846 nt, synthetic construct
  misc_feature 1..846: note = derived and/or modified sequence opt4 fromApo2L/TRAIL__Homo_sapiens__AAB01233
  source 1..846: mol_type = other RNA
atggccatgatggaggtgcagggcggccccagcctgggccagacctgcgtgctgatcgtgatcttcaccgtgctgctgcagagcctgtgcgtggccgtgacctacgtgtacttcaccaacgagctgaagcagatgcaggacaagtacagcaagagcggcatcgcctgcttcctgaaggaggacgacagctactgggaccccaacgacgaggagagcatgaacagcccctgctggcaggtgaagtggcagctgagacagctggtgagaaagatgatcctgagaaccagcgaggagaccatcagcaccgtgcaggagaagcagcagaacatcagccccctggtgagagagagaggcccccagagagtggccgcccacatcaccggcaccagaggcagaagcaacaccctgagcagccccaacagcaagaacgagaaggccctgggcagaaagatcaacagctgggagagcagcagaagcggccacagcttcctgagcaacctgcacctgagaaacggcgagctggtgatccacgagaagggcttctactacatctacagccagacctacttcagattccaggaggagatcaaggagaacaccaagaacgacaagcagatggtgcagtacatctacaagtacaccagctaccccgaccccatcctgctgatgaagagcgccagaaacagctgctggagcaaggacgccgagtacggcctgtacagcatctaccagggcggcatcttcgagctgaaggagaacgacagaatcttcgtgagcgtgaccaacgagcacctgatcgacatggaccacgaggccagcttcttcggcgccttcctggtgggctga

SEQ ID NO: 6903 - RNA, 846 nt, synthetic construct
  misc_feature 1..846: note = derived and/or modified sequence opt5 fromApo2L/TRAIL__Homo_sapiens__AAB01233
  source 1..846: mol_type = other RNA
atggccatgatggaggtgcagggcgggcccagcctgggacaaacctgcgtcctcatcgttattttcacagtgctgcttcagtccctgtgtgtggctgtcacgtacgtgtattttaccaacgaactcaagcagatgcaggacaaatactctaagagcggcatcgcctgcttcctgaaagaggatgactcctattgggatcctaatgacgaagagtctatgaacagcccgtgttggcaagttaagtggcagcttagacagctggtgcggaaaatgattctccgcacatccgaagagaccatctctacagtccaggagaagcaacagaatattagccccctggtgagagaacgggggcctcagcgcgttgcggctcacatcaccggaacaagaggccggtccaacaccctgagctctcccaattccaagaacgagaaagccctcgggcgcaagatcaatagctgggaatcttccagaagcggacattcttttctgtccaaccttcatctgcggaatggcgagctcgtgattcacgagaaaggcttctactatatctacagccagacgtattttcgcttccaagaagagattaaggaaaacaccaaaaatgataagcagatggtccagtacatctacaagtatacatcctaccctgaccccattctgcttatgaaatctgccagaaacagctgctggtccaaggatgctgagtatgggctgtacagcatctatcaaggaggcatttttgaactcaaagagaatgaccggatcttcgtgtctgtgaccaacgagcacctgatcgatatggaccatgaagcctcctttttcggggcttttctggtcggatga

SEQ ID NO: 6904 - RNA, 846 nt, synthetic construct
  misc_feature 1..846: note = derived and/or modified sequence opt6 fromApo2L/TRAIL__Homo_sapiens__AAB01233
  source 1..846: mol_type = other RNA
atggcaatgatggaagtacaaggaggaccatcactaggccaaacatgtgtactaatcgtaatattcacagtactactacaatcactatgcgtagcagtaacatacgtatacttcaccaacgaactaaaacaaatgcaagataaatacagcaaatcaggaatagcatgcttcctaaaagaagacgactcatactgggacccaaatgacgaagaatcaatgaacagtccatgttggcaagtaaaatggcaattacgacaactagtaagaaaaatgatattaagaacttccgaagaaacaatatcaacagtacaagaaaaacaacaaaacatatcaccattagtaagagaaagaggaccacaaagagtagcagcccatataacaggaacaagaggaagaagcaacacactatcatcaccaaacagcaaaaacgaaaaagcattaggaagaaaaataaactcatgggaatcatcaagatctggacactcattcttaagcaacttacacctaagaaacggagaactagtcatccacgaaaaaggattctattacatatactctcaaacatactttcgcttccaagaagaaataaaagaaaacacaaaaaacgacaaacaaatggtacaatacatatacaaatacacatcatatccagacccaatcttactaatgaaatccgcacgaaactcatgttggtcaaaagacgcagaatacggactatactcaatatatcaaggaggaatatttgaactaaaagaaaacgacagaatattcgtatcagtaacaaacgaacacctaatagacatggaccacgaagcatcattcttcggagcattcctagtaggataa

SEQ ID NO: 6905 - protein, 249 aa, synthetic construct; identical to SEQ ID NO: 4825
  REGION 1..249: note = Apo3L__Homo_sapiens__O43508

SEQ ID NO: 6906 - RNA, 750 nt, synthetic construct; identical to SEQ ID NO: 4826
  misc_feature 1..750: note = Apo3L__Homo_sapiens__AAC39724
  source 1..750: mol_type = other RNA

SEQ ID NO: 6907 - RNA, 750 nt, synthetic construct; identical to SEQ ID NO: 4827
  misc_feature 1..750: note = derived and/or modified sequence opt1 fromApo3L__Homo_sapiens__AAC39724
  source 1..750: mol_type = other RNA

SEQ ID NO: 6908 - RNA, 750 nt, synthetic construct; identical to SEQ ID NO: 4828
  misc_feature 1..750: note = derived and/or modified sequence opt2 fromApo3L__Homo_sapiens__AAC39724
  source 1..750: mol_type = other RNA

SEQ ID NO: 6909 - RNA, 750 nt, synthetic construct; identical to SEQ ID NO: 4829
  misc_feature 1..750: note = derived and/or modified sequence opt3 fromApo3L__Homo_sapiens__AAC39724
  source 1..750: mol_type = other RNA

SEQ ID NO: 6910 - RNA, 750 nt, synthetic construct; identical to SEQ ID NO: 4830
  misc_feature 1..750: note = derived and/or modified sequence opt4 fromApo3L__Homo_sapiens__AAC39724
  source 1..750: mol_type = other RNA

SEQ ID NO: 6911 - RNA, 750 nt, synthetic construct; identical to SEQ ID NO: 4831
  misc_feature 1..750: note = derived and/or modified sequence opt5 fromApo3L__Homo_sapiens__AAC39724
  source 1..750: mol_type = other RNA

SEQ ID NO: 6912 - RNA, 750 nt, synthetic construct
  misc_feature 1..750: note = derived and/or modified sequence opt6 fromApo3L__Homo_sapiens__AAC39724
  source 1..750: mol_type = other RNA
atggcagctagaagatcacaaagaagaagaggaagaagaggagaaccaggtacagccctattagtaccattagcattaggattaggcttagcattagcatgtttaggattactattagcagtcgtatcactaggctcaagagcaagtctatcagcacaagaaccagcacaagaagaattagtagcagaagaagaccaagatccaagcgaattaaatccacaaacagaagaatcacaagatccagcaccctttctaaatcgattagtacgacccagaagaagtgcaccaaaaggaagaaaaacaagagcaagacgagctatagcagcacattatgaagtacatccaagaccaggacaagatggagcacaagcaggagttgatggaacagtatcaggatgggaagaagctagaataaattcatcatcaccactaagatataacagacaaattggagaatttatagtaacaagagcaggattatattatttatattgtcaagtacattttgatgaaggaaaagcagtatatttaaaactagatctattagtagatggagtactagcattaagatgtctagaagaatttagtgctacagcagcatcaagtctaggacctcaattaagattatgtcaagtaagtggactattagcattaagaccaggaagctcattaagaatacgtacattaccatgggcacatttaaaagcagcaccatttttaacatactttggattattccaagtacattaa

SEQ ID NO: 6913 - protein, 168 aa, synthetic construct
  REGION 1..168: note = Bad__Homo_sapiens__A0A024R562
MFQIPEFEPSEQEDSSSAERGLGPSPAGDGPSGSGKHHRQAPGLLWDASHQQEQPTSSSHHGGAGAVEIRSRHSSYPAGTEDDEGMGEEPSPFRGRSRSAPPNLWAAQRYGRELRRMSDEFVDSFKKGLPRPKSAGTATQMRQSSSWTRVFQSWWDRNLGRGSSAPSQ

SEQ ID NO: 6914 - RNA, 507 nt, synthetic construct
  misc_feature 1..507: note = Bad__Homo_sapiens__EAW74236
  source 1..507: mol_type = other RNA
atgttccagatcccagagtttgagccgagtgagcaggaagactccagctctgcagagaggggcctgggccccagccccgcaggggacgggccctcaggctccggcaagcatcatcgccaggccccaggcctcctgtgggacgccagtcaccagcaggagcagccaaccagcagcagccatcatggaggcgctggggctgtggagatccggagtcgccacagctcctaccccgcggggacggaggacgacgaagggatgggggaggagcccagcccctttcggggccgctcgcgctcggcgccccccaacctctgggcagcacagcgctatggccgcgagctccggaggatgagtgacgagtttgtggactcctttaagaagggacttcctcgcccgaagagcgcgggcacagcaacgcagatgcggcaaagctccagctggacgcgagtcttccagtcctggtgggatcggaacttgggcaggggaagctccgccccctcccagtga

SEQ ID NO: 6915 - RNA, 507 nt, synthetic construct
  misc_feature 1..507: note = derived and/or modified sequence opt1 fromBad__Homo_sapiens__EAW74236
  source 1..507: mol_type = other RNA
atgttccagatccccgagttcgagccgagcgagcaggaggactccagctccgccgagcgcggcctggggcccagccccgccggcgacgggccctccggcagcgggaagcaccaccggcaggcgccgggcctcctgtgggacgcctcccaccagcaggagcagcccaccagctccagccaccacggcggggccggcgccgtggagatccgctcccggcacagctcctaccccgccgggaccgaggacgacgagggcatgggggaggagcccagcccgttccgcggccggtcccgcagcgcgccgcccaacctgtgggccgcccagcggtacggccgcgagctccggcgcatgtccgacgagttcgtcgacagcttcaagaaggggctgccccggcccaagtccgccggcacggcgacccagatgcgccagagcagctcctggacccgggtgttccagagctggtgggaccgcaacctggggcggggctccagcgccccctcccagtga

SEQ ID NO: 6916 - RNA, 507 nt, synthetic construct
  misc_feature 1..507: note = derived and/or modified sequence opt2 fromBad__Homo_sapiens__EAW74236
  source 1..507: mol_type = other RNA
atgttccagatccccgagttcgagccctccgagcaggaggactcctcctccgccgagcgcggcctcggcccctcccccgccggcgacggcccctccggctccggcaagcaccaccgccaggcccccggcctcctctgggacgcctcccaccagcaggagcagcccacctcctcctcccaccacggcggcgccggcgccgtcgagatccgctcccgccactcctcctaccccgccggcaccgaggacgacgagggcatgggcgaggagccctcccccttccgcggccgctcccgctccgccccccccaacctctgggccgcccagcgctacggccgcgagctccgccgcatgtccgacgagttcgtcgactccttcaagaagggcctcccccgccccaagtccgccggcaccgccacccagatgcgccagtcctcctcctggacccgcgtcttccagtcctggtgggaccgcaacctcggccgcggctcctccgccccctcccagtga

SEQ ID NO: 6917 - RNA, 507 nt, synthetic construct
  misc_feature 1..507: note = derived and/or modified sequence opt3 fromBad__Homo_sapiens__EAW74236
  source 1..507: mol_type = other RNA
atgttccagatccccgagtttgaacctagcgagcaagaagactcctcttcagccgagagaggcctggggccaagtccggctggagatggtcccagcggctccgggaagcaccataggcaggcacctggactcctttgggacgcctctcaccagcaggaacaaccaacctcgtcaagccatcacggcggtgcgggggctgtggagattcggagtcgccattcctcttaccccgccggaacagaggatgacgaaggcatgggcgaggaacctagcccattccgagggcgttccagatcagcaccccctaacctgtgggccgctcagaggtatggacgggagttgcgcagaatgagtgatgagtttgtcgacagcttcaaaaagggtttaccaaggccgaaatctgcaggcactgccacgcagatgcggcagtcctcaagctggacccgcgtttttcaaagttggtgggatcgaaatctggggagaggatcttccgctcccagccagtga

SEQ ID NO: 6918 - RNA, 507 nt, synthetic construct
  misc_feature 1..507: note = derived and/or modified sequence opt4 fromBad__Homo_sapiens__EAW74236
  source 1..507: mol_type = other RNA
atgttccagatccccgagttcgagcccagcgagcaggaggacagcagcagcgccgagagaggcctgggccccagccccgccggcgacggccccagcggcagcggcaagcaccacagacaggcccccggcctgctgtgggacgccagccaccagcaggagcagcccaccagcagcagccaccacggcggcgccggcgccgtggagatcagaagcagacacagcagctaccccgccggcaccgaggacgacgagggcatgggcgaggagcccagccccttcagaggcagaagcagaagcgccccccccaacctgtgggccgcccagagatacggcagagagctgagaagaatgagcgacgagttcgtggacagcttcaagaagggcctgcccagacccaagagcgccggcaccgccacccagatgagacagagcagcagctggaccagagtgttccagagctggtgggacagaaacctgggcagaggcagcagcgcccccagccagtga

SEQ ID NO: 6919 - RNA, 507 nt, synthetic construct
  misc_feature 1..507: note = derived and/or modified sequence opt5 fromBad__Homo_sapiens__EAW74236
  source 1..507: mol_type = other RNA
atgttccagatccccgagtttgaacctagcgagcaagaagactcctctagcgccgagagaggcctggggccgtcccccgctggagatggcccttctgggagcggaaagcaccatcggcaggcccccggcctcctgtgggacgcgtcccaccagcaggaacaacctacctctagctcccatcacgggggagctggcgccgtggagattcgcagcagacattcttcctaccccgccggcacagaggatgacgaagggatgggagaggaacctagcccgttccggggccgctctagatccgctccccctaacctttgggccgctcagcggtatgggcgcgagctgagacggatgagcgatgagtttgtcgactctttcaaaaagggactcccccgccctaaatccgccggcacggcgacccagatgagacagagctcctcttggacacgggtttttcaaagctggtgggatcgcaatctggggagaggatccagcgccccctctcagtga

SEQ ID NO: 6920 - RNA, 507 nt, synthetic construct
  misc_feature 1..507: note = derived and/or modified sequence opt6 fromBad__Homo_sapiens__EAW74236
  source 1..507: mol_type = other RNA
atgtttcaaataccagaattcgaaccaagtgaacaagaagatagtagtagtgcagaaagaggattaggaccaagtccagcaggagatggaccaagtggaagtggaaaacatcatagacaagctccaggattattatgggatgcaagtcatcaacaagaacaaccaacaagcagtagtcatcatggaggagcaggagcagtagaaataagaagtagacatagtagttatccggcaggaacagaagatgatgaaggaatgggagaagaaccatcaccatttaggggaagaagtagaagtgcaccaccaaatttatgggcagcacaaagatatggaagagaattaagaagaatgagtgatgaatttgtagatagttttaaaaaaggattaccaagaccaaaaagtgcaggaacagcaacacaaatgaggcaaagtagcagttggacaagagtatttcaaagttggtgggatagaaatttaggaagaggaagcagtgcaccaagtcaataa

SEQ ID NO: 6921 - protein, 168 aa, synthetic construct; identical to SEQ ID NO: 6913
  REGION 1..168: note = Bad__Homo_sapiens__Q92934

SEQ ID NO: 6922 - RNA, 507 nt, synthetic construct
  misc_feature 1..507: note = Bad__Homo_sapiens__AAB72092
  source 1..507: mol_type = other RNA
atgttccagatcccagagtttgagccgagtgagcaggaagactccagctctgcagagaggggcctgggccccagccccgcaggggacgggccctcaggctccggcaagcatcatcgccaggccccaggcctcctgtgggacgccagtcaccagcaggagcagccaaccagcagcagccatcatggaggcgctggggctgtggagatccggagtcgccacagctcctaccccgcggggacggaggacgacgaagggatgggggaggagcccagcccctttcggggccgttcgcgctcggcgccccccaacctctgggcagcacagcgctatggccgcgagctccggaggatgagtgacgagtttgtggactcctttaagaagggacttcctcgcccgaagagcgcgggcacagcaacgcagatgcggcaaagctccagctggacgcgagtcttccagtcctggtgggatcggaacttgggcaggggaagctccgccccctcccagtga

SEQ ID NO: 6923 - RNA, 507 nt, synthetic construct; identical to SEQ ID NO: 6915
  misc_feature 1..507: note = derived and/or modified sequence opt1 fromBad__Homo_sapiens__AAB72092
  source 1..507: mol_type = other RNA

SEQ ID NO: 6924 - RNA, 507 nt, synthetic construct; identical to SEQ ID NO: 6916
  misc_feature 1..507: note = derived and/or modified sequence opt2 fromBad__Homo_sapiens__AAB72092
  source 1..507: mol_type = other RNA

SEQ ID NO: 6925 - RNA, 507 nt, synthetic construct; identical to SEQ ID NO: 6917
  misc_feature 1..507: note = derived and/or modified sequence opt3 fromBad__Homo_sapiens__AAB72092
  source 1..507: mol_type = other RNA

SEQ ID NO: 6926 - RNA, 507 nt, synthetic construct; identical to SEQ ID NO: 6918
  misc_feature 1..507: note = derived and/or modified sequence opt4 fromBad__Homo_sapiens__AAB72092
  source 1..507: mol_type = other RNA

SEQ ID NO: 6927 - RNA, 507 nt, synthetic construct; identical to SEQ ID NO: 6919
  misc_feature 1..507: note = derived and/or modified sequence opt5 fromBad__Homo_sapiens__AAB72092
  source 1..507: mol_type = other RNA

SEQ ID NO: 6928 - RNA, 507 nt, synthetic construct
  misc_feature 1..507: note = derived and/or modified sequence opt6 fromBad__Homo_sapiens__AAB72092
  source 1..507: mol_type = other RNA
atgtttcaaataccagaatttgaaccaagtgaacaagaagattcaagtagtgcagaaagaggattaggaccatcaccagcaggagatggaccaagtggaagtggaaaacatcatagacaagcaccaggattattatgggatgcatcacatcaacaagaacaaccaacatcaagctcacatcatggaggagcaggagcagtagaaataagatcaagacacagttcatatccagcaggaacagaagatgatgaaggaatgggagaagaaccatcaccatttagaggaagatcaagaagtgcaccaccaaatttatgggcagcacaaagatatggaagagaattaagaagaatgagtgatgaatttgtagatagttttaaaaaaggattaccaagaccaaaaagtgcaggaacagcaacacaaatgagacaaagttcaagctggacaagagtatttcaaagttggtgggatagaaatttaggaagaggatcaagcgcaccatcacaataa

SEQ ID NO: 6929 - protein, 211 aa, synthetic construct
  REGION 1..211: note = Bak__Homo_sapiens__Q16611
MASGQGPGPPRQECGEPALPSASEEQVAQDTEEVFRSYVFYRHQQEQEAEGVAAPADPEMVTLPLQPSSTMGQVGRQLAIIGDDINRRYDSEFQTMLQHLQPTAENAYEYFTKIATSLFESGINWGRVVALLGFGYRLALHVYQHGLTGFLGQVTRFVVDFMLHHCIARWIAQRGGWVAALNLGNGPILNVLVVLGVVLLGQFVVRRFFKS

SEQ ID NO: 6930 - RNA, 636 nt, synthetic construct
  misc_feature 1..636: note = Bak__Homo_sapiens__AAA74466
  source 1..636: mol_type = other RNA
atggcttcggggcaaggcccaggtcctcccaggcaggagtgcggagagcctgccctgccctctgcttctgaggagcaggtagcccaggacacagaggaggttttccgcagctacgttttttaccgccatcagcaggaacaggaggctgaaggggtggctgcccctgccgacccagagatggtcaccttacctctgcaacctagcagcaccatggggcaggtgggacggcagctcgccatcatcggggacgacatcaaccgacgctatgactcagagttccagaccatgttgcagcacctgcagcccacggcagagaatgcctatgagtacttcaccaagattgccaccagcctgtttgagagtggcatcaattggggccgtgtggtggctcttctgggcttcggctaccgtctggccctacacgtctaccagcatggcctgactggcttcctaggccaggtgacccgcttcgtggtcgacttcatgctgcatcactgcattgcccggtggattgcacagaggggtggctgggtggcagccctgaacttgggcaatggtcccatcctgaacgtgctggtggttctgggtgtggttctgttgggccagtttgtggtacgaagattcttcaaatcatga

SEQ ID NO: 6931 - RNA, 636 nt, synthetic construct
  misc_feature 1..636: note = derived and/or modified sequence opt1 fromBak__Homo_sapiens__AAA74466
  source 1..636: mol_type = other RNA
atggccagcggccaggggcccggcccgccccgccaggagtgcggggagcccgccctgccctccgcgagcgaggagcaggtcgcccaggacaccgaggaggtgttccggtcctacgtgttctaccgccaccagcaggagcaggaggccgagggcgtggccgccccggcggaccccgagatggtcaccctccccctgcagcccagctccacgatgggccaggtggggcggcagctggccatcatcggcgacgacatcaaccgccggtacgacagcgagttccagaccatgctccagcacctccagccgaccgccgagaacgcctacgagtacttcaccaagatcgcgacgtccctgttcgagagcgggatcaactggggccgcgtggtcgccctgctggggttcggctaccggctggccctccacgtgtaccagcacgggctgaccggcttcctgggccaggtgacccgcttcgtcgtggacttcatgctccaccactgcatcgcccggtggatcgcccagcgcgggggctgggtggcggccctgaacctggggaacggccccatcctcaacgtcctggtggtgctgggcgtcgtgctcctggggcagttcgtggtccggcgcttcttcaagtcctga

SEQ ID NO: 6932 - RNA, 636 nt, synthetic construct
  misc_feature 1..636: note = derived and/or modified sequence opt2 fromBak__Homo_sapiens__AAA74466
  source 1..636: mol_type = other RNA
atggcctccggccagggccccggccccccccgccaggagtgcggcgagcccgccctcccctccgcctccgaggagcaggtcgcccaggacaccgaggaggtcttccgctcctacgtcttctaccgccaccagcaggagcaggaggccgagggcgtcgccgcccccgccgaccccgagatggtcaccctccccctccagccctcctccaccatgggccaggtcggccgccagctcgccatcatcggcgacgacatcaaccgccgctacgactccgagttccagaccatgctccagcacctccagcccaccgccgagaacgcctacgagtacttcaccaagatcgccacctccctcttcgagtccggcatcaactggggccgcgtcgtcgccctcctcggcttcggctaccgcctcgccctccacgtctaccagcacggcctcaccggcttcctcggccaggtcacccgcttcgtcgtcgacttcatgctccaccactgcatcgcccgctggatcgcccagcgcggcggctgggtcgccgccctcaacctcggcaacggccccatcctcaacgtcctcgtcgtcctcggcgtcgtcctcctcggccagttcgtcgtccgccgcttcttcaagtcctga

SEQ ID NO: 6933 - RNA, 636 nt, synthetic construct
  misc_feature 1..636: note = derived and/or modified sequence opt3 fromBak__Homo_sapiens__AAA74466
  source 1..636: mol_type = other RNA
atggccagcggccaggggcccggacctccaagacaagagtgcggtgaaccggctctgccctccgcatctgaggaacaggtggcccaggacaccgaggaagtcttcaggtcatacgttttctatcggcaccagcaagagcaggaggcggaaggcgtggctgcccctgcagatccagagatggtaacactcccccttcagcctagtagcactatgggacaggtggggcgccaactggccatcattggcgacgatataaaccgacgttacgactccgaatttcagacgatgttgcagcatttacagccaaccgctgagaatgcatatgagtactttacaaagatcgccacttctctgttcgaatcgggtattaactgggggagagtcgtggctctactcggatttggctataggctggcccttcacgtttaccaacatggcctgaccgggttcttgggacaggtgacacggtttgtcgtggatttcatgctccaccattgtatcgcgcgctggattgcacagagaggtggctgggtagccgctctgaatctggggaacggacccatcctcaatgttttagtggtcctgggcgtggtgcttttgggtcaatttgtcgttaggcggttctttaaatcatga

SEQ ID NO: 6934 - RNA, 636 nt, synthetic construct
  misc_feature 1..636: note = derived and/or modified sequence opt4 fromBak__Homo_sapiens__AAA74466
  source 1..636: mol_type = other RNA
atggccagcggccagggccccggcccccccagacaggagtgcggcgagcccgccctgcccagcgccagcgaggagcaggtggcccaggacaccgaggaggtgttcagaagctacgtgttctacagacaccagcaggagcaggaggccgagggcgtggccgcccccgccgaccccgagatggtgaccctgcccctgcagcccagcagcaccatgggccaggtgggcagacagctggccatcatcggcgacgacatcaacagaagatacgacagcgagttccagaccatgctgcagcacctgcagcccaccgccgagaacgcctacgagtacttcaccaagatcgccaccagcctgttcgagagcggcatcaactggggcagagtggtggccctgctgggcttcggctacagactggccctgcacgtgtaccagcacggcctgaccggcttcctgggccaggtgaccagattcgtggtggacttcatgctgcaccactgcatcgccagatggatcgcccagagaggcggctgggtggccgccctgaacctgggcaacggccccatcctgaacgtgctggtggtgctgggcgtggtgctgctgggccagttcgtggtgagaagattcttcaagagctga

SEQ ID NO: 6935 - RNA, 636 nt, synthetic construct
  misc_feature 1..636: note = derived and/or modified sequence opt5 fromBak__Homo_sapiens__AAA74466
  source 1..636: mol_type = other RNA
atggccagcggccaggggcccggacctccgagacaagagtgcggcgaacccgctctgccttccgcctctgaggaacaggtggcgcaggacaccgaggaagtcttccggagctacgttttctatcgccaccagcaagagcaggaggctgaaggggtggccgcccccgctgatcctgagatggtgacactccccctgcagccttcctctacgatgggacaggtcggcagacaacttgccatcattggggacgatatcaaccggcgctacgacagcgaatttcagaccatgctgcagcatctccagccgacagctgagaatgcctatgagtactttaccaagattgcgacatccctgttcgaatctggaatcaactggggcagagtggttgcccttctgggctttgggtatcggctcgctctgcacgtgtaccaacatggactgaccggcttcctcgggcaggtcacacgctttgtggttgatttcatgctgcaccattgtattgccagatggatcgctcagcggggaggctgggtggccgcgcttaatctggggaacggacccatcctcaatgtcctggtggtgcttggcgtcgttctgctcggccaatttgtggtgcgcagattctttaaaagctga

SEQ ID NO: 6936 - RNA, 636 nt, synthetic construct
  misc_feature 1..636: note = derived and/or modified sequence opt6 fromBak__Homo_sapiens__AAA74466
  source 1..636: mol_type = other RNA
atggcatcaggacaaggaccaggaccaccaagacaagaatgtggagaaccagcactaccatcagcaagcgaagaacaagtagcacaagatacagaagaagtattcagaagttacgtattttacagacaccaacaagaacaagaagcagaaggagtagcagcaccagcagacccagaaatggtaacactcccactacaaccatcaagtacaatgggtcaagtaggcagacaattagcaataataggagacgacataaatagaagatacgatagcgaattccaaacaatgttacaacacttacaaccaacagcggaaaatgcatatgaatatttcacaaaaatagcaacaagtttattcgaaagtggtataaattggggaagagtagtagcattattaggcttcggatatagattagcattacacgtataccaacacggactaacaggatttttaggacaagtaactagattcgtagtagattttatgttacatcactgcatagctagatggatagcacaaagaggaggatgggtagcagcactaaatttaggaaacggaccaatactaaatgtattagtagtattaggagtagtattattaggacaattcgtagtaagaagattttttaaaagctaa

SEQ ID NO: 6937 - protein, 190 aa, synthetic construct
  REGION 1..190: note = Bak__Homo_sapiens__Q8NFF3
MASGQGPGPPRQECGEPALPSASEEQVAQDTEEVFRSYVFYRHQQPSSTMGQVGRQLAIIGDDINRRYDSEFQTMLQHLQPTAENAYEYFTKIATSLFESGINWGRVVALLGFGYRLALHVYQHGLTGFLGQVTRFVVDFMLHHCIARWIAQRGGWVAALNLGNGPILNVLVVLGVVLLGQFVVRRFFKS

SEQ ID NO: 6938 - RNA, 573 nt, synthetic construct
  misc_feature 1..573: note = Bak__Homo_sapiens__AAM74949
  source 1..573: mol_type = other RNA
atggcttcggggcaaggcccaggtcctcccaggcaggagtgtggagagcctgccctgccctctgcttctgaggagcaggtagcccaggacacagaggaggttttccgcagctacgttttttaccgccatcagcaacctagcagcaccatggggcaggtgggacggcagctcgccatcatcggggacgacatcaaccgacgctatgactcagagttccagaccatgttgcagcacctgcagcccacggcagagaatgcctatgagtacttcaccaagattgccaccagcctgtttgagagtggcatcaattggggccgtgtggtggctcttctgggcttcggctaccgtctggccctacacgtctaccagcatggcctgactggcttcctaggccaggtgacccgcttcgtggtcgacttcatgctgcatcactgcattgcccggtggattgcacagaggggtggctgggtggcagccctgaacttgggcaatggtcccatcctgaacgtgctggtggttctgggtgtggttctgttgggccagtttgtggtacgaagattcttcaaatcatga

SEQ ID NO: 6939 - RNA, 573 nt, synthetic construct
  misc_feature 1..573: note = derived and/or modified sequence opt1 fromBak__Homo_sapiens__AAM74949
  source 1..573: mol_type = other RNA
atggccagcggccaggggcccggcccgccccgccaggagtgcggggagcccgccctgccctccgcgagcgaggagcaggtcgcccaggacaccgaggaggtgttccggtcctacgtgttctaccgccaccagcagccgagctccaccatgggccaggtggggcggcagctcgccatcatcggcgacgacatcaaccgccggtacgacagcgagttccagacgatgctgcagcacctccagcccaccgccgagaacgcctacgagtacttcaccaagatcgcgacctccctgttcgagagcggcatcaactgggggcgcgtcgtggccctgctgggcttcgggtaccggctcgccctgcacgtgtaccagcacggcctgacggggttcctcggccaggtcacccgcttcgtggtggacttcatgctgcaccactgcatcgcccggtggatcgcgcagcgcggcgggtgggtcgccgccctgaacctcggcaacgggcccatcctgaacgtgctggtggtcctcggcgtggtgctgctgggccagttcgtcgtgcggcgcttcttcaagtcctga

SEQ ID NO: 6940 - RNA, 573 nt, synthetic construct
  misc_feature 1..573: note = derived and/or modified sequence opt2 fromBak__Homo_sapiens__AAM74949
  source 1..573: mol_type = other RNA
atggcctccggccagggccccggccccccccgccaggagtgcggcgagcccgccctcccctccgcctccgaggagcaggtcgcccaggacaccgaggaggtcttccgctcctacgtcttctaccgccaccagcagccctcctccaccatgggccaggtcggccgccagctcgccatcatcggcgacgacatcaaccgccgctacgactccgagttccagaccatgctccagcacctccagcccaccgccgagaacgcctacgagtacttcaccaagatcgccacctccctcttcgagtccggcatcaactggggccgcgtcgtcgccctcctcggcttcggctaccgcctcgccctccacgtctaccagcacggcctcaccggcttcctcggccaggtcacccgcttcgtcgtcgacttcatgctccaccactgcatcgcccgctggatcgcccagcgcggcggctgggtcgccgccctcaacctcggcaacggccccatcctcaacgtcctcgtcgtcctcggcgtcgtcctcctcggccagttcgtcgtccgccgcttcttcaagtcctga

SEQ ID NO: 6941 - RNA, 573 nt, synthetic construct
  misc_feature 1..573: note = derived and/or modified sequence opt3 fromBak__Homo_sapiens__AAM74949
  source 1..573: mol_type = other RNA
atggccagcggccaggggcccggacctccaagacaagagtgcggtgaaccggctctgccctccgcatctgaggaacaggtggcccaggacaccgaggaagtcttcaggtcatacgtgttttatcggcaccagcaacctagtagcacaatgggccaggtggggcgccagctcgcgatcattggagatgacataaaccgacgttacgattccgagttccagactatgcttcaacatctgcagccaacggctgagaatgcctatgaatactttaccaagatcgcaacatctttgttcgagtcgggcattaactggggtagagtagtggccttactggggtttggatataggctagctctccacgtctaccagcatggcctgactggcttccttgggcaggttacccggtttgttgtggacttcatgctgcaccattgtatcgcacgctggattgcccaaagaggaggttgggtcgctgccttgaatctcggcaacgggcccatcctgaatgtgctggtagttctcggagtggtcttactgggccagtttgtggtgaggcggttctttaaatcatga

SEQ ID NO: 6942 - RNA, 573 nt, synthetic construct
  misc_feature 1..573: note = derived and/or modified sequence opt4 fromBak__Homo_sapiens__AAM74949
  source 1..573: mol_type = other RNA
atggccagcggccagggccccggcccccccagacaggagtgcggcgagcccgccctgcccagcgccagcgaggagcaggtggcccaggacaccgaggaggtgttcagaagctacgtgttctacagacaccagcagcccagcagcaccatgggccaggtgggcagacagctggccatcatcggcgacgacatcaacagaagatacgacagcgagttccagaccatgctgcagcacctgcagcccaccgccgagaacgcctacgagtacttcaccaagatcgccaccagcctgttcgagagcggcatcaactggggcagagtggtggccctgctgggcttcggctacagactggccctgcacgtgtaccagcacggcctgaccggcttcctgggccaggtgaccagattcgtggtggacttcatgctgcaccactgcatcgccagatggatcgcccagagaggcggctgggtggccgccctgaacctgggcaacggccccatcctgaacgtgctggtggtgctgggcgtggtgctgctgggccagttcgtggtgagaagattcttcaagagctga

SEQ ID NO: 6943 - RNA, 573 nt, synthetic construct
  misc_feature 1..573: note = derived and/or modified sequence opt5 fromBak__Homo_sapiens__AAM74949
  source 1..573: mol_type = other RNA
atggccagcggccaggggcccggacctccgagacaagagtgcggcgaacccgctctgccttccgcctctgaggaacaggtggcgcaggacaccgaggaagtcttccggagctacgtgttttatcgccaccagcaaccctcctctacaatggggcaggttggaagacagctcgctatcattggcgatgacatcaaccggcgctacgatagcgagttccagacgatgctgcaacatcttcagcctaccgccgagaatgcctatgaatactttacaaagattgctacctccctgttcgagtctgggatcaactggggaagagtggtcgccctcctgggctttggctatcggcttgctctgcacgtgtaccagcatgggctcacaggattcctgggccaggttacccgctttgtggtcgacttcatgctgcaccattgtattgccagatggatcgcgcaacgcgggggatgggtggccgctctcaatctgggcaacgggcccatccttaatgttctggtggtcctcggagtggtgctgcttggccagtttgtcgttcggagattctttaaaagctga

SEQ ID NO: 6944 - RNA, 573 nt, synthetic construct
  misc_feature 1..573: note = derived and/or modified sequence opt6 fromBak__Homo_sapiens__AAM74949
  source 1..573: mol_type = other RNA
atggcatcaggtcaaggaccaggaccaccaagacaagaatgtggagaaccagcattaccaagtgcttcagaagaacaagtagcacaagatacagaagaagtatttagatcatatgtattttatagacaccaacaaccatcatcaacaatgggacaagtaggaagacaattagcaataataggagacgatataaatagaagatatgattcagaatttcaaacaatgttacaacatttacaaccaacagcagaaaatgcatatgaatatttcacaaaaatagcaacatcattatttgaatcaggaataaattggggaagagtagtagctttattaggattcggatatcgattagccctacatgtatatcaacatggattaacaggatttttaggacaagttacaagatttgtagttgattttatgttacatcattgtatagctagatggatagcacaaagaggaggatgggtagcagcactaaatctaggaaatggaccaatactaaatgtattagtagtattaggagtagtactattaggacaatttgtagtaagaagattttttaaatcataa

SEQ ID NO: 6945 - protein, 204 aa, synthetic construct
  REGION 1..204: note = Bax__Homo_sapiens__A0A0C4MVT1
MDGSGEQPRGGVSSRIEQGEWGGEAPELALDPVPQDASTKKLSECLKRIGDELDSNMELQRMIAAVDTDSPREVFFRVAADMFSDGNFNWGRVVALFYFASKLVLKALCTKVPELIRTIMGWTLDFLRERLLGWIQDQGGWGLPLAESLKRLMSLSPGRPPLLLWDAHVADRDHLCGGSAHRLTHHLEEDGLRPPAALDCVFPP

SEQ ID NO: 6946 - RNA, 615 nt, synthetic construct
  misc_feature 1..615: note = Bax__Homo_sapiens__AIO10780
  source 1..615: mol_type = other RNA
atggacgggtccggggagcagcccagaggcggggtttcatccaggatcgagcagggcgaatgggggggggaggcacccgagctggccctggacccggtgcctcaggatgcgtccaccaagaagctgagcgagtgtctcaagcgcatcggggacgaactggacagtaacatggagctgcagaggatgattgccgccgtggacacagactccccccgagaggtctttttccgagtggcagctgacatgttttctgacggcaacttcaactggggccgggttgtcgcccttttctactttgccagcaaactggtgctcaaggccctgtgcaccaaggtgccggaactgatcagaaccatcatgggctggacattggacttcctccgggagcggctgttgggctggatccaagaccagggtggttgggggctgcccctggccgagtcactgaagcgactgatgtccctgtctccaggacggcctcctctcctactttgggacgcccacgtggcagaccgtgaccatctttgtggcgggagtgctcaccgcctcactcaccatctggaagaagatgggctgaggcccccagctgccttggactgtgtttttcctccataa

SEQ ID NO: 6947 - RNA, 615 nt, synthetic construct
  misc_feature 1..615: note = derived and/or modified sequence opt1 fromBax__Homo_sapiens__AIO10780
  source 1..615: mol_type = other RNA
atggacggcagcggggagcagccccgcggcggggtgtccagccggatcgagcagggcgagtggggcggggaggcccccgagctggccctcgaccccgtcccccaggacgcgtccaccaagaagctgagcgagtgcctgaagcgcatcggcgacgagctcgactccaacatggagctgcagcggatgatcgccgccgtggacaccgacagcccccgcgaggtgttcttccgggtcgccgccgacatgttctccgacgggaacttcaactggggccgcgtggtggcgctgttctacttcgccagcaagctcgtcctgaaggccctgtgcacgaaggtgccggagctcatccggaccatcatggggtggaccctggacttcctgcgcgagcggctcctgggctggatccaggaccagggcgggtggggcctgcccctcgccgagtccctgaagcgcctgatgagcctctcccccgggcggcccccgctgctgctctgggacgcgcacgtggccgaccgcgaccacctgtgcggcgggagcgcccaccggctgacccaccacctcgaggaggacggcctgcgcccgcccgccgccctggactgcgtcttcccgccctga

SEQ ID NO: 6948 - RNA, 615 nt, synthetic construct
  misc_feature 1..615: note = derived and/or modified sequence opt2 fromBax__Homo_sapiens__AIO10780
  source 1..615: mol_type = other RNA
atggacggctccggcgagcagccccgcggcggcgtctcctcccgcatcgagcagggcgagtggggcggcgaggcccccgagctcgccctcgaccccgtcccccaggacgcctccaccaagaagctctccgagtgcctcaagcgcatcggcgacgagctcgactccaacatggagctccagcgcatgatcgccgccgtcgacaccgactccccccgcgaggtcttcttccgcgtcgccgccgacatgttctccgacggcaacttcaactggggccgcgtcgtcgccctcttctacttcgcctccaagctcgtcctcaaggccctctgcaccaaggtccccgagctcatccgcaccatcatgggctggaccctcgacttcctccgcgagcgcctcctcggctggatccaggaccagggcggctggggcctccccctcgccgagtccctcaagcgcctcatgtccctctcccccggccgcccccccctcctcctctgggacgcccacgtcgccgaccgcgaccacctctgcggcggctccgcccaccgcctcacccaccacctcgaggaggacggcctccgcccccccgccgccctcgactgcgtcttccccccctga

SEQ ID NO: 6949 - RNA, 615 nt, synthetic construct
  misc_feature 1..615: note = derived and/or modified sequence opt3 fromBax__Homo_sapiens__AIO10780
  source 1..615: mol_type = other RNA
atggacggcagcggggagcagcccagaggaggtgtgtcctctaggatcgaacaaggcgagtggggaggggaagcccctgagctggctctcgatccagtcccgcaggacgcatcaaccaagaaacttagtgaatgcctgaagcggattggcgatgagttggacagcaacatggagttacagcgcatgatagccgcggttgatacagactctccccgagaagtgttctttcgtgtagctgccgatatgttctccgacggtaattttaactgggggagagtggtcgcactgttctactttgcctcgaagctagtgctcaaagctctgtgtactaaagttcctgagcttatcaggacgattatgggatggaccctggatttcttgcgggaacgcctcctgggctggatccaggaccaaggcgggtggggactgccactcgcagagtcattaaagagactgatgagccttagtcccggtaggcctccattgctgctatgggatgcccacgtggctgaccgggatcatctctgcggcgggtccgcccaccgcctgacacatcaccttgaggaagacggactgcgaccccctgcggcattggactgtgtctttccaccgtga

SEQ ID NO: 6950 - RNA, 615 nt, synthetic construct
  misc_feature 1..615: note = derived and/or modified sequence opt4 fromBax__Homo_sapiens__AIO10780
  source 1..615: mol_type = other RNA
atggacggcagcggcgagcagcccagaggcggcgtgagcagcagaatcgagcagggcgagtggggcggcgaggcccccgagctggccctggaccccgtgccccaggacgccagcaccaagaagctgagcgagtgcctgaagagaatcggcgacgagctggacagcaacatggagctgcagagaatgatcgccgccgtggacaccgacagccccagagaggtgttcttcagagtggccgccgacatgttcagcgacggcaacttcaactggggcagagtggtggccctgttctacttcgccagcaagctggtgctgaaggccctgtgcaccaaggtgcccgagctgatcagaaccatcatgggctggaccctggacttcctgagagagagactgctgggctggatccaggaccagggcggctggggcctgcccctggccgagagcctgaagagactgatgagcctgagccccggcagaccccccctgctgctgtgggacgcccacgtggccgacagagaccacctgtgcggcggcagcgcccacagactgacccaccacctggaggaggacggcctgagaccccccgccgccctggactgcgtgttccccccctga

SEQ ID NO: 6951 - RNA, 615 nt, synthetic construct
  misc_feature 1..615: note = derived and/or modified sequence opt5 fromBax__Homo_sapiens__AIO10780
  source 1..615: mol_type = other RNA
atggacggcagcggggagcagccccgcggaggcgtgtcctctcggatcgaacaaggggagtggggaggcgaagcccctgagctggctctcgatccggtcccccaggacgccagcaccaagaaactgtccgaatgccttaagcgcattggggatgagctggactctaacatggagctccagagaatgatcgcggctgttgatacagacagccctcgggaagtgttctttcgcgtggccgccgatatgttctccgacggaaattttaactggggcagagtcgtggctctgttctactttgcctctaaacttgttctgaaggctctctgtacgaaagtgcccgagctgattcggaccatcatgggctggacactggatttcctccgcgaaagactgcttgggtggattcaggaccaaggaggctgggggctgcctctcgccgagagcctgaagcggcttatgtccctgagccccggacgccctccgctcctgctgtgggatgcgcacgtcgccgacagagatcatctctgcggcgggtctgctcaccggctgacccatcaccttgaggaagacggactgagaccccctgccgctctcgactgtgtgtttcccccttga

SEQ ID NO: 6952 - RNA, 615 nt, synthetic construct
  misc_feature 1..615: note = derived and/or modified sequence opt6 fromBax__Homo_sapiens__AIO10780
  source 1..615: mol_type = other RNA
atggatggaagcggagaacaaccaagaggaggagtaagtagtagaatagaacaaggagaatggggaggagaagcaccagaattagcactagatccagtaccacaagatgcatcaacgaaaaaattatcagaatgtttaaaaagaataggagatgaattagatagtaatatggaattacaaagaatgatagcagcagtagatacagatagtccaagagaagtattttttagagtagcagcagatatgtttagtgatggaaattttaattggggaagagtagtagcattattttattttgcaagtaaattagtattaaaagcattatgtacaaaagtgccagaattaataagaacaataatgggatggacattagattttctgagagaaagattattaggatggattcaagatcaaggaggatggggattaccattagcagaaagcttaaaaagattaatgagtttaagtccaggaagaccaccattactattatgggatgcacatgtagcagatagagatcatctatgtggaggatcagcacatagattaacacatcatttagaagaagatggattaagaccaccagcagcattagattgtgtatttccaccataa

SEQ ID NO: 6953 - protein, 175 aa, synthetic construct
  REGION 1..175: note = Bax__Homo_sapiens__A0A0C4MW46
MDGSGEQPRGGVSSRIEQGEWGGEAPELALDPVPQDASTKKLSECLKRIGDELDSNMELQRMIAAVDTDSPREVFFRVAADMFSDGNFNWGRVVALFYFASKLVLKALCTKVPELIRTIMGWTLDFLRERLLGWIQDQGGWDGLLSYFGTPTWQTVTIFVAGVLTASLTIWKKMG

SEQ ID NO: 6954 - RNA, 528 nt, synthetic construct
  misc_feature 1..528: note = Bax__Homo_sapiens__AIO10778
  source 1..528: mol_type = other RNA
atggacgggtccggggagcagcccagaggcggggtttcatccaggatcgagcagggcgaatgggggggggaggcacccgagctggccctggacccggtgcctcaggatgcgtccaccaagaagctgagcgagtgtctcaagcgcatcggggacgaactggacagtaacatggagctgcagaggatgattgccgccgtggacacagactccccccgagaggtctttttccgagtggcagctgacatgttttctgacggcaacttcaactggggccgggttgtcgcccttttctactttgccagcaaactggtgctcaaggccctgtgcaccaaggtgccggaactgatcagaaccatcatgggctggacattggacttcctccgggagcggctgttgggctggatccaagaccagggtggttgggacggcctcctctcctactttgggacgcccacgtggcagaccgtgaccatctttgtggcgggagtgctcaccgcctcactcaccatctggaagaagatgggctga

SEQ ID NO: 6955 - RNA, 528 nt, synthetic construct
  misc_feature 1..528: note = derived and/or modified sequence opt1 fromBax__Homo_sapiens__AIO10778
  source 1..528: mol_type = other RNA
atggacggcagcggggagcagccccgcggcggggtgtccagccggatcgagcagggcgagtggggcggggaggccccggagctggccctcgaccccgtcccccaggacgcgtccaccaagaagctgagcgagtgcctgaagcgcatcggcgacgagctcgactccaacatggagctgcagcggatgatcgccgccgtggacaccgacagcccccgcgaggtgttcttccgggtcgccgccgacatgttctccgacgggaacttcaactggggccgcgtggtggcgctgttctacttcgccagcaagctcgtcctgaaggccctgtgcacgaaggtgccggagctcatccggaccatcatggggtggaccctggacttcctgcgcgagcggctcctgggctggatccaggaccagggcgggtgggacggcctgctctcctacttcgggacccccacgtggcagaccgtgaccatcttcgtcgccggcgtgctgaccgcgagcctgacgatctggaagaagatggggtga

SEQ ID NO: 6956 - RNA, 528 nt, synthetic construct
  misc_feature 1..528: note = derived and/or modified sequence opt2 fromBax__Homo_sapiens__AIO10778
  source 1..528: mol_type = other RNA
atggacggctccggcgagcagccccgcggcggcgtctcctcccgcatcgagcagggcgagtggggcggcgaggcccccgagctcgccctcgaccccgtcccccaggacgcctccaccaagaagctctccgagtgcctcaagcgcatcggcgacgagctcgactccaacatggagctccagcgcatgatcgccgccgtcgacaccgactccccccgcgaggtcttcttccgcgtcgccgccgacatgttctccgacggcaacttcaactggggccgcgtcgtcgccctcttctacttcgcctccaagctcgtcctcaaggccctctgcaccaaggtccccgagctcatccgcaccatcatgggctggaccctcgacttcctccgcgagcgcctcctcggctggatccaggaccagggcggctgggacggcctcctctcctacttcggcacccccacctggcagaccgtcaccatcttcgtcgccggcgtcctcaccgcctccctcaccatctggaagaagatgggctga

SEQ ID NO: 6957 - RNA, 528 nt, synthetic construct
  misc_feature 1..528: note = derived and/or modified sequence opt3 fromBax__Homo_sapiens__AIO10778
  source 1..528: mol_type = other RNA
atggacggcagcggggagcagcccagaggaggtgtgtcctctaggatcgaacaaggcgagtggggaggggaagcccctgagctggctctcgatccagtcccgcaggacgcatcaaccaagaaacttagtgaatgcctgaagcggattggcgatgagttggacagcaacatggagttacagcgcatgatagccgcggttgatacagactctccccgagaagtgttctttcgtgtagctgccgatatgttctccgacggtaattttaactgggggagagtggtcgcactgttctactttgcctcgaagctagtgctcaaagctctgtgtactaaagttcctgagcttatcaggacgattatgggatggaccctggatttcttgcgggaacgcctcctgggctggatccaggaccaaggcgggtgggatggactgctctcatattttggtacaccaacttggcagaccgtgacaattttcgtcgcaggcgtgttaaccgccagcctgactatctggaagaagatggggtga

SEQ ID NO: 6958 - RNA, 528 nt, synthetic construct
  misc_feature 1..528: note = derived and/or modified sequence opt4 fromBax__Homo_sapiens__AIO10778
  source 1..528: mol_type = other RNA
atggacggcagcggcgagcagcccagaggcggcgtgagcagcagaatcgagcagggcgagtggggcggcgaggcccccgagctggccctggaccccgtgccccaggacgccagcaccaagaagctgagcgagtgcctgaagagaatcggcgacgagctggacagcaacatggagctgcagagaatgatcgccgccgtggacaccgacagccccagagaggtgttcttcagagtggccgccgacatgttcagcgacggcaacttcaactggggcagagtggtggccctgttctacttcgccagcaagctggtgctgaaggccctgtgcaccaaggtgcccgagctgatcagaaccatcatgggctggaccctggacttcctgagagagagactgctgggctggatccaggaccagggcggctgggacggcctgctgagctacttcggcacccccacctggcagaccgtgaccatcttcgtggccggcgtgctgaccgccagcctgaccatctggaagaagatgggctga

SEQ ID NO: 6959 - RNA, 528 nt, synthetic construct
  misc_feature 1..528: note = derived and/or modified sequence opt5 fromBax__Homo_sapiens__AIO10778
  source 1..528: mol_type = other RNA
atggacggcagcggggagcagcccagaggaggcgtgtcctctcggatcgaacaaggggagtggggaggcgaagcccctgagctggctctcgatccggtcccccaggacgccagcaccaagaaactgtccgaatgccttaagcgcattggggatgagctggactctaacatggagctccagagaatgatcgcggctgttgatacagacagccctcgggaagtgttctttcgcgtggccgccgatatgttctccgacggaaattttaactggggcagagtcgtggctctgttctactttgcctctaaacttgttctgaaggctctctgtacgaaagtgcccgagctgattcggaccatcatgggctggacactggatttcctccgcgaaagactgcttgggtggattcaggaccaaggaggctgggatgggctgctcagctattttggaacccctacatggcagaccgtcacaatcttcgtggccggcgttctgaccgcgtcccttacgatctggaagaagatggggtga

SEQ ID NO: 6960 - RNA, 528 nt, synthetic construct
  misc_feature 1..528: note = derived and/or modified sequence opt6 fromBax__Homo_sapiens__AIO10778
  source 1..528: mol_type = other RNA
atggacggaagtggagaacaaccaagaggaggagtatcaagtagaatagaacaaggagaatggggaggagaagcaccagaattagcattagatccagtaccacaagatgcaagtacaaaaaaattaagtgaatgtttaaaaagaataggagatgaactagatagtaatatggaattacaaagaatgatagcagcagtagatacagatagtccaagagaagtattttttagagtagcagcagatatgtttagtgatggaaattttaattggggaagagtagtagcattattttattttgcaagtaaactagtattaaaagcattatgtacaaaagtaccagaactaataagaacaataatgggatggacattagattttttaagagaaagattgttaggatggatacaagatcaaggaggatgggatggattattaagttattttggaacaccaacatggcaaacagtaacaatatttgtagcaggagtattgacagcaagtttaacaatatggaaaaaaatgggataa

SEQ ID NO: 6961 - protein, 204 aa, synthetic construct
  REGION 1..204: note = Bax__Homo_sapiens__A0A0C4MWS3
MDGSGEQPRGGGFHPGSSRANGGEAPELALDPVPQDASTKKLSECLKRIGDELDSNMELQRMIAAVDTDSPREVFFRVAADMFSDGNFNWGRVVALFYFASKLVLKALCTKVPELIRTIMGWTLDFLRERLLGWIQDQGGWGLPLAESLKRLMSLSPGRPPLLLWDAHVADRDHLCGGSAHRLTHHLEEDGLRPPAALDCVFPP

SEQ ID NO: 6962 - RNA, 615 nt, synthetic construct
  misc_feature 1..615: note = Bax__Homo_sapiens__AIO10779
  source 1..615: mol_type = other RNA
atggacgggtccggggagcagcccagaggcggggggtttcatccaggatcgagcagggcgaatgggggggaggcacccgagctggccctggacccggtgcctcaggatgcgtccaccaagaagctgagcgagtgtctcaagcgcatcggggacgaactggacagtaacatggagctgcagaggatgattgccgccgtggacacagactccccccgagaggtctttttccgagtggcagctgacatgttttctgacggcaacttcaactggggccgggttgtcgcccttttctactttgccagcaaactggtgctcaaggccctgtgcaccaaggtgccggaactgatcagaaccatcatgggctggacattggacttcctccgggagcggctgttgggctggatccaagaccagggtggttgggggctgcccctggccgagtcactgaagcgactgatgtccctgtctccaggacggcctcctctcctactttgggacgcccacgtggcagaccgtgaccatctttgtggcgggagtgctcaccgcctcactcaccatctggaagaagatgggctgaggcccccagctgccttggactgtgtttttcctccataa

SEQ ID NO: 6963 - RNA, 615 nt, synthetic construct
  misc_feature 1..615: note = derived and/or modified sequence opt1 fromBax__Homo_sapiens__AIO10779
  source 1..615: mol_type = other RNA
atggacggcagcggggagcagccccgcggcgggggcttccaccccgggtccagccgggccaacggcggcgaggcccccgagctggcgctcgaccccgtgccccaggacgcctccaccaagaagctgagcgagtgcctgaagcgcatcggggacgagctcgactccaacatggagctgcagcggatgatcgccgccgtcgacaccgacagcccgcgcgaggtgttcttccgggtggccgcggacatgttctccgacggcaacttcaactgggggcgcgtcgtggccctgttctacttcgccagcaagctcgtgctgaaggccctgtgcacgaaggtccccgagctcatccggaccatcatgggctggaccctggacttcctgcgcgagcggctcctggggtggatccaggaccagggcggctgggggctgcccctcgcggagtccctgaagcgcctgatgagcctctcccccggccggccgcccctgctgctctgggacgcccacgtggccgaccgcgaccacctgtgcgggggcagcgcccaccggctgacccaccacctcgaggaggacggcctgcgcccgcccgccgcgctggactgcgtgttcccgccctga

SEQ ID NO: 6964 - RNA, 615 nt, synthetic construct
  misc_feature 1..615: note = derived and/or modified sequence opt2 fromBax__Homo_sapiens__AIO10779
  source 1..615: mol_type = other RNA
atggacggctccggcgagcagccccgcggcggcggcttccaccccggctcctcccgcgccaacggcggcgaggcccccgagctcgccctcgaccccgtcccccaggacgcctccaccaagaagctctccgagtgcctcaagcgcatcggcgacgagctcgactccaacatggagctccagcgcatgatcgccgccgtcgacaccgactccccccgcgaggtcttcttccgcgtcgccgccgacatgttctccgacggcaacttcaactggggccgcgtcgtcgccctcttctacttcgcctccaagctcgtcctcaaggccctctgcaccaaggtccccgagctcatccgcaccatcatgggctggaccctcgacttcctccgcgagcgcctcctcggctggatccaggaccagggcggctggggcctccccctcgccgagtccctcaagcgcctcatgtccctctcccccggccgcccccccctcctcctctgggacgcccacgtcgccgaccgcgaccacctctgcggcggctccgcccaccgcctcacccaccacctcgaggaggacggcctccgcccccccgccgccctcgactgcgtcttccccccctga

SEQ ID NO: 6965 - RNA, 615 nt, synthetic construct
  misc_feature 1..615: note = derived and/or modified sequence opt3 fromBax__Homo_sapiens__AIO10779
  source 1..615: mol_type = other RNA
atggacggcagcggggagcagcccagaggaggtggcttccaccctgggtcctctagggccaacggaggcgaagctccagagctggcactcgatccggtgccccaggacgcctcaaccaagaaacttagtgaatgcctgaagcggatcggtgatgagttggacagcaatatggaattacagcgcatgattgcggctgtcgatacagactcccctcgagaggtgtttttccgtgttgccgcagatatgttttctgacgggaacttcaattggggaagagtagtggccctgttttacttcgcttcgaaattggtcctcaaggcactgtgtactaaagtgccagagcttataaggacgatcatgggctggaccctggattttctacgggaacgcctcctgggctggattcaggaccaagggggatggggtctgcccctcgccgagtcattaaagagactgatgagccttagtcctggcaggccacccttgctgctatgggatgctcatgttgccgaccgggatcacctctgcgggggatccgcgcatcgcctgacacaccatcttgaagaggacggcctgcgacctccagcagccttggactgtgtgttcccgccctga

SEQ ID NO: 6966 - RNA, 615 nt, synthetic construct
  misc_feature 1..615: note = derived and/or modified sequence opt4 fromBax__Homo_sapiens__AIO10779
  source 1..615: mol_type = other RNA
atggacggcagcggcgagcagcccagaggcggcggcttccaccccggcagcagcagagccaacggcggcgaggcccccgagctggccctggaccccgtgccccaggacgccagcaccaagaagctgagcgagtgcctgaagagaatcggcgacgagctggacagcaacatggagctgcagagaatgatcgccgccgtggacaccgacagccccagagaggtgttcttcagagtggccgccgacatgttcagcgacggcaacttcaactggggcagagtggtggccctgttctacttcgccagcaagctggtgctgaaggccctgtgcaccaaggtgcccgagctgatcagaaccatcatgggctggaccctggacttcctgagagagagactgctgggctggatccaggaccagggcggctggggcctgcccctggccgagagcctgaagagactgatgagcctgagccccggcagaccccccctgctgctgtgggacgcccacgtggccgacagagaccacctgtgcggcggcagcgcccacagactgacccaccacctggaggaggacggcctgagaccccccgccgccctggactgcgtgttccccccctga

SEQ ID NO: 6967 - RNA, 615 nt, synthetic construct
  misc_feature 1..615: note = derived and/or modified sequence opt5 fromBax__Homo_sapiens__AIO10779
  source 1..615: mol_type = other RNA
atggacggcagcggggagcagcccagaggaggcgggttccaccctggatcctctcgggccaacggcggggaagctccggagctggccctcgatcccgtgcctcaagacgcgagcaccaagaaactgtccgaatgccttaagcgcatcggagatgagctggactctaatatggaactccagagaatgattgctgccgtcgatacagacagcccccgggaggtgtttttccgcgttgccgctgatatgttttccgacggcaacttcaattggggcagagtggtcgccctgttttacttcgcttctaaacttgtgctgaaggccctctgtacgaaagttcctgagctgatccggaccattatggggtggacactggattttctccgcgaaagactgcttggatggatccaggaccagggcgggtggggactgcccctcgcggagagcctgaagcggcttatgtccctgagccctggccgcccgcccctcctgctgtgggatgcccatgtggctgacagagatcacctctgcgggggatctgcccatcggctgacccaccatcttgaagaggacggcctgcgccctcccgctgccctcgactgtgtcttccctccctga

SEQ ID NO: 6968 - RNA, 615 nt, synthetic construct
  misc_feature 1..615: note = derived and/or modified sequence opt6 fromBax__Homo_sapiens__AIO10779
  source 1..615: mol_type = other RNA
atggatggaagtggagaacaaccaagaggaggaggatttcatccaggatcaagcagagcaaatggaggagaagcaccagaactagcgttagatccagtaccacaagatgcaagtacaaaaaaattatcagaatgtttaaaaagaataggagatgaattagatagtaatatggaattacaaagaatgatagcagcagtagatacagatagtccaagagaagtattttttagagtagcagcagatatgtttagtgatggaaattttaattggggaagagtagtagcattattttattttgcatcaaaattagtattaaaagcattatgtacaaaagtaccagaattaataagaacaataatgggatggacactagattttttaagagaaagattactagggtggatacaagatcaaggaggatggggattaccactagcagaaagtttaaaaagattaatgagtttaagtccaggaagaccaccattattactatgggatgcacatgttgcagacagagatcatttatgtggaggatcagcacatagattaacacatcatctagaagaagatggacttagaccaccagcagcattagattgtgtttttccaccataa

SEQ ID NO: 6969 - protein, 140 aa, synthetic construct
  REGION 1..140: note = Bax__Homo_sapiens__I6LPK7
MIAAVDTDSPREVFFRVAADMFSDGNFNWGRVVALFYFASKLVLKALCTKVPELIRTIMGWTLDFLRERLLGWIQDQGGWVRLLKPPHPHHRALTTAPAPPSLPPATPLGPWAFWSRSQWCPLPIFRSSDVVYNAFSLRV

SEQ ID NO: 6970 - RNA, 423 nt, synthetic construct
  misc_feature 1..423: note = Bax__Homo_sapiens__ADZ05507
  source 1..423: mol_type = other RNA
atgattgccgccgtggacacagactccccccgagaggtctttttccgagtggcagctgacatgttttctgacggcaacttcaactggggccgggttgtcgcccttttctactttgccagcaaactggtgctcaaggccctgtgcaccaaggtgccggaactgatcagaaccatcatgggctggacattggacttcctccgggagcggctgttgggctggatccaagaccagggtggttgggtgagactcctcaagcctcctcacccccaccaccgcgccctcaccaccgcccctgccccaccgtccctgccccccgccactcctctgggaccctgggccttctggagcaggtcacagtggtgccctctccccatcttcagatcatcagatgtggtctataatgcgttttccttacgtgtctga

SEQ ID NO: 6971 - RNA, 423 nt, synthetic construct
  misc_feature 1..423: note = derived and/or modified sequence opt1 fromBax__Homo_sapiens__ADZ05507
  source 1..423: mol_type = other RNA
atgatcgccgccgtggacaccgacagcccccgcgaggtcttcttccgggtggcggccgacatgttctccgacggcaacttcaactgggggcgcgtggtcgccctgttctacttcgccagcaagctcgtgctgaaggccctgtgcaccaaggtgccggagctcatccggacgatcatgggctggaccctggacttcctgcgcgagcggctcctggggtggatccaggaccagggcgggtgggtccgcctgctcaagccgccccacccccaccaccgggcgctgaccaccgcccccgccccgccctccctgccgcccgccacgcccctcggcccctgggcgttctggagccgctcccagtggtgccccctgcccatcttccggagctccgacgtggtgtacaacgccttcagcctgcgcgtctga

SEQ ID NO: 6972 - RNA, 423 nt, synthetic construct
  misc_feature 1..423: note = derived and/or modified sequence opt2 fromBax__Homo_sapiens__ADZ05507
  source 1..423: mol_type = other RNA
atgatcgccgccgtcgacaccgactccccccgcgaggtcttcttccgcgtcgccgccgacatgttctccgacggcaacttcaactggggccgcgtcgtcgccctcttctacttcgcctccaagctcgtcctcaaggccctctgcaccaaggtccccgagctcatccgcaccatcatgggctggaccctcgacttcctccgcgagcgcctcctcggctggatccaggaccagggcggctgggtccgcctcctcaagcccccccacccccaccaccgcgccctcaccaccgcccccgcccccccctccctcccccccgccacccccctcggcccctgggccttctggtcccgctcccagtggtgccccctccccatcttccgctcctccgacgtcgtctacaacgccttctccctccgcgtctga

SEQ ID NO: 6973 - RNA, 423 nt, synthetic construct
  misc_feature 1..423: note = derived and/or modified sequence opt3 fromBax__Homo_sapiens__ADZ05507
  source 1..423: mol_type = other RNA
atgatcgccgctgtggacaccgatagccccagagaggtcttctttagggttgcagccgacatgttctccgatggcaactttaattgggggcgggtggtagcgctgttctactttgcttctaagctcgtgcttaaagccctgtgcacaaaggtccctgaattgattcgcactataatgggatggacgttagacttcctgcgagagcgtctactcggttggatccaggatcaaggcgggtgggtgagactgcttaaaccaccgcacccccatcacagggcactgaccacagcccctgctccaccctcattgcctccagcaactcccctcggaccttgggccttttggagtcggagccagtggtgtccactgccgattttccgctcctctgacgttgtgtataacgctttttcgctgagagtctga

SEQ ID NO: 6974 - RNA, 423 nt, synthetic construct
  misc_feature 1..423: note = derived and/or modified sequence opt4 fromBax__Homo_sapiens__ADZ05507
  source 1..423: mol_type = other RNA
atgatcgccgccgtggacaccgacagccccagagaggtgttcttcagagtggccgccgacatgttcagcgacggcaacttcaactggggcagagtggtggccctgttctacttcgccagcaagctggtgctgaaggccctgtgcaccaaggtgcccgagctgatcagaaccatcatgggctggaccctggacttcctgagagagagactgctgggctggatccaggaccagggcggctgggtgagactgctgaagcccccccacccccaccacagagccctgaccaccgcccccgccccccccagcctgccccccgccacccccctgggcccctgggccttctggagcagaagccagtggtgccccctgcccatcttcagaagcagcgacgtggtgtacaacgccttcagcctgagagtgtga

SEQ ID NO: 6975 - RNA, 423 nt, synthetic construct
  misc_feature 1..423: note = derived and/or modified sequence opt5 fromBax__Homo_sapiens__ADZ05507
  source 1..423: mol_type = other RNA
atgatcgccgctgtggacaccgatagccccagagaggtcttctttcgggttgccgcggacatgttctccgatggcaactttaattgggggcgcgtggtggctctgttctactttgcctctaagctcgtcctgaaagccctttgcacaaaggtgcctgaactgattagaacgatcatgggatggaccctcgacttcctgcgggagcgccttctgggctggattcaggatcaagggggatgggttagactcctgaaaccgccccaccctcatcaccgggctctgacaaccgcccccgctcctcccagcctccctccggccacacccctgggcccttgggcgttttggtcccgctctcagtggtgtccccttcctatcttcagaagctccgacgtggtctataacgccttttctctgcgggtgtga

SEQ ID NO: 6976 - RNA, 423 nt, synthetic construct
  misc_feature 1..423: note = derived and/or modified sequence opt6 fromBax__Homo_sapiens__ADZ05507
  source 1..423: mol_type = other RNA
atgatagcagcagtagatacagattcaccaagagaagtatttttcagagtagcagcagatatgttttcagatggaaatttcaattggggaagagtagtagcactattttactttgcatcaaaattagtattaaaagcattatgtacaaaagtaccagaattaataagaacaataatgggatggacactagatttcttaagagaaagattactaggatggatacaagatcaaggaggatgggtaagactattaaaaccaccacatccacatcaccgagcattaacaacagcaccagcaccaccatcactaccaccagcaacaccactaggaccatgggcattttggtcaagaagtcaatggtgcccactaccaatatttagatcatcagatgtagtatacaatgcattttcattaagagtataa

SEQ ID NO: 6977 - protein, 175 aa, synthetic construct
  REGION 1..175: note = Bax__Homo_sapiens__K4JQN1
MDGSGEQPRGGGFHPGSSRANGGEAPELALDPVPQDASTKKLSECLKRIGDELDSNMELQRMIAAVDTDSPREVFFRVAADMFSDGNFNWGRVVALFYFASKLVLKALCTKVPELIRTIMGWTLDFLRERLLGWIQDQGGWDGLLSYFGTPTWQTVTIFVAGVLTASLTIWKKMG

SEQ ID NO: 6978 - RNA, 528 nt, synthetic construct
  misc_feature 1..528: note = Bax__Homo_sapiens__AFU81108
  source 1..528: mol_type = other RNA
atggacgggtccggggagcagcccagaggcggggggtttcatccaggatcgagcagggcgaatgggggggaggcacccgagctggccctggacccggtgcctcaggatgcgtccaccaagaagctgagcgagtgtctcaagcgcatcggggacgaactggacagtaacatggagctgcagaggatgattgccgccgtggacacagactccccccgagaggtctttttccgagtggcagctgacatgttttctgacggcaacttcaactggggccgggttgtcgcccttttctactttgccagcaaactggtgctcaaggccctgtgcaccaaggtgccggaactgatcagaaccatcatgggctggacattggacttcctccgggagcggctgttgggctggatccaagaccagggtggttgggacggcctcctctcctactttgggacgcccacgtggcagaccgtgaccatctttgtggcgggagtgctcaccgcctcactcaccatctggaagaagatgggctga

SEQ ID NO: 6979 - RNA, 528 nt, synthetic construct
  misc_feature 1..528: note = derived and/or modified sequence opt1 fromBax__Homo_sapiens__AFU81108
  source 1..528: mol_type = other RNA
atggacggcagcggggagcagccccgcggcgggggcttccacccggggtccagccgggccaacggcggcgaggcccccgagctggcgctcgaccccgtgccccaggacgcctccaccaagaagctgagcgagtgcctgaagcgcatcggggacgagctcgactccaacatggagctgcagcggatgatcgccgccgtcgacaccgacagcccgcgcgaggtgttcttccgggtggccgcggacatgttctccgacggcaacttcaactgggggcgcgtcgtggccctgttctacttcgccagcaagctcgtgctgaaggccctgtgcacgaaggtccccgagctcatccggaccatcatgggctggaccctggacttcctgcgcgagcggctcctggggtggatccaggaccagggcggctgggacgggctgctctcctacttcggcacccccacgtggcagaccgtgaccatcttcgtggcgggggtcctgaccgccagcctgacgatctggaagaagatgggctga

SEQ ID NO: 6980 - RNA, 528 nt, synthetic construct
  misc_feature 1..528: note = derived and/or modified sequence opt2 fromBax__Homo_sapiens__AFU81108
  source 1..528: mol_type = other RNA
atggacggctccggcgagcagccccgcggcggcggcttccaccccggctcctcccgcgccaacggcggcgaggcccccgagctcgccctcgaccccgtcccccaggacgcctccaccaagaagctctccgagtgcctcaagcgcatcggcgacgagctcgactccaacatggagctccagcgcatgatcgccgccgtcgacaccgactccccccgcgaggtcttcttccgcgtcgccgccgacatgttctccgacggcaacttcaactggggccgcgtcgtcgccctcttctacttcgcctccaagctcgtcctcaaggccctctgcaccaaggtccccgagctcatccgcaccatcatgggctggaccctcgacttcctccgcgagcgcctcctcggctggatccaggaccagggcggctgggacggcctcctctcctacttcggcacccccacctggcagaccgtcaccatcttcgtcgccggcgtcctcaccgcctccctcaccatctggaagaagatgggctga

SEQ ID NO: 6981 - RNA, 528 nt, synthetic construct
  misc_feature 1..528: note = derived and/or modified sequence opt3 fromBax__Homo_sapiens__AFU81108
  source 1..528: mol_type = other RNA
atggacggcagcggggagcagcccagaggaggtggcttccaccctgggtcctctagggccaacggaggcgaagctccagagctggcactcgatccggtgccccaagacgcctcaaccaagaaacttagtgaatgcctgaagcggatcggtgatgagttggacagcaatatggaattacagcgcatgattgcggctgtcgatacagactcccctcgagaggtgtttttccgtgttgccgcagatatgttttctgacgggaacttcaattggggaagagtagtggccctgttttacttcgcttcgaaattggtcctcaaggcactgtgtactaaagtgccagagcttataaggacgatcatgggctggaccctggattttctacgggaacgcctcctgggctggattcaggaccaagggggatgggatggtctgctctcatatttcggcacacccacttggcagaccgttacaatctttgtggccggggtcttaaccgctagcctgactatttggaagaagatgggatga

SEQ ID NO: 6982 - RNA, 528 nt, synthetic construct
  misc_feature 1..528: note = derived and/or modified sequence opt4 fromBax__Homo_sapiens__AFU81108
  source 1..528: mol_type = other RNA
atggacggcagcggcgagcagcccagaggcggcggcttccaccccggcagcagcagagccaacggcggcgaggcccccgagctggccctggaccccgtgccccaggacgccagcaccaagaagctgagcgagtgcctgaagagaatcggcgacgagctggacagcaacatggagctgcagagaatgatcgccgccgtggacaccgacagccccagagaggtgttcttcagagtggccgccgacatgttcagcgacggcaacttcaactggggcagagtggtggccctgttctacttcgccagcaagctggtgctgaaggccctgtgcaccaaggtgcccgagctgatcagaaccatcatgggctggaccctggacttcctgagagagagactgctgggctggatccaggaccagggcggctgggacggcctgctgagctacttcggcacccccacctggcagaccgtgaccatcttcgtggccggcgtgctgaccgccagcctgaccatctggaagaagatgggctga

SEQ ID NO: 6983 - RNA, 528 nt, synthetic construct
  misc_feature 1..528: note = derived and/or modified sequence opt5 fromBax__Homo_sapiens__AFU81108
  source 1..528: mol_type = other RNA
atggacggcagcggggagcagcccagaggaggcgggttccaccctggatcctctcgggccaacggcggggaagctccggagctggccctcgatcccgtgcctcaagacgcgagcaccaagaaactgtccgaatgccttaagcgcatcggagatgagctggactctaatatggaactccagagaatgattgctgccgtcgatacagacagcccccgggaggtgtttttccgcgttgccgctgatatgttttccgacggcaacttcaattggggcagagtggtcgccctgttttacttcgcttctaaacttgtgctgaaggccctctgtacgaaagttcctgagctgatccggaccattatggggtggacactggattttctccgcgaaagactgcttggatggatccaggaccagggcgggtgggatggactgctcagctatttcggcacccccacatggcaaaccgtgacaatttttgtcgcgggggtgctgaccgcctcccttacgatctggaagaagatgggatga

SEQ ID NO: 6984 - RNA, 528 nt, synthetic construct
  misc_feature 1..528: note = derived and/or modified sequence opt6 fromBax__Homo_sapiens__AFU81108
  source 1..528: mol_type = other RNA
atggatggaagtggggaacaaccaagaggaggaggatttcatccaggaagtagtagagcaaatggaggagaagctccagaattagcattagatccagtaccacaagatgcaagtacaaaaaaattaagtgaatgtttaaaaagaataggagatgaattagatagtaatatggaattacaaagaatgatagcagcagtagatacagattcaccaagagaagtattttttagagtagcagcagatatgtttagtgatggaaattttaattggggtagagtagtagcattattttattttgcaagtaaattagtactaaaagcattatgtacaaaagtaccagaattaataagaacaataatgggatggacattagattttttaagggaaagattattaggatggatacaagatcaaggaggatgggatggattattaagctattttggaacaccaacatggcaaacagtaacaatatttgtagcaggagtattaacagcaagtttaacaatatggaaaaaaatgggataa

SEQ ID NO: 6985 - protein, 192 aa, synthetic construct
  REGION 1..192: note = Bax__Homo_sapiens__Q07812
MDGSGEQPRGGGPTSSEQIMKTGALLLQGFIQDRAGRMGGEAPELALDPVPQDASTKKLSECLKRIGDELDSNMELQRMIAAVDTDSPREVFFRVAADMFSDGNFNWGRVVALFYFASKLVLKALCTKVPELIRTIMGWTLDFLRERLLGWIQDQGGWDGLLSYFGTPTWQTVTIFVAGVLTASLTIWKKMG

SEQ ID NO: 6986 - RNA, 579 nt, synthetic construct
  misc_feature 1..579: note = Bax__Homo_sapiens__AAA03619
  source 1..579: mol_type = other RNA
atggacgggtccggggagcagcccagaggcggggggcccaccagctctgagcagatcatgaagacaggggcccttttgcttcagggtttcatccaggatcgagcagggcgaatggggggggaggcacccgagctggccctggacccggtgcctcaggatgcgtccaccaagaagctgagcgagtgtctcaagcgcatcggggacgaactggacagtaacatggagctgcagaggatgattgccgccgtggacacagactccccccgagaggtctttttccgagtggcagctgacatgttttctgacggcaacttcaactggggccgggttgtcgcccttttctactttgccagcaaactggtgctcaaggccctgtgcaccaaggtgccggaactgatcagaaccatcatgggctggacattggacttcctccgggagcggctgttgggctggatccaagaccagggtggttgggacggcctcctctcctactttgggacgcccacgtggcagaccgtgaccatctttgtggcgggagtgctcaccgcctcgctcaccatctggaagaagatgggctga

SEQ ID NO: 6987 - RNA, 579 nt, synthetic construct
  misc_feature 1..579: note = derived and/or modified sequence opt1 fromBax__Homo_sapiens__AAA03619
  source 1..579: mol_type = other RNA
atggacggcagcggggagcagccccgcggcgggggcccgacctccagcgagcagatcatgaagaccggggccctgctcctgcagggcttcatccaggaccgggccggccgcatgggcggggaggcgcccgagctggccctcgaccccgtgccccaggacgcctccacgaagaagctgagcgagtgcctgaagcggatcggggacgagctcgactccaacatggagctgcagcgcatgatcgccgccgtcgacaccgacagcccgcgggaggtgttcttccgcgtggcggccgacatgttctccgacggcaacttcaactgggggcgggtcgtggccctgttctacttcgccagcaagctcgtgctgaaggcgctgtgcaccaaggtccccgagctcatccgcaccatcatgggctggacgctggacttcctgcgggagcgcctcctgggctggatccaggaccagggcgggtgggacgggctgctctcctacttcggcacccccacctggcagaccgtgacgatcttcgtggccggcgtcctgaccgccagcctgaccatctggaagaagatggggtga

SEQ ID NO: 6988 - RNA, 579 nt, synthetic construct
  misc_feature 1..579: note = derived and/or modified sequence opt2 fromBax__Homo_sapiens__AAA03619
  source 1..579: mol_type = other RNA
atggacggctccggcgagcagccccgcggcggcggccccacctcctccgagcagatcatgaagaccggcgccctcctcctccagggcttcatccaggaccgcgccggccgcatgggcggcgaggcccccgagctcgccctcgaccccgtcccccaggacgcctccaccaagaagctctccgagtgcctcaagcgcatcggcgacgagctcgactccaacatggagctccagcgcatgatcgccgccgtcgacaccgactccccccgcgaggtcttcttccgcgtcgccgccgacatgttctccgacggcaacttcaactggggccgcgtcgtcgccctcttctacttcgcctccaagctcgtcctcaaggccctctgcaccaaggtccccgagctcatccgcaccatcatgggctggaccctcgacttcctccgcgagcgcctcctcggctggatccaggaccagggcggctgggacggcctcctctcctacttcggcacccccacctggcagaccgtcaccatcttcgtcgccggcgtcctcaccgcctccctcaccatctggaagaagatgggctga

SEQ ID NO: 6989 - RNA, 579 nt, synthetic construct
  misc_feature 1..579: note = derived and/or modified sequence opt3 fromBax__Homo_sapiens__AAA03619
  source 1..579: mol_type = other RNA
atggacggcagcggggagcagcccagaggaggtggccctacctcctctgaacaaatcatgaagacaggggccctgctccttcagggattcattcaggatagggctggccggatgggtggggaggcaccagaactggccttggacccggtgccccaggatgcgtcaactaaaaagttaagtgagtgcctgaaacgcataggagacgaactagatagcaacatggagctccaacgaatgatcgctgccgtcgacacggattcccctcgtgaggtgtttttcagagttgcagccgacatgttttctgatggcaatttcaactggggcagggtagtggctctgttttacttcgcatcgaaacttgtcctgaaggccttgtgtaccaaggtgccagaactcattcggacaatcatggggtggactctggactttctgcgcgagagactcttaggatggattcaggatcagggtggctgggacgggctgctttcatatttcggaacccccacatggcagaccgttactatctttgtggctggcgtcttgacagccagcctgaccatatggaagaaaatgggttga

SEQ ID NO: 6990 - RNA, 579 nt, synthetic construct
  misc_feature 1..579: note = derived and/or modified sequence opt4 fromBax__Homo_sapiens__AAA03619
  source 1..579: mol_type = other RNA
atggacggcagcggcgagcagcccagaggcggcggccccaccagcagcgagcagatcatgaagaccggcgccctgctgctgcagggcttcatccaggacagagccggcagaatgggcggcgaggcccccgagctggccctggaccccgtgccccaggacgccagcaccaagaagctgagcgagtgcctgaagagaatcggcgacgagctggacagcaacatggagctgcagagaatgatcgccgccgtggacaccgacagccccagagaggtgttcttcagagtggccgccgacatgttcagcgacggcaacttcaactggggcagagtggtggccctgttctacttcgccagcaagctggtgctgaaggccctgtgcaccaaggtgcccgagctgatcagaaccatcatgggctggaccctggacttcctgagagagagactgctgggctggatccaggaccagggcggctgggacggcctgctgagctacttcggcacccccacctggcagaccgtgaccatcttcgtggccggcgtgctgaccgccagcctgaccatctggaagaagatgggctga

SEQ ID NO: 6991 - RNA, 579 nt, synthetic construct
  misc_feature 1..579: note = derived and/or modified sequence opt5 fromBax__Homo_sapiens__AAA03619
  source 1..579: mol_type = other RNA
atggacggcagcggggagcagcccagaggaggcgggcctacctcctctgaacaaatcatgaagacaggagccctgctcctgcagggcttcattcaggatcgggctgggcgcatgggaggcgaggccccggaacttgcgctggaccccgtgcctcaggatgctagcacgaaaaagctctccgagtgcctgaaaagaatcggcgacgaacttgattctaacatggagctgcaacggatgattgccgccgtcgacaccgatagcccccgcgaggtgtttttcagagttgctgccgacatgttttccgatgggaatttcaactggggacgggtggtcgctctcttttacttcgcctctaagctggtgctgaaagcgctctgtacaaaggttcctgaactgatccgcaccattatgggctggacacttgactttctgagagagcggctcctggggtggatccaggatcagggaggctgggacgggcttctgagctatttcggaacccccacatggcagaccgtgacgatctttgtcgccggcgtgctcaccgcttccctgacaatttggaagaaaatgggctga

SEQ ID NO: 6992 - RNA, 579 nt, synthetic construct
  misc_feature 1..579: note = derived and/or modified sequence opt6 fromBax__Homo_sapiens__AAA03619
  source 1..579: mol_type = other RNA
atggatggaagtggagaacaaccaagaggaggaggaccaacaagcagtgaacaaataatgaaaacaggagcattattattacaaggatttatacaagatagagcaggaagaatgggaggagaagcaccagaattagcattagatccagtaccacaagatgcaagcacaaaaaaactaagcgaatgcttaaaaagaataggagatgaattagatagtaatatggaattacaaagaatgatagcagcagtagatacagatagtccaagagaagtatttttcagagtagcagcagatatgtttagtgacggaaattttaattggggaagagtagtagcattattttattttgcaagtaaattagtattaaaagcattatgtacaaaagtaccagaattaataagaacaataatgggatggacattagattttctaagagaaagacttttaggatggatacaagatcaaggaggatgggatggactattaagttatttcggaacaccaacatggcaaacagtaacaatatttgtagcaggagtattaacagcaagtttaacaatatggaaaaaaatgggttga

SEQ ID NO: 6993 - protein, 233 aa, synthetic construct
  REGION 1..233: note = Bcl-10__Homo_sapiens__O95999
MEPTAPSLTEEDLTEVKKDALENLRVYLCEKIIAERHFDHLRAKKILSREDTEEISCRTSSRKRAGKLLDYLQENPKGLDTLVESIRREKTQNFLIQKITDEVLKLRNIKLEHLKGLKCSSCEPFPDGATNNLSRSNSDESNFSEKLRASTVMYHPEGESSTTPFFSTNSSLNLPVLEVGRTENTIFSSTTLPRPGDPGAPPLPPDLQLEEEGTCANSSEMFLPLRSRTVSRQ

SEQ ID NO: 6994 - RNA, 702 nt, synthetic construct
  misc_feature 1..702: note = Bcl-10__Homo_sapiens__AAC99767
  source 1..702: mol_type = other RNA
atggagcccaccgcaccgtccctcaccgaggaggacctcactgaagtgaagaaggacgccttagaaaatttacgtgtatacctgtgtgagaaaatcatagctgagagacattttgatcatctacgtgcaaaaaaaatactcagtagagaagacactgaagaaatttcttgtcgaacatcaagtagaaaaagggctggaaaattgttagactacttacaggaaaacccaaaaggtctggacacccttgttgaatctattcggcgagaaaaaacacagaacttcctgatacagaagattacagatgaagtgctgaaacttagaaatataaaactagaacatctgaaaggactaaaatgtagcagttgtgaaccttttccagatggagccacgaacaacctctccagatcaaattcagatgagagtaatttctctgaaaaactgagggcatccactgtcatgtaccatccagaaggagaatccagcacgacgccctttttttctactaattcttctctgaatttgcctgttctagaagtaggcagaactgaaaataccatcttctcttcaactacacttcccagacctggggacccaggggctcctcctttgccaccagatctacagttagaagaagaaggaacttgtgcaaactctagtgagatgtttcttcccttaagatcacgtactgtttcacgacaatga

SEQ ID NO: 6995 - RNA, 702 nt, synthetic construct
  misc_feature 1..702: note = derived and/or modified sequence opt1 fromBcl-10__Homo_sapiens__AAC99767
  source 1..702: mol_type = other RNA
atggagcccaccgcccccagcctgaccgaggaggacctcacggaggtgaagaaggacgccctggagaacctgcgcgtctacctctgcgagaagatcatcgcggagcggcacttcgaccacctccgcgccaagaagatcctgtcccgggaggacaccgaggagatcagctgccgcacctccagccggaagcgcgccggcaagctgctggactacctgcaggagaaccccaaggggctcgacaccctggtggagtccatccggcgcgagaagacgcagaacttcctgatccagaagatcaccgacgaggtgctcaagctgcggaacatcaagctggagcacctcaagggcctgaagtgcagctcctgcgagcccttccccgacggggccaccaacaacctgagccgctccaacagcgacgagtccaacttcagcgagaagctccgggcctccaccgtcatgtaccacccggagggcgagagctccacgacccccttcttcagcaccaactccagcctgaacctgcccgtgctcgaggtggggcgcaccgagaacacgatcttctccagcaccaccctgccccggccgggcgaccccggcgcgccgcccctgccgcccgacctccagctggaggaggaggggacctgcgccaacagctccgagatgttcctgcccctccgcagccggacggtctcccgccagtga

SEQ ID NO: 6996 - RNA, 702 nt, synthetic construct
  misc_feature 1..702: note = derived and/or modified sequence opt2 fromBcl-10__Homo_sapiens__AAC99767
  source 1..702: mol_type = other RNA
atggagcccaccgccccctccctcaccgaggaggacctcaccgaggtcaagaaggacgccctcgagaacctccgcgtctacctctgcgagaagatcatcgccgagcgccacttcgaccacctccgcgccaagaagatcctctcccgcgaggacaccgaggagatctcctgccgcacctcctcccgcaagcgcgccggcaagctcctcgactacctccaggagaaccccaagggcctcgacaccctcgtcgagtccatccgccgcgagaagacccagaacttcctcatccagaagatcaccgacgaggtcctcaagctccgcaacatcaagctcgagcacctcaagggcctcaagtgctcctcctgcgagcccttccccgacggcgccaccaacaacctctcccgctccaactccgacgagtccaacttctccgagaagctccgcgcctccaccgtcatgtaccaccccgagggcgagtcctccaccacccccttcttctccaccaactcctccctcaacctccccgtcctcgaggtcggccgcaccgagaacaccatcttctcctccaccaccctcccccgccccggcgaccccggcgccccccccctcccccccgacctccagctcgaggaggagggcacctgcgccaactcctccgagatgttcctccccctccgctcccgcaccgtctcccgccagtga

SEQ ID NO: 6997 - RNA, 702 nt, synthetic construct
  misc_feature 1..702: note = derived and/or modified sequence opt3 fromBcl-10__Homo_sapiens__AAC99767
  source 1..702: mol_type = other RNA
atggagcccaccgcccctagcctgacagaagaggacctcactgaagtgaagaaggatgctcttgagaacctgagagtctacttgtgcgaaaagatcattgcagagaggcacttcgaccatttacgggccaaaaagatactgtcccgcgaggatacggaagagatctcttgtcgaacctcaagtcgtaaaagagcgggcaagctactcgactatctgcaggaaaatccaaaggggcttgatacactggttgagagcattaggcgggagaaaactcaaaactttttgatccagaagattaccgacgaagtgctcaaactgcgcaatatcaagctggagcacctcaaaggattaaagtgctcctcttgtgaaccgttccccgatggtgctacaaacaatctgtcgagatcaaacagcgacgagagtaatttttccgaaaaacttagggcctctaccgtaatgtaccatcctgagggcgagagctccactacaccattcttttcaaccaacagtagcttgaatctgcccgtgctagaagtcgggcggacggagaacactatattctcttccaccacactccctcgcccaggagatcccggcgcacctccactgccgcccgaccttcagctggaagaggaaggtacttgcgccaattcaagcgagatgtttttgcctctccgaagtagaaccgtgtctaggcagtga

SEQ ID NO: 6998 - RNA, 702 nt, synthetic construct
  misc_feature 1..702: note = derived and/or modified sequence opt4 fromBcl-10__Homo_sapiens__AAC99767
  source 1..702: mol_type = other RNA
atggagcccaccgcccccagcctgaccgaggaggacctgaccgaggtgaagaaggacgccctggagaacctgagagtgtacctgtgcgagaagatcatcgccgagagacacttcgaccacctgagagccaagaagatcctgagcagagaggacaccgaggagatcagctgcagaaccagcagcagaaagagagccggcaagctgctggactacctgcaggagaaccccaagggcctggacaccctggtggagagcatcagaagagagaagacccagaacttcctgatccagaagatcaccgacgaggtgctgaagctgagaaacatcaagctggagcacctgaagggcctgaagtgcagcagctgcgagcccttccccgacggcgccaccaacaacctgagcagaagcaacagcgacgagagcaacttcagcgagaagctgagagccagcaccgtgatgtaccaccccgagggcgagagcagcaccacccccttcttcagcaccaacagcagcctgaacctgcccgtgctggaggtgggcagaaccgagaacaccatcttcagcagcaccaccctgcccagacccggcgaccccggcgccccccccctgccccccgacctgcagctggaggaggagggcacctgcgccaacagcagcgagatgttcctgcccctgagaagcagaaccgtgagcagacagtga

SEQ ID NO: 6999 - RNA, 702 nt, synthetic construct
  misc_feature 1..702: note = derived and/or modified sequence opt5 fromBcl-10__Homo_sapiens__AAC99767
  source 1..702: mol_type = other RNA
atggagcccaccgcccctagcctgacagaagaggacctcacggaagtgaagaaagatgctctggagaaccttagagtctacctgtgcgaaaagatcattgccgagcggcacttcgaccatctccgcgcgaaaaagatcctgtccagagaggataccgaagagatttcttgtcggacaagctcccgcaaaagagctggcaaacttctggactatctccaggaaaatccgaaggggctggataccctggttgagtctatccggcgcgagaagacacaaaactttctcattcagaagatcaccgacgaagtgctgaaacttagaaatatcaagctggagcacctcaaaggactgaagtgcagctcctgtgaacccttccctgatggcgccacaaacaatctttctcggagcaactccgacgagagcaatttttctgaaaagctgcgcgcctccaccgtgatgtaccatcccgagggggagagctctacgacccctttcttttccacaaacagctctctcaatctgcccgtcctggaagtgggaagaaccgagaacacaattttctccagcaccacgctccctcggccgggcgatcccggggctcctcccctgcctcccgaccttcagctggaagaggaaggaacatgcgccaattcctctgagatgtttctcccgctgcgcagcagaaccgtttcccggcagtga

SEQ ID NO: 7000 - RNA, 702 nt, synthetic construct
  misc_feature 1..702: note = derived and/or modified sequence opt6 fromBcl-10__Homo_sapiens__AAC99767
  source 1..702: mol_type = other RNA
atggaaccaacagcaccatcactaaccgaagaagacctaacagaagtcaaaaaagacgcactagaaaacctaagagtatacctatgcgaaaaaataatagcagaaagacacttcgaccacctaagagcaaaaaaaatcctatccagagaagacacagaagaaatatcatgcagaacatcaagcagaaaaagagcaggaaaactattagactaccttcaagaaaacccaaaaggcttagacactctagtagaatccataagaagagaaaaaacacaaaacttcttaatacaaaaaataacagacgaagtactaaaattaagaaacataaaacttgaacacctaaaaggactaaaatgctcatcatgcgaaccattcccagatggagcaacaaacaacctatcaagatcaaactccgacgaatcaaacttctccgaaaaactacgagcatcaacagtaatgtaccacccagaaggagaaagctccacaacaccatttttcagtacaaactcatcactaaacctaccagtattagaagtaggaagaacagaaaacacaatattctcatcaacaacactaccaagaccaggagacccaggagcaccaccactcccaccagacctacaactagaagaagaaggaacatgcgccaactcaagcgaaatgttcctaccactaagatcaagaacagtatcaagacaataa

SEQ ID NO: 7001 - protein, 195 aa, synthetic construct
  REGION 1..195: note = Bid__Homo_sapiens__A8ASI8
MDCEVNNGSSLRDECITNLLVFGFLQSCSDNSFRRELDALGHELPVLAPQWEGYDELQTDGNRSSHSRLGRIEADSESQEDIIRNIARHLAQVGDSMDRSIPPGLVNGLALQLRNTSRSEEDRNRDLATALEQLLQAYPRDMEKEKTMLVLALLLAKKVASHTPSLLRDVFHTTVNFINQNLRTYVRSLARNGMD

SEQ ID NO: 7002 - RNA, 588 nt, synthetic construct
  misc_feature 1..588: note = Bid__Homo_sapiens__ACD47108
  source 1..588: mol_type = other RNA
atggactgtgaggtcaacaacggttccagcctcagggatgagtgcatcacaaacctactggtgtttggcttcctccaaagctgttctgacaacagcttccgcagagagctggacgcactgggccacgagctgccagtgctggctccccagtgggagggctacgatgagctgcagactgatggcaaccgcagcagccactcccgcttgggaagaatagaggcagattctgaaagtcaagaagacatcatccggaatattgccaggcacctcgcccaggtcggggacagcatggaccgtagcatccctccgggcctggtgaacggcctggccctgcagctcaggaacaccagccggtcggaggaggaccggaacagggacctggccactgccctggagcagctgctgcaggcctaccctagagacatggagaaggagaagaccatgctggtgctggccctgctgctggccaagaaggtggccagtcacacgccgtccttgctccgtgatgtctttcacacaacagtgaattttattaaccagaacctacgcacctacgtgaggagcttagccagaaatgggatggactga

SEQ ID NO: 7003 - RNA, 588 nt, synthetic construct
  misc_feature 1..588: note = derived and/or modified sequence opt1 fromBid__Homo_sapiens__ACD47108
  source 1..588: mol_type = other RNA
atggactgcgaggtgaacaacggcagctccctgcgcgacgagtgcatcaccaacctcctggtcttcgggttcctgcagagctgctccgacaacagcttccggcgcgagctcgacgccctgggccacgagctgcccgtgctcgccccgcagtgggaggggtacgacgagctgcagaccgacggcaaccggtccagccactcccgcctggggcggatcgaggcggacagcgagtcccaggaggacatcatccgcaacatcgcccggcacctcgcccaggtgggcgacagcatggaccgctccatcccgcccggcctggtcaacgggctggccctccagctgcggaacacgagccgctccgaggaggaccggaaccgcgacctggccaccgcgctcgagcagctgctgcaggcctacccccgggacatggagaaggagaagaccatgctcgtgctggccctgctcctggccaagaaggtggcgagccacaccccctccctgctccgcgacgtcttccacacgaccgtgaacttcatcaaccagaacctgcggacctacgtgcgcagcctggcccggaacggcatggactga

SEQ ID NO: 7004 - RNA, 588 nt, synthetic construct
  misc_feature 1..588: note = derived and/or modified sequence opt2 fromBid__Homo_sapiens__ACD47108
  source 1..588: mol_type = other RNA
atggactgcgaggtcaacaacggctcctccctccgcgacgagtgcatcaccaacctcctcgtcttcggcttcctccagtcctgctccgacaactccttccgccgcgagctcgacgccctcggccacgagctccccgtcctcgccccccagtgggagggctacgacgagctccagaccgacggcaaccgctcctcccactcccgcctcggccgcatcgaggccgactccgagtcccaggaggacatcatccgcaacatcgcccgccacctcgcccaggtcggcgactccatggaccgctccatcccccccggcctcgtcaacggcctcgccctccagctccgcaacacctcccgctccgaggaggaccgcaaccgcgacctcgccaccgccctcgagcagctcctccaggcctacccccgcgacatggagaaggagaagaccatgctcgtcctcgccctcctcctcgccaagaaggtcgcctcccacaccccctccctcctccgcgacgtcttccacaccaccgtcaacttcatcaaccagaacctccgcacctacgtccgctccctcgcccgcaacggcatggactga

SEQ ID NO: 7005 - RNA, 588 nt, synthetic construct
  misc_feature 1..588: note = derived and/or modified sequence opt3 fromBid__Homo_sapiens__ACD47108
  source 1..588: mol_type = other RNA
atggactgcgaagtgaacaatggcagctccctgagagatgaatgtatcaccaacctccttgtcttcgggtttctgcagtcttgctcagacaatagtttcaggcgggagttggatgccttaggacacgaactgcccgttctagctcctcaatgggagggttacgacgaactccagacagatggcaaccgcagctcccattctcgactggggcgtattgaggcagactcggagtcacaggaagatataatcagaaatattgccaggcaccttgctcaggtgggagacagcatggatcggagtatcccaccgggcctggtaaacggtttggcgctccaactgcgcaatacttccagatctgaggaagacaggaaccgggatctggccacggcactcgagcagttactgcaggcctatccccgcgacatggagaaggagaaaaccatgcttgtgttggctctgctactcgcaaagaaagtcgccagccatacaccttccctgcttcgagatgtgtttcacactaccgttaatttcattaaccagaatctgagaacatacgtgaggtcattggctcggaacgggatggactga

SEQ ID NO: 7006 - RNA, 588 nt, synthetic construct
  misc_feature 1..588: note = derived and/or modified sequence opt4 fromBid__Homo_sapiens__ACD47108
  source 1..588: mol_type = other RNA
atggactgcgaggtgaacaacggcagcagcctgagagacgagtgcatcaccaacctgctggtgttcggcttcctgcagagctgcagcgacaacagcttcagaagagagctggacgccctgggccacgagctgcccgtgctggccccccagtgggagggctacgacgagctgcagaccgacggcaacagaagcagccacagcagactgggcagaatcgaggccgacagcgagagccaggaggacatcatcagaaacatcgccagacacctggcccaggtgggcgacagcatggacagaagcatcccccccggcctggtgaacggcctggccctgcagctgagaaacaccagcagaagcgaggaggacagaaacagagacctggccaccgccctggagcagctgctgcaggcctaccccagagacatggagaaggagaagaccatgctggtgctggccctgctgctggccaagaaggtggccagccacacccccagcctgctgagagacgtgttccacaccaccgtgaacttcatcaaccagaacctgagaacctacgtgagaagcctggccagaaacggcatggactga

SEQ ID NO: 7007 - RNA, 588 nt, synthetic construct
  misc_feature 1..588: note = derived and/or modified sequence opt5 fromBid__Homo_sapiens__ACD47108
  source 1..588: mol_type = other RNA
atggactgcgaagtgaacaatggcagctccctgagagatgaatgtatcaccaacctcctggtcttcgggtttcttcagtcttgcagcgacaattccttccggcgcgagctggatgccctcggacacgaactgcccgttcttgctcctcaatgggagggctacgacgaactgcagacagatgggaacagatctagccattcccggctcggacgcattgaggccgactctgagagccaggaagatatcattagaaatatcgcgcggcacctggctcaggtgggcgactccatggatcgcagcattccgcccgggctggtgaacggactcgccctgcaacttagaaatacgtctcggtccgaggaagaccgcaacagagatctggccaccgctctcgagcagctgcttcaggcctatcctcgggacatggagaaggagaaaacaatgctggtcctcgctctgctgctcgccaagaaagtggcgagccataccccctctctgcttcgcgatgtttttcacacaaccgtgaatttcatcaaccagaatctgagaacatacgtccggtccctcgcccgcaacggcatggactga

SEQ ID NO: 7008 - RNA, 588 nt, synthetic construct
  misc_feature 1..588: note = derived and/or modified sequence opt6 fromBid__Homo_sapiens__ACD47108
  source 1..588: mol_type = other RNA
atggattgcgaagtaaataacggatcatcactaagagacgaatgcataacaaatctattagtatttggatttctacaaagttgtagcgataactcattcagaagagaactagatgcattaggacatgaattaccagtactagcaccacaatgggaaggatatgacgaattacaaacagatggaaatagatcaagccatagtagactaggaagaatagaagcagactcagaatcacaagaagacataatacgaaacatagcaagacacttagcacaagtaggagactcaatggatagatcgataccaccaggactagtaaacggactagcactacaactaagaaacacaagtagaagcgaagaagatagaaatagagatctagcaacagcactagaacaactactacaagcttatccaagagacatggaaaaagaaaaaacaatgctagtactagcactattactcgcaaaaaaagtagcaagtcacacaccaagcttattaagagacgtattccatacaacagtaaatttcataaaccaaaacttaagaacatacgtaagatcattagcaagaaatggaatggactaa

SEQ ID NO: 7009 - protein, 122 aa, synthetic construct
  REGION 1..122: note = Bid__Homo_sapiens__B2ZP78
MDCEVNNGSSLRDECITNLLVFGFLQSCSDNSFRRELDALGHELPVLAPQWEGYDELQTDGNRSSHSRLGRIEAGASDNNTASAEEETEAAGSVAVERGLHGAATVVLGQGQHGGCAPEEED

SEQ ID NO: 7010 - RNA, 369 nt, synthetic construct
  misc_feature 1..369: note = Bid__Homo_sapiens__ACD47106
  source 1..369: mol_type = other RNA
atggactgtgaggtcaacaacggttccagcctcagggatgagtgcatcacaaacctactggtgtttggcttcctccaaagctgttctgacaacagcttccgcagagagctggacgcactgggccacgagctgccagtgctggctccccagtgggagggctacgatgagctgcagactgatggcaaccgcagcagccactcccgcttgggaagaatagaggcaggggcgtcagacaataacacagcaagtgctgaggaagaaacggaggcggcagggagcgtggcagttgagcgtggccttcatggagctgcgacagtggtactcgggcaggggcagcacggaggctgtgcgccagaggaggaggactga

SEQ ID NO: 7011 - RNA, 369 nt, synthetic construct
  misc_feature 1..369: note = derived and/or modified sequence opt1 fromBid__Homo_sapiens__ACD47106
  source 1..369: mol_type = other RNA
atggactgcgaggtgaacaacggcagctccctgcgcgacgagtgcatcaccaacctcctggtcttcgggttcctgcagagctgctccgacaacagcttccggcgcgagctcgacgccctgggccacgagctgcccgtgctcgccccgcagtgggaggggtacgacgagctgcagaccgacggcaaccggtccagccactcccgcctggggcggatcgaggcgggcgccagcgacaacaacacggcctccgccgaggaggagaccgaggccgcgggcagcgtggccgtcgagcgcgggctccacggcgccgccaccgtggtgctggggcagggccagcacgggggctgcgcgcccgaggaggaggactga

SEQ ID NO: 7012 - RNA, 369 nt, synthetic construct
  misc_feature 1..369: note = derived and/or modified sequence opt2 fromBid__Homo_sapiens__ACD47106
  source 1..369: mol_type = other RNA
atggactgcgaggtcaacaacggctcctccctccgcgacgagtgcatcaccaacctcctcgtcttcggcttcctccagtcctgctccgacaactccttccgccgcgagctcgacgccctcggccacgagctccccgtcctcgccccccagtgggagggctacgacgagctccagaccgacggcaaccgctcctcccactcccgcctcggccgcatcgaggccggcgcctccgacaacaacaccgcctccgccgaggaggagaccgaggccgccggctccgtcgccgtcgagcgcggcctccacggcgccgccaccgtcgtcctcggccagggccagcacggcggctgcgcccccgaggaggaggactga

SEQ ID NO: 7013 - RNA, 369 nt, synthetic construct
  misc_feature 1..369: note = derived and/or modified sequence opt3 fromBid__Homo_sapiens__ACD47106
  source 1..369: mol_type = other RNA
atggactgcgaggtgaacaatggcagctccctgagagatgaatgtatcaccaacctccttgtcttcgggtttctgcagtcttgctcagacaatagtttcaggcgggagttggatgccttaggacacgaactgcccgttctagctcctcaatgggagggttacgacgaactccagacagatggcaaccgcagctcccattctcgactggggcgtattgaggcaggagcctcggacaataacactgcgtcagctgaggaagagacggaagccgcaggcagcgtggccgtagagagaggtcttcacggggctgcaaccgtggtcctgggacagggccagcatggcgggtgtgccccagaggaagaggattga

SEQ ID NO: 7014 - RNA, 369 nt, synthetic construct
  misc_feature 1..369: note = derived and/or modified sequence opt4 fromBid__Homo_sapiens__ACD47106
  source 1..369: mol_type = other RNA
atggactgcgaggtgaacaacggcagcagcctgagagacgagtgcatcaccaacctgctggtgttcggcttcctgcagagctgcagcgacaacagcttcagaagagagctggacgccctgggccacgagctgcccgtgctggccccccagtgggagggctacgacgagctgcagaccgacggcaacagaagcagccacagcagactgggcagaatcgaggccggcgccagcgacaacaacaccgccagcgccgaggaggagaccgaggccgccggcagcgtggccgtggagagaggcctgcacggcgccgccaccgtggtgctgggccagggccagcacggcggctgcgcccccgaggaggaggactga

SEQ ID NO: 7015 - RNA, 369 nt, synthetic construct
  misc_feature 1..369: note = derived and/or modified sequence opt5 fromBid__Homo_sapiens__ACD47106
  source 1..369: mol_type = other RNA
atggactgcgaggtgaacaatggcagctccctgagagatgaatgtatcaccaacctcctggtcttcgggtttcttcagtcttgcagcgacaattccttccggcgcgagctggatgccctcggacacgaactgcccgttcttgctcctcaatgggagggctacgacgaactgcagacagatgggaacagatctagccattcccggctcggacgcattgaggccggcgcgtctgacaataacacggctagcgccgaggaagagaccgaagccgctgggtccgtggccgtggagagaggactgcacggcgctgccacagtcgtgctgggccaggggcagcatggaggctgtgcgccggaggaagaggattga

SEQ ID NO: 7016 - RNA, 369 nt, synthetic construct
  misc_feature 1..369: note = derived and/or modified sequence opt6 fromBid__Homo_sapiens__ACD47106
  source 1..369: mol_type = other RNA
atggattgtgaagtaaataatggaagtagtttaagagatgaatgtataacaaatttattagtatttggatttttacaaagttgtagtgataatagttttagaagagaattagatgcattaggacatgaattaccagtattagcaccacaatgggaaggatatgatgaactacaaacagatggaaatagaagtagtcatagcagattaggaagaatagaagcaggagcaagtgataataatacagcaagtgcagaagaagaaacagaagcagcaggaagcgtagcagtagaaagaggattacatggagcagcaacagtagtactaggacaaggacaacatggaggatgtgcaccagaagaagaagattaa

SEQ ID NO: 7017 - protein, 99 aa, synthetic construct
  REGION 1..99: note = Bid__Homo_sapiens__B2ZP79
MDRSIPPGLVNGLALQLRNTSRSEEDRNRDLATALEQLLQAYPRDMEKEKTMLVLALLLAKKVASHTPSLLRDVFHTTVNFINQNLRTYVRSLARNGMD

SEQ ID NO: 7018 - RNA, 300 nt, synthetic construct
  misc_feature 1..300: note = Bid__Homo_sapiens__ACD47107
  source 1..300: mol_type = other RNA
atggaccgtagcatccctccgggcctggtgaacggcctggccctgcagctcaggaacaccagccggtcggaggaggaccggaacagggacctggccactgccctggagcagctgctgcaggcctaccctagagacatggagaaggagaagaccatgctggtgctggccctgctgctggccaagaaggtggccagtcacacgccgtccttgctccgtgatgtctttcacacaacagtgaattttattaaccagaacctacgcacctacgtgaggagcttagccagaaatgggatggactga

SEQ ID NO: 7019 - RNA, 300 nt, synthetic construct
  misc_feature 1..300: note = derived and/or modified sequence opt1 fromBid__Homo_sapiens__ACD47107
  source 1..300: mol_type = other RNA
atggaccgcagcatcccgcccggcctggtgaacgggctcgccctgcagctgcggaacacctcccgcagcgaggaggaccggaaccgcgacctcgccaccgcgctggagcagctgctccaggcctacccccgggacatggagaaggagaagacgatgctggtcctggccctcctgctggccaagaaggtggcctcccacacccccagcctcctgcgcgacgtgttccacaccaccgtcaacttcatcaaccagaacctgcggacgtacgtgcgctccctcgcgcggaacggcatggactga

SEQ ID NO: 7020 - RNA, 300 nt, synthetic construct
  misc_feature 1..300: note = derived and/or modified sequence opt2 fromBid__Homo_sapiens__ACD47107
  source 1..300: mol_type = other RNA
atggaccgctccatcccccccggcctcgtcaacggcctcgccctccagctccgcaacacctcccgctccgaggaggaccgcaaccgcgacctcgccaccgccctcgagcagctcctccaggcctacccccgcgacatggagaaggagaagaccatgctcgtcctcgccctcctcctcgccaagaaggtcgcctcccacaccccctccctcctccgcgacgtcttccacaccaccgtcaacttcatcaaccagaacctccgcacctacgtccgctccctcgcccgcaacggcatggactga

SEQ ID NO: 7021 - RNA, 300 nt, synthetic construct
  misc_feature 1..300: note = derived and/or modified sequence opt3 fromBid__Homo_sapiens__ACD47107
  source 1..300: mol_type = other RNA
atggacagaagcattccccctggcctggtgaacgggctcgcccttcagctgaggaatacctcccggtctgaggaagatcgcaaccgagacttggctacagcattagagcaactgctacaggcctacccacgtgatatggaaaaggagaaaactatgctcgtcctggcgcttctgttggctaagaaagttgcctcacacacgccgagtctcctgagagacgtgttccataccacagtaaattttatcaaccagaatctgaggacttatgtgcggagcctcgcacgcaacggaatggattga

SEQ ID NO: 7022 - RNA, 300 nt, synthetic construct
  misc_feature 1..300: note = derived and/or modified sequence opt4 fromBid__Homo_sapiens__ACD47107
  source 1..300: mol_type = other RNA
atggacagaagcatcccccccggcctggtgaacggcctggccctgcagctgagaaacaccagcagaagcgaggaggacagaaacagagacctggccaccgccctggagcagctgctgcaggcctaccccagagacatggagaaggagaagaccatgctggtgctggccctgctgctggccaagaaggtggccagccacacccccagcctgctgagagacgtgttccacaccaccgtgaacttcatcaaccagaacctgagaacctacgtgagaagcctggccagaaacggcatggactga

SEQ ID NO: 7023 - RNA, 300 nt, synthetic construct
  misc_feature 1..300: note = derived and/or modified sequence opt5 fromBid__Homo_sapiens__ACD47107
  source 1..300: mol_type = other RNA
atggacagaagcattccccctggcctggtgaacgggctcgccctgcagcttcggaatacctcccgctctgaggaagatagaaaccgggacctggctacagccctcgagcaactgcttcaggcgtacccgcgcgatatggaaaaggagaaaacgatgctggtcctcgctctgctgctcgccaagaaagttgccagccacaccccctccctgcttagagacgtgttccatacaaccgtgaattttatcaaccagaatctgcggacatatgtccgctctctcgctagaaacggaatggattga

SEQ ID NO: 7024 - RNA, 300 nt, synthetic construct
  misc_feature 1..300: note = derived and/or modified sequence opt6 fromBid__Homo_sapiens__ACD47107
  source 1..300: mol_type = other RNA
atggacagatcaataccaccaggactagtaaacggactcgcactacaactaagaaacacaagcagaagcgaagaagacagaaacagagacctagcaacagcactagaacaactactacaagcatacccaagagacatggaaaaagaaaaaacaatgctagtattagcactactactagcaaaaaaagtagcaagccacacaccaagcctactaagagacgtattccatacaacagtaaacttcataaaccaaaacctaagaacatacgtaagatcactagcaagaaacggaatggactaa

SEQ ID NO: 7025 - protein, 195 aa, synthetic construct; identical to SEQ ID NO: 7001
  REGION 1..195: note = Bid__Homo_sapiens__P55957

SEQ ID NO: 7026 - RNA, 588 nt, synthetic construct; identical to SEQ ID NO: 7002
  misc_feature 1..588: note = Bid__Homo_sapiens__AAC34365
  source 1..588: mol_type = other RNA

SEQ ID NO: 7027 - RNA, 588 nt, synthetic construct; identical to SEQ ID NO: 7003
  misc_feature 1..588: note = derived and/or modified sequence opt1 fromBid__Homo_sapiens__AAC34365
  source 1..588: mol_type = other RNA

SEQ ID NO: 7028 - RNA, 588 nt, synthetic construct; identical to SEQ ID NO: 7004
  misc_feature 1..588: note = derived and/or modified sequence opt2 fromBid__Homo_sapiens__AAC34365
  source 1..588: mol_type = other RNA

SEQ ID NO: 7029 - RNA, 588 nt, synthetic construct; identical to SEQ ID NO: 7005
  misc_feature 1..588: note = derived and/or modified sequence opt3 fromBid__Homo_sapiens__AAC34365
  source 1..588: mol_type = other RNA

SEQ ID NO: 7030 - RNA, 588 nt, synthetic construct; identical to SEQ ID NO: 7006
  misc_feature 1..588: note = derived and/or modified sequence opt4 fromBid__Homo_sapiens__AAC34365
  source 1..588: mol_type = other RNA

SEQ ID NO: 7031 - RNA, 588 nt, synthetic construct; identical to SEQ ID NO: 7007
  misc_feature 1..588: note = derived and/or modified sequence opt5 fromBid__Homo_sapiens__AAC34365
  source 1..588: mol_type = other RNA

SEQ ID NO: 7032 - RNA, 588 nt, synthetic construct
  misc_feature 1..588: note = derived and/or modified sequence opt6 fromBid__Homo_sapiens__AAC34365
  source 1..588: mol_type = other RNA
atggattgcgaagtaaataacggaagctcactaagagacgaatgcataacaaatctattagtatttggatttttacaaagctgtagcgataacagtttcagaagagaactagacgcactcggacatgaactaccagtactagcaccacaatgggaaggatatgacgaactacaaacagatggaaatagatcaagccatagcagactaggaagaatagaagcagactcagaatcacaagaagacataataagaaacatagcaagacaccttgcacaagtaggagactccatggatagatcaataccaccaggactagtaaacggactagcactacaactaagaaacacaagcagatcagaagaagacagaaatagagatctagcaacagccctagaacaattactacaagcatatccaagagacatggaaaaagaaaaaacaatgttagtactagcactattattagcaaaaaaagtagcaagccatacaccatcattactaagagacgtattccatacaacagtaaacttcataaaccaaaacctaagaacatacgtacgatctctagcaagaaatggaatggactaa

SEQ ID NO: 7033 - protein, 160 aa, synthetic construct
  REGION 1..160: note = Bik__Homo_sapiens__A0A024R4X6
MSEVRPLSRDILMETLLYEQLLEPPTMEVLGMTDSEEDLDPMEDFDSLECMEGSDALALRLACIGDEMDVSLRAPRLAQLSEVAMHSLGLAFIYDQTEDIRDVLRSFMDGFTTLKENIMRFWRSPNPGSWVSCEQVLLALLLLLALLLPLLSGGLHLLLK

SEQ ID NO: 7034 - RNA, 483 nt, synthetic construct
  misc_feature 1..483: note = Bik__Homo_sapiens__EAW73284
  source 1..483: mol_type = other RNA
atgtctgaagtaagacccctctccagagacatcttgatggagaccctcctgtatgagcagctcctggaacccccgaccatggaggttcttggcatgactgactctgaagaggacctggaccctatggaggacttcgattctttggaatgcatggagggcagtgacgcattggccctgcggctggcctgcatcggggacgagatggacgtgagcctcagggccccgcgcctggcccagctctccgaggtggccatgcacagcctgggtctggctttcatctacgaccagactgaggacatcagggatgttcttagaagtttcatggacggtttcaccacacttaaggagaacataatgaggttctggagatccccgaaccccgggtcctgggtgtcctgcgaacaggtgctgctggcgctgctgctgctgctggcgctgctgctgccgctgctcagcgggggcctgcacctgctgctcaagtga

SEQ ID NO: 7035 - RNA, 483 nt, synthetic construct
  misc_feature 1..483: note = derived and/or modified sequence opt1 fromBik__Homo_sapiens__EAW73284
  source 1..483: mol_type = other RNA
atgagcgaggtgcgccccctgtcccgggacatcctcatggagaccctgctgtacgagcagctcctggagccgcccaccatggaggtgctgggcatgacggacagcgaggaggacctcgaccccatggaggacttcgactccctggagtgcatggaggggagcgacgccctggccctccgcctggcgtgcatcggcgacgagatggacgtgtccctgcgggcgccccgcctcgcccagctgagcgaggtggccatgcactccctggggctcgccttcatctacgaccagaccgaggacatccgggacgtcctgcgcagcttcatggacggcttcaccaccctgaaggagaacatcatgcggttctggcgctccccgaaccccgggagctgggtgtcctgcgagcaggtcctcctggccctgctcctgctgctcgccctgctgctccccctgctgagcggcggcctccacctcctgctgaagtga

SEQ ID NO: 7036 - RNA, 483 nt, synthetic construct
  misc_feature 1..483: note = derived and/or modified sequence opt2 fromBik__Homo_sapiens__EAW73284
  source 1..483: mol_type = other RNA
atgtccgaggtccgccccctctcccgcgacatcctcatggagaccctcctctacgagcagctcctcgagccccccaccatggaggtcctcggcatgaccgactccgaggaggacctcgaccccatggaggacttcgactccctcgagtgcatggagggctccgacgccctcgccctccgcctcgcctgcatcggcgacgagatggacgtctccctccgcgccccccgcctcgcccagctctccgaggtcgccatgcactccctcggcctcgccttcatctacgaccagaccgaggacatccgcgacgtcctccgctccttcatggacggcttcaccaccctcaaggagaacatcatgcgcttctggcgctcccccaaccccggctcctgggtctcctgcgagcaggtcctcctcgccctcctcctcctcctcgccctcctcctccccctcctctccggcggcctccacctcctcctcaagtga

SEQ ID NO: 7037 - RNA, 483 nt, synthetic construct
  misc_feature 1..483: note = derived and/or modified sequence opt3 fromBik__Homo_sapiens__EAW73284
  source 1..483: mol_type = other RNA
atgagcgaggtgagacccctgtccagggacatcctcatggaaacccttctgtacgagcagttgttagaacctccaacaatggaggtcctgggcatgactgattctgaagaggacctagatccgatggaggacttcgattcactcgaatgcatggaggggagtgacgccctggcccttcggctggcatgtattggagatgaaatggacgttagcttgcgcgctccccgactcgcgcaactgtccgaggtggctatgcactctctgggtctcgcctttatatatgatcagacggaggacatccgtgatgtattaagatcgttcatggacggctttaccacactgaaggaaaacattatgaggttctggcggtcacctaatccagggagctgggtgagttgcgagcaggtccttttggcactgctactcctgcttgccctgttgctccccctgttatccggaggcctgcatctccttctgaaatga

SEQ ID NO: 7038 - RNA, 483 nt, synthetic construct
  misc_feature 1..483: note = derived and/or modified sequence opt4 fromBik__Homo_sapiens__EAW73284
  source 1..483: mol_type = other RNA
atgagcgaggtgagacccctgagcagagacatcctgatggagaccctgctgtacgagcagctgctggagccccccaccatggaggtgctgggcatgaccgacagcgaggaggacctggaccccatggaggacttcgacagcctggagtgcatggagggcagcgacgccctggccctgagactggcctgcatcggcgacgagatggacgtgagcctgagagcccccagactggcccagctgagcgaggtggccatgcacagcctgggcctggccttcatctacgaccagaccgaggacatcagagacgtgctgagaagcttcatggacggcttcaccaccctgaaggagaacatcatgagattctggagaagccccaaccccggcagctgggtgagctgcgagcaggtgctgctggccctgctgctgctgctggccctgctgctgcccctgctgagcggcggcctgcacctgctgctgaagtga

SEQ ID NO: 7039 - RNA, 483 nt, synthetic construct
  misc_feature 1..483: note = derived and/or modified sequence opt5 fromBik__Homo_sapiens__EAW73284
  source 1..483: mol_type = other RNA
atgagcgaggtgagacccctgtcccgggacatcctcatggagaccctgctttacgagcagctgctcgaacctccgacaatggaggtcctgggcatgacggattctgaagaggaccttgatcccatggaggacttcgatagcctggaatgcatggaggggtccgacgccctcgctctgcgcctggcctgtattggagatgaaatggacgtttctctcagagcgcctcggctggctcaacttagcgaggtggccatgcactccctgggcctcgcctttatctatgatcagaccgaggacattcgcgatgtgctgagatctttcatggacgggtttacaacccttaaggaaaacatcatgcggttctggcgcagccccaatcctggatcctgggtcagctgcgaacaggtgctgctcgctctgctgctcctgcttgccctgctcctgccccttctgtctggcgggctccatctgctgctcaaatga

SEQ ID NO: 7040 - RNA, 483 nt, synthetic construct
  misc_feature 1..483: note = derived and/or modified sequence opt6 fromBik__Homo_sapiens__EAW73284
  source 1..483: mol_type = other RNA
atgtctgaagtaagaccactatcaagagatatattaatggaaacattattatatgaacaactattagaacctcccacaatggaagtattaggaatgacagatagtgaagaagatctagatccaatggaagatttcgatagtttagaatgtatggaaggatcagacgcattagcactaagactagcatgcataggagatgaaatggacgtaagcttaagagcaccaagattagcacaactaagtgaagtagcaatgcatagcttaggattagcatttatatatgaccaaacagaagacataagagatgtattaagatcattcatggacggattcacaacattaaaagaaaacataatgagattctggagatcaccaaatccaggaagctgggtatcatgcgaacaagtactactagcattattattactattagcattattattaccattattatcaggcggactacatctattactaaaataa

SEQ ID NO: 7041 - protein, 160 aa, synthetic construct; identical to SEQ ID NO: 7033
  REGION 1..160: note = Bik__Homo_sapiens__Q13323

SEQ ID NO: 7042 - RNA, 483 nt, synthetic construct; identical to SEQ ID NO: 7034
  misc_feature 1..483: note = Bik__Homo_sapiens__AAC50413
  source 1..483: mol_type = other RNA

SEQ ID NO: 7043 - RNA, 483 nt, synthetic construct; identical to SEQ ID NO: 7035
  misc_feature 1..483: note = derived and/or modified sequence opt1 fromBik__Homo_sapiens__AAC50413
  source 1..483: mol_type = other RNA

SEQ ID NO: 7044 - RNA, 483 nt, synthetic construct; identical to SEQ ID NO: 7036
  misc_feature 1..483: note = derived and/or modified sequence opt2 fromBik__Homo_sapiens__AAC50413
  source 1..483: mol_type = other RNA

SEQ ID NO: 7045 - RNA, 483 nt, synthetic construct; identical to SEQ ID NO: 7037
  misc_feature 1..483: note = derived and/or modified sequence opt3 fromBik__Homo_sapiens__AAC50413
  source 1..483: mol_type = other RNA

SEQ ID NO: 7046 - RNA, 483 nt, synthetic construct; identical to SEQ ID NO: 7038
  misc_feature 1..483: note = derived and/or modified sequence opt4 fromBik__Homo_sapiens__AAC50413
  source 1..483: mol_type = other RNA

SEQ ID NO: 7047 - RNA, 483 nt, synthetic construct; identical to SEQ ID NO: 7039
  misc_feature 1..483: note = derived and/or modified sequence opt5 fromBik__Homo_sapiens__AAC50413
  source 1..483: mol_type = other RNA

SEQ ID NO: 7048 - RNA, 483 nt, synthetic construct
  misc_feature 1..483: note = derived and/or modified sequence opt6 fromBik__Homo_sapiens__AAC50413
  source 1..483: mol_type = other RNA
atgtcagaagtaagaccactatcaagagatatattaatggaaacattattatatgaacaactattagaaccaccaacaatggaagtattaggaatgacagatagtgaagaagatctagatccaatggaagatttcgatagcttagaatgtatggaaggatcagacgcattagcactaagactagcatgcataggagatgaaatggacgtaagtttaagagcaccaagactagcacaattaagtgaagtagcaatgcatagcttaggattagcatttatatatgaccaaaccgaagacataagagatgtattaagatcattcatggacggattcacaacattaaaagaaaacataatgagattctggagatcaccaaatccaggaagctgggtatcatgcgaacaagtactactagcattactattactattagcattactattaccactactatctggaggactacatctattactaaaataa

SEQ ID NO: 7049 - protein, 198 aa, synthetic construct
  REGION 1..198: note = Bim__Homo_sapiens__O43521
MAKQPSDVSSECDREGRQLQPAERPPQLRPGAPTSLQTEPQGNPEGNHGGEGDSCPHGSPQGPLAPPASPGPFATRSPLFIFMRRSSLLSRSSSGYFSFDTDRSPAPMSCDKSTQTPSPPCQAFNHYLSAMASMRQAEPADMRPEIWIAQELRRIGDEFNAYYARRVFLNNYQAAEDHPRMVILRLLRYIVRLVWRMH

SEQ ID NO: 7050 - RNA, 597 nt, synthetic construct
  misc_feature 1..597: note = Bim__Homo_sapiens__AAC39593
  source 1..597: mol_type = other RNA
atggcaaagcaaccttctgatgtaagttctgagtgtgaccgagaaggtagacaattgcagcctgcggagaggcctccccagctcagacctggggcccctacctccctacagacagagccacaaggtaatcctgaaggcaatcacggaggtgaaggggacagctgcccccacggcagccctcagggcccgctggccccacctgccagccctggcccttttgctaccagatccccgcttttcatctttatgagaagatcctccctgctgtctcgatcctccagtgggtatttctcttttgacacagacaggagcccagcacccatgagttgtgacaaatcaacacaaaccccaagtcctccttgccaggccttcaaccactatctcagtgcaatggcttccatgaggcaggctgaacctgcagatatgcgcccagagatatggatcgcccaagagttgcggcgtatcggagacgagtttaacgcttactatgcaaggagggtatttttgaataattaccaagcagccgaagaccacccacgaatggttatcttacgactgttacgttacattgtccgcctggtgtggagaatgcattga

SEQ ID NO: 7051 - RNA, 597 nt, synthetic construct
  misc_feature 1..597: note = derived and/or modified sequence opt1 fromBim__Homo_sapiens__AAC39593
  source 1..597: mol_type = other RNA
atggccaagcagcccagcgacgtgtccagcgagtgcgaccgcgagggccggcagctgcagccggccgagcgcccgccccagctccggcccggggcgcccacctccctgcagaccgagccccagggcaaccccgaggggaaccacggcggggagggcgacagctgcccccacggctccccgcaggggcccctggccccgcccgccagccccggccccttcgccacgcgcagccccctcttcatcttcatgcggcgctcctccctgctgagccggtccagctccgggtacttcagcttcgacaccgaccgctcccccgccccgatgagctgcgacaagtccacccagacccccagcccgccctgccaggcgttcaaccactacctctccgccatggccagcatgcggcaggccgagcccgcggacatgcgccccgagatctggatcgcccaggagctgcggcgcatcggcgacgagttcaacgcctactacgcccggcgcgtcttcctgaacaactaccaggccgcggaggaccacccccggatggtgatcctccgcctgctgcggtacatcgtgcgcctcgtctggcggatgcactga

SEQ ID NO: 7052 - RNA, 597 nt, synthetic construct
  misc_feature 1..597: note = derived and/or modified sequence opt2 fromBim__Homo_sapiens__AAC39593
  source 1..597: mol_type = other RNA
atggccaagcagccctccgacgtctcctccgagtgcgaccgcgagggccgccagctccagcccgccgagcgccccccccagctccgccccggcgcccccacctccctccagaccgagccccagggcaaccccgagggcaaccacggcggcgagggcgactcctgcccccacggctccccccagggccccctcgccccccccgcctcccccggccccttcgccacccgctcccccctcttcatcttcatgcgccgctcctccctcctctcccgctcctcctccggctacttctccttcgacaccgaccgctcccccgcccccatgtcctgcgacaagtccacccagaccccctcccccccctgccaggccttcaaccactacctctccgccatggcctccatgcgccaggccgagcccgccgacatgcgccccgagatctggatcgcccaggagctccgccgcatcggcgacgagttcaacgcctactacgcccgccgcgtcttcctcaacaactaccaggccgccgaggaccacccccgcatggtcatcctccgcctcctccgctacatcgtccgcctcgtctggcgcatgcactga

SEQ ID NO: 7053 - RNA, 597 nt, synthetic construct
  misc_feature 1..597: note = derived and/or modified sequence opt3 fromBim__Homo_sapiens__AAC39593
  source 1..597: mol_type = other RNA
atggccaagcagcccagcgacgtgtcctctgagtgcgatagagaaggcaggcaactgcagcctgctgagcggccaccgcagctccgccccggggcacctacctcacttcagacagaaccacaaggaaaccccgagggtaatcacggcggggaaggagacagttgtcctcatggcagcccacagggtcccctggcccctccagcgtccccggggcccttcgctactcgatctcctttgtttatcttcatgcgtagatcgtcattactgagcaggagttcctctggatactttagcttcgatacggaccggtccccagcccccatgtcatgcgataaaagtacccagacacctagcccaccctgtcaggcatttaaccactatctatctgccatggcttccatgcgccaagcagagccggccgacatgagacctgagatttggatagctcaggaactcaggcggatcggcgatgagttcaatgcctactatgcgcgccgagtctttctgaacaattaccaggcagccgaagaccatcccagaatggttattcttaggctgttgcggtatatcgtgcgtctcgtatggcgcatgcactga

SEQ ID NO: 7054 - RNA, 597 nt, synthetic construct
  misc_feature 1..597: note = derived and/or modified sequence opt4 fromBim__Homo_sapiens__AAC39593
  source 1..597: mol_type = other RNA
atggccaagcagcccagcgacgtgagcagcgagtgcgacagagagggcagacagctgcagcccgccgagagacccccccagctgagacccggcgcccccaccagcctgcagaccgagccccagggcaaccccgagggcaaccacggcggcgagggcgacagctgcccccacggcagcccccagggccccctggccccccccgccagccccggccccttcgccaccagaagccccctgttcatcttcatgagaagaagcagcctgctgagcagaagcagcagcggctacttcagcttcgacaccgacagaagccccgcccccatgagctgcgacaagagcacccagacccccagccccccctgccaggccttcaaccactacctgagcgccatggccagcatgagacaggccgagcccgccgacatgagacccgagatctggatcgcccaggagctgagaagaatcggcgacgagttcaacgcctactacgccagaagagtgttcctgaacaactaccaggccgccgaggaccaccccagaatggtgatcctgagactgctgagatacatcgtgagactggtgtggagaatgcactga

SEQ ID NO: 7055 - RNA, 597 nt, synthetic construct
  misc_feature 1..597: note = derived and/or modified sequence opt5 fromBim__Homo_sapiens__AAC39593
  source 1..597: mol_type = other RNA
atggccaagcagcccagcgacgtgtcctctgagtgcgatagagaaggccggcaactgcagcctgctgagcgcccgccccagctcagacctggggcccccaccagcctgcagacagaacctcaaggaaaccccgagggcaatcacgggggagaaggcgactcctgtcctcatgggtctccgcagggaccccttgcgcctcccgctagccctggccccttcgccacgcggtccccgctgtttatcttcatgcgcagatctagcctcctgtcccggtctagctccggctactttagcttcgataccgaccgctctcctgcccccatgtcctgcgataaaagcacacagaccccttctcctccctgtcaggcttttaaccactatctttccgccatggctagcatgagacaagccgagcccgcggacatgcggccggagatttggatcgcccaggaactgcgcagaattggggatgagttcaatgcttactatgcccggcgcgtctttctcaacaattaccaggctgccgaagaccatcccagaatggttatcctgcggctgctccgctatattgtgagactggtgtggcggatgcactga

SEQ ID NO: 7056 - RNA, 597 nt, synthetic construct
  misc_feature 1..597: note = derived and/or modified sequence opt6 fromBim__Homo_sapiens__AAC39593
  source 1..597: mol_type = other RNA
atggcaaaacaaccaagcgacgtatcatcagaatgtgacagagaaggaagacaattacaaccagcagaaagacctccacaattaagaccaggagcaccaacatcactacaaacagaaccacaaggcaatccagaaggaaatcacggaggagaaggagactcatgtccacacggatcaccacaaggaccattagcaccaccagcatcaccaggaccatttgcaacaagatcaccactattcatattcatgcgaagatcatcactattatcaagatcatcatcaggatacttttcatttgacacagacagaagtccagcaccaatgtcatgcgataaatcaacacaaacaccatcaccaccatgtcaagcattcaatcactatctatcagcaatggcatcaatgagacaagcagaaccagccgacatgagaccagaaatatggatagcacaagaactaagacgaataggagatgaattcaacgcatactatgcaagaagagtattcttaaacaattaccaagcagcagaagatcacccaagaatggtaatattacgactattaagatatatagtaagattagtatggagaatgcactaa

SEQ ID NO: 7057 - protein, 505 aa, synthetic construct
  REGION 1..505: note = Blk__Homo_sapiens__P51451
MGLVSSKKPDKEKPIKEKDKGQWSPLKVSAQDKDAPPLPPLVVFNHLTPPPPDEHLDEDKHFVVALYDYTAMNDRDLQMLKGEKLQVLKGTGDWWLARSLVTGREGYVPSNFVARVESLEMERWFFRSQGRKEAERQLLAPINKAGSFLIRESETNKGAFSLSVKDVTTQGELIKHYKIRCLDEGGYYISPRITFPSLQALVQHYSKKGDGLCQRLTLPCVRPAPQNPWAQDEWEIPRQSLRLVRKLGSGQFGEVWMGYYKNNMKVAIKTLKEGTMSPEAFLGEANVMKALQHERLVRLYAVVTKEPIYIVTEYMARGCLLDFLKTDEGSRLSLPRLIDMSAQIAEGMAYIERMNSIHRDLRAANILVSEALCCKIADFGLARIIDSEYTAQEGAKFPIKWTAPEAIHFGVFTIKADVWSFGVLLMEVVTYGRVPYPGMSNPEVIRNLERGYRMPRPDTCPPELYRGVIAECWRSRPEERPTFEFLQSVLEDFYTATERQYELQP

SEQ ID NO: 7058 - RNA, 1518 nt, synthetic construct
  misc_feature 1..1518: note = Blk__Homo_sapiens__AAH07371
  source 1..1518: mol_type = other RNA
atggggctggtaagtagcaaaaagccggacaaggaaaagccgatcaaagagaaggacaagggccaatggagccccctgaaggtcagcgcccaagacaaggacgccccgccactgccgcccctggttgtcttcaaccaccttactcctccaccgcccgatgaacacctggatgaagacaagcatttcgtggtggctctgtatgactacaccgctatgaatgatcgggacctgcagatgctgaagggggagaagctacaggtcctgaagggaactggagactggtggctggccaggtcactcgtcacaggaagagaaggctatgtgcccagcaactttgtggcccgagtggagagcctggaaatggaaaggtggttctttagatcacagggtcggaaggaggctgagaggcagcttcttgctccaatcaacaaggccggctcctttcttatcagagagagtgaaaccaacaaaggtgccttctccctgtctgtgaaggatgtcaccacccagggggagctgatcaagcactataagatccgctgcctggatgaagggggctactacatctccccccggatcaccttcccctcgctccaggccctggtgcagcactattctaagaagggggatggtctatgccagaggctgaccctgccctgtgtgcgcccggccccgcagaatccctgggcccaggatgaatgggagatcccccggcagtctctcaggctggtcaggaaactcgggtctggacaattcggcgaagtctggatgggttactacaaaaacaacatgaaggtggccattaagacgctgaaggagggaaccatgtctccagaagcctttctgggtgaggccaacgtgatgaaggctctgcagcacgagcggctggtccgactctacgcagtggtcaccaaggagcccatctacattgtcaccgagtacatggccagaggatgcctgctggatttcctgaagacagatgaagggagcagattgtcactcccaaggctgattgacatgtcggcgcagattgctgaagggatggcatacattgagcgcatgaattccatccaccgcgacctgcgggcggccaacatcctggtgtctgaggccttgtgctgcaaaattgctgattttggcttggctcgaatcatcgacagtgaatacacggcccaagagggggccaagttccccatcaagtggacagccccggaagccatccacttcggggtcttcaccatcaaagcagacgtgtggtcgtttggagtcctcctgatggaagttgtcacttatgggcgggtgccatacccagggatgagcaaccccgaggtcatccgcaacctggagcgcggctaccgcatgccgcgccccgacacctgcccgcccgagctgtaccgcggcgtcatcgccgagtgctggcgcagccggcccgaggagcggcccaccttcgagttcctgcagtcggtgctggaggacttctacacggccaccgagcggcagtacgagctgcagccctag

SEQ ID NO: 7059 - RNA, 1518 nt, synthetic construct
  misc_feature 1..1518: note = derived and/or modified sequence opt1 fromBlk__Homo_sapiens__AAH07371
  source 1..1518: mol_type = other RNA
atgggcctggtgagctccaagaagcccgacaaggagaagccgatcaaggagaaggacaaggggcagtggagccccctcaaggtctccgcccaggacaaggacgccccgcccctgccgcccctggtggtgttcaaccacctcaccccgccgccgcccgacgagcacctggacgaggacaagcacttcgtcgtggcgctgtacgactacaccgccatgaacgaccgcgacctccagatgctgaagggcgagaagctccaggtgctgaaggggacgggcgactggtggctggcccggagcctggtcaccgggcgcgagggctacgtgccctccaacttcgtggcccgggtcgagagcctcgagatggagcgctggttcttccggtcccagggccgcaaggaggccgagcggcagctgctggcgcccatcaacaaggccgggagcttcctcatccgcgagtccgagaccaacaagggcgccttcagcctgtccgtgaaggacgtgaccacgcagggggagctgatcaagcactacaagatccggtgcctcgacgagggcgggtactacatcagcccccgcatcaccttcccctccctgcaggccctggtccagcactacagcaagaagggcgacggcctctgccagcggctgaccctgccctgcgtgcgccccgcgccccagaacccctgggcccaggacgagtgggagatcccccggcagtccctccgcctggtgcggaagctggggagcggccagttcggggaggtctggatgggctactacaagaacaacatgaaggtggccatcaagaccctcaaggagggcacgatgtcccccgaggccttcctgggggaggccaacgtgatgaaggcgctgcagcacgagcgcctcgtccggctgtacgccgtggtgaccaaggagcccatctacatcgtcaccgagtacatggcccgcggctgcctgctcgacttcctgaagaccgacgaggggagccggctgtccctcccccgcctgatcgacatgagcgcccagatcgccgagggcatggcgtacatcgagcggatgaacagcatccaccgcgacctgcgcgccgccaacatcctcgtgtccgaggccctgtgctgcaagatcgccgacttcgggctggcgcggatcatcgacagcgagtacacggcccaggagggcgccaagttccccatcaagtggaccgcccccgaggccatccacttcggcgtgttcaccatcaaggcggacgtctggtccttcggggtgctcctgatggaggtcgtgacctacggccgcgtgccgtaccccgggatgagcaaccccgaggtcatccggaacctggagcgcggctaccggatgccccgcccggacacgtgcccgcccgagctctaccgcggggtgatcgccgagtgctggcggtcccggcccgaggagcgccccaccttcgagttcctgcagagcgtgctggaggacttctacaccgccaccgagcggcagtacgagctccagccctga

SEQ ID NO: 7060 - RNA, 1518 nt, synthetic construct
  misc_feature 1..1518: note = derived and/or modified sequence opt2 fromBlk__Homo_sapiens__AAH07371
  source 1..1518: mol_type = other RNA
atgggcctcgtctcctccaagaagcccgacaaggagaagcccatcaaggagaaggacaagggccagtggtcccccctcaaggtctccgcccaggacaaggacgccccccccctcccccccctcgtcgtcttcaaccacctcaccccccccccccccgacgagcacctcgacgaggacaagcacttcgtcgtcgccctctacgactacaccgccatgaacgaccgcgacctccagatgctcaagggcgagaagctccaggtcctcaagggcaccggcgactggtggctcgcccgctccctcgtcaccggccgcgagggctacgtcccctccaacttcgtcgcccgcgtcgagtccctcgagatggagcgctggttcttccgctcccagggccgcaaggaggccgagcgccagctcctcgcccccatcaacaaggccggctccttcctcatccgcgagtccgagaccaacaagggcgccttctccctctccgtcaaggacgtcaccacccagggcgagctcatcaagcactacaagatccgctgcctcgacgagggcggctactacatctccccccgcatcaccttcccctccctccaggccctcgtccagcactactccaagaagggcgacggcctctgccagcgcctcaccctcccctgcgtccgccccgccccccagaacccctgggcccaggacgagtgggagatcccccgccagtccctccgcctcgtccgcaagctcggctccggccagttcggcgaggtctggatgggctactacaagaacaacatgaaggtcgccatcaagaccctcaaggagggcaccatgtcccccgaggccttcctcggcgaggccaacgtcatgaaggccctccagcacgagcgcctcgtccgcctctacgccgtcgtcaccaaggagcccatctacatcgtcaccgagtacatggcccgcggctgcctcctcgacttcctcaagaccgacgagggctcccgcctctccctcccccgcctcatcgacatgtccgcccagatcgccgagggcatggcctacatcgagcgcatgaactccatccaccgcgacctccgcgccgccaacatcctcgtctccgaggccctctgctgcaagatcgccgacttcggcctcgcccgcatcatcgactccgagtacaccgcccaggagggcgccaagttccccatcaagtggaccgcccccgaggccatccacttcggcgtcttcaccatcaaggccgacgtctggtccttcggcgtcctcctcatggaggtcgtcacctacggccgcgtcccctaccccggcatgtccaaccccgaggtcatccgcaacctcgagcgcggctaccgcatgccccgccccgacacctgcccccccgagctctaccgcggcgtcatcgccgagtgctggcgctcccgccccgaggagcgccccaccttcgagttcctccagtccgtcctcgaggacttctacaccgccaccgagcgccagtacgagctccagccctga

SEQ ID NO: 7061 - RNA, 1518 nt, synthetic construct
  misc_feature 1..1518: note = derived and/or modified sequence opt3 fromBlk__Homo_sapiens__AAH07371
  source 1..1518: mol_type = other RNA
atgggcctggtgagctccaagaaacccgacaaggagaaacctatcaaggaaaaagataaggggcagtggtctccactcaaggtctcagcccaagacaaagatgctccgccccttcctccactggttgtgttcaaccacttgacaccccctccacccgacgagcatttagatgaagacaagcactttgtagtggcactgtacgattataccgccatgaatgacagagatctacagatgctcaaaggagagaagctgcaggtccttaaaggtactggcgactggtggctggcgaggagtttggtgacggggcgggaaggatacgttcctagcaacttcgtggctcgcgtcgagtccctcgagatggaacgatggtttttccgttctcagggcagaaaggaggccgaaaggcaactgctggcaccaattaataaggccggttcgtttctcatacgggagtcagagaccaacaaaggggctttcagcttaagtgtgaaggatgtaacaactcagggagaactgatcaaacattataagattcgctgccttgacgagggcggctactatatctccccgagaattacctttccctctttgcaggcactggttcagcactacagcaaaaagggggatggactatgtcaaaggctcacactgccttgcgtgcggccagctccccagaatccttgggcccaggacgaatgggagatcccacgccagtcccttcgactggtcagaaaattgggttcaggccaattcggggaagtgtggatgggatattacaagaacaatatgaaggtggccataaaaaccctcaaggagggcactatgagtcccgaggcgtttctgggtgaagcaaacgtcatgaaagccttacagcatgagaggctggttcggctctacgctgtggtaacaaaggaaccgatctatattgtgaccgagtacatggcccgtgggtgtcttctggacttcttgaaaacggatgaaggaagccgcctatctctgcctagactcatcgacatgtccgcacagattgctgagggcatggcctatatcgagaggatgaactcaatacaccgggatctgcgagcggccaatattcttgtcagcgaagcactgtgctgtaagatcgctgactttggcttggcccgcattatcgatagtgagtacactgctcaagaaggggccaagttccccatcaaatggaccgcaccagaggccattcactttggagtgttcacaataaaggctgacgtttggtctttcggtgtgctcctgatggaagtcgtgacttatggcagagtaccttaccccgggatgtccaatccagaggttatcaggaacttagagcggggatatcgcatgcccagacctgatacctgcccaccggaactgtacaggggcgtgattgcggagtgttggcgtagccggcccgaggaacgacctacatttgagttcctacagtcggtcctcgaagacttttacaccgcaacggagagacagtatgaactgcagccatga

SEQ ID NO: 7062 - RNA, 1518 nt, synthetic construct
  misc_feature 1..1518: note = derived and/or modified sequence opt4 fromBlk__Homo_sapiens__AAH07371
  source 1..1518: mol_type = other RNA
atgggcctggtgagcagcaagaagcccgacaaggagaagcccatcaaggagaaggacaagggccagtggagccccctgaaggtgagcgcccaggacaaggacgccccccccctgccccccctggtggtgttcaaccacctgaccccccccccccccgacgagcacctggacgaggacaagcacttcgtggtggccctgtacgactacaccgccatgaacgacagagacctgcagatgctgaagggcgagaagctgcaggtgctgaagggcaccggcgactggtggctggccagaagcctggtgaccggcagagagggctacgtgcccagcaacttcgtggccagagtggagagcctggagatggagagatggttcttcagaagccagggcagaaaggaggccgagagacagctgctggcccccatcaacaaggccggcagcttcctgatcagagagagcgagaccaacaagggcgccttcagcctgagcgtgaaggacgtgaccacccagggcgagctgatcaagcactacaagatcagatgcctggacgagggcggctactacatcagccccagaatcaccttccccagcctgcaggccctggtgcagcactacagcaagaagggcgacggcctgtgccagagactgaccctgccctgcgtgagacccgccccccagaacccctgggcccaggacgagtgggagatccccagacagagcctgagactggtgagaaagctgggcagcggccagttcggcgaggtgtggatgggctactacaagaacaacatgaaggtggccatcaagaccctgaaggagggcaccatgagccccgaggccttcctgggcgaggccaacgtgatgaaggccctgcagcacgagagactggtgagactgtacgccgtggtgaccaaggagcccatctacatcgtgaccgagtacatggccagaggctgcctgctggacttcctgaagaccgacgagggcagcagactgagcctgcccagactgatcgacatgagcgcccagatcgccgagggcatggcctacatcgagagaatgaacagcatccacagagacctgagagccgccaacatcctggtgagcgaggccctgtgctgcaagatcgccgacttcggcctggccagaatcatcgacagcgagtacaccgcccaggagggcgccaagttccccatcaagtggaccgcccccgaggccatccacttcggcgtgttcaccatcaaggccgacgtgtggagcttcggcgtgctgctgatggaggtggtgacctacggcagagtgccctaccccggcatgagcaaccccgaggtgatcagaaacctggagagaggctacagaatgcccagacccgacacctgcccccccgagctgtacagaggcgtgatcgccgagtgctggagaagcagacccgaggagagacccaccttcgagttcctgcagagcgtgctggaggacttctacaccgccaccgagagacagtacgagctgcagccctga

SEQ ID NO: 7063 - RNA, 1518 nt, synthetic construct
  misc_feature 1..1518: note = derived and/or modified sequence opt5 fromBlk__Homo_sapiens__AAH07371
  source 1..1518: mol_type = other RNA
atgggcctggtgagctccaagaaacccgacaaggagaaacctatcaaggaaaaagataaggggcagtggtctccgctcaaggtcagcgcccaagacaaagatgctccccctctgccccctcttgttgtgttcaaccacctgacaccccctccgcccgacgagcatctcgatgaagacaagcactttgtggtcgccctgtacgattataccgcgatgaatgacagagatcttcagatgctgaaaggagagaagctccaggtgctgaaaggcacgggggactggtggctggctcggtccctcgttaccggacgcgaaggctacgtgccttctaacttcgtcgccagagtggagagcctggagatggaacggtggtttttccgctcccaggggagaaaggaggccgaacggcaacttctggctcccattaataaggccggatcttttctcatccgcgagagcgagacaaacaaaggcgctttctccctgagcgttaaggatgtgaccacacagggcgaacttattaaacattataagatcagatgcctggacgaagggggatactatatttctcctcggatcacctttccctccctccaggccctggtccagcactacagcaaaaagggcgatgggctgtgtcaacgcctcacactgccgtgcgtgagacctgcgccccagaatccttgggcccaggacgaatgggagatcccccggcagtctcttcgcctggtgagaaaactcggatccggccaattcggggaagtctggatgggatattacaagaacaatatgaaggttgctattaaaaccctgaaggagggcacgatgagccccgaggcctttcttggcgaagctaacgtgatgaaagccctgcagcatgagcggctcgtgcgcctgtacgcggtcgtgaccaaggaacctatctatattgttacagagtacatggccagagggtgtctgctcgacttcctgaaaaccgatgaaggatctcggctttccctgccgagactcatcgacatgagcgctcagattgccgagggcatggcttatatcgagcgcatgaactccattcaccgggatctgagagccgccaatatccttgtgtctgaagctctgtgctgtaagatcgcggactttgggctcgcccgcattatcgatagcgagtacacagctcaagaaggagccaagttccccattaaatggaccgcccctgaggctatccactttggcgtcttcacgattaaggccgacgtgtggtccttcggggttctgctgatggaagtggtcacatatggacgggtgccctaccctggcatgagcaatcccgaggtcatcagaaacctcgagcgcggctatcggatgccgagacctgatacctgtccccctgaactgtaccgcggggtgatcgcggagtgctggcggtctagacccgaggagcgccctacatttgagttccttcagtccgttctggaagacttttacaccgctaccgagcggcagtatgaactccagccctga

SEQ ID NO: 7064 - RNA, 1518 nt, synthetic construct
  misc_feature 1..1518: note = derived and/or modified sequence opt6 fromBlk__Homo_sapiens__AAH07371
  source 1..1518: mol_type = other RNA
atgggattagtatcatcaaaaaaaccagataaagaaaaaccaataaaagaaaaagataaaggacaatggagcccattaaaagtatcagcacaagacaaagacgcaccaccattaccacccctcgtggtgtttaatcaccttacaccccctccaccagatgaacacttagacgaagataaacattttgtcgtagcattatacgattatacagcaatgaacgacagagatctacaaatgctgaaaggagaaaaactacaagtactcaagggaacaggtgattggtggttagcgagatcattagtaacaggaagagaaggatatgtaccaagtaactttgtagcaagagtcgaaagtctagaaatggaacgatggttctttagatcacaaggaagaaaagaagcagagcgacaattattagcaccaataaataaagcaggaagcttcctcataagagaaagcgaaactaataaaggagcattttcattatcagtaaaagatgtaaccacacaaggagaactaataaaacattataaaataagatgcctagatgaaggcggatattacatatcaccacgcataacatttcccagtttacaagcactagtacagcattattcaaaaaaaggcgatggattatgccaaagactaacattaccatgtgtaagaccagcaccacagaacccatgggcacaagatgaatgggaaataccaagacaatcacttagattagtaagaaaattaggctccggacaatttggtgaagtatggatgggttactacaaaaataacatgaaagtagctatcaaaacattaaaagaaggtacaatgtcaccagaagccttcttaggagaagcaaatgtaatgaaagctctccaacacgaacgattagtgagactttacgcagtagtaacaaaagaaccaatatacatagtcacagaatatatggcaaggggatgtctcctagactttctaaaaacagatgaaggatcaagactatcactaccaagactaatagatatgagcgcacaaatagctgaaggcatggcctatattgaaagaatgaatagtatccatagagacttacgagcagcaaacatattagttagtgaagccttatgctgtaaaatagcagattttggactagcacgaataatagactcagaatacactgcacaggaaggtgctaaattcccaataaaatggacagctccggaagcaatacactttggagtatttacaataaaagcggacgtttggtcatttggagtcttactaatggaagtagtaacatatggaagagttccatatccaggaatgtcaaacccagaagtaataagaaacctagaaagaggatatagaatgccaagaccagatacatgtccaccagaattatacagaggcgttatagcggaatgctggagaagtaggcctgaagaaagaccaacatttgaatttttacaatcagtactagaagatttttacactgcaacagaaagacagtacgaattacaaccataa

SEQ ID NO: 7065 - protein, 277 aa, synthetic construct
  REGION 1..277: note = Caspase_3__Homo_sapiens__P42574
MENTENSVDSKSIKNLEPKIIHGSESMDSGISLDNSYKMDYPEMGLCIIINNKNFHKSTGMTSRSGTDVDAANLRETFRNLKYEVRNKNDLTREEIVELMRDVSKEDHSKRSSFVCVLLSHGEEGIIFGTNGPVDLKKITNFFRGDRCRSLTGKPKLFIIQACRGTELDCGIETDSGVDDDMACHKIPVEADFLYAYSTAPGYYSWRNSKDGSWFIQSLCAMLKQYADKLEFMHILTRVNRKVATEFESFSFDATFHAKKQIPCIVSMLTKELYFYH

SEQ ID NO: 7066 - RNA, 834 nt, synthetic construct
  misc_feature 1..834: note = Caspase_3__Homo_sapiens__AAA74929
  source 1..834: mol_type = other RNA
atggagaacactgaaaactcagtggattcaaaatccattaaaaatttggaaccaaagatcatacatggaagcgaatcaatggactctggaatatccctggacaacagttataaaatggattatcctgagatgggtttatgtataataattaataataagaattttcataaaagcactggaatgacatctcggtctggtacagatgtcgatgcagcaaacctcagggaaacattcagaaacttgaaatatgaagtcaggaataaaaatgatcttacacgtgaagaaattgtggaattgatgcgtgatgtttctaaagaagatcacagcaaaaggagcagttttgtttgtgtgcttctgagccatggtgaagaaggaataatttttggaacaaatggacctgttgacctgaaaaaaataacaaactttttcagaggggatcgttgtagaagtctaactggaaaacccaaacttttcattattcaggcctgccgtggtacagaactggactgtggcattgagacagacagtggtgttgatgatgacatggcgtgtcataaaataccagtggaggccgacttcttgtatgcatactccacagcacctggttattattcttggcgaaattcaaaggatggctcctggttcatccagtcgctttgtgccatgctgaaacagtatgccgacaagcttgaatttatgcacattcttacccgggttaaccgaaaggtggcaacagaatttgagtccttttcctttgacgctacttttcatgcaaagaaacagattccatgtattgtttccatgctcacaaaagaactctatttttatcactaa

SEQ ID NO: 7067 - RNA, 834 nt, synthetic construct
  misc_feature 1..834: note = derived and/or modified sequence opt1 fromCaspase_3__Homo_sapiens__AAA74929
  source 1..834: mol_type = other RNA
atggagaacaccgagaacagcgtggactccaagagcatcaagaacctggagcccaagatcatccacggctccgagagcatggactccgggatcagcctcgacaactcctacaagatggactacccggagatgggcctgtgcatcatcatcaacaacaagaacttccacaagagcaccgggatgacgtcccgcagcggcaccgacgtcgacgccgccaacctgcgggagaccttccgcaacctcaagtacgaggtgcggaacaagaacgacctgacccgcgaggagatcgtggagctgatgcgggacgtctccaaggaggaccacagcaagcgctccagcttcgtgtgcgtgctcctgtcccacggggaggagggcatcatcttcggcacgaacgggcccgtcgacctgaagaagatcaccaacttcttccggggcgaccgctgccggagcctcaccgggaagcccaagctgttcatcatccaggcgtgccgcggcaccgagctggactgcgggatcgagacggactccggcgtggacgacgacatggcctgccacaagatccccgtggaggccgacttcctctacgcctacagcaccgccccgggctactactcctggcggaacagcaaggacgggagctggttcatccagtccctgtgcgcgatgctgaagcagtacgccgacaagctcgagttcatgcacatcctgacccgcgtcaaccggaaggtggccaccgagttcgagagcttctccttcgacgccacgttccacgcgaagaagcagatcccctgcatcgtgagcatgctgaccaaggagctctacttctaccactga

SEQ ID NO: 7068 - RNA, 834 nt, synthetic construct
  misc_feature 1..834: note = derived and/or modified sequence opt2 fromCaspase_3__Homo_sapiens__AAA74929
  source 1..834: mol_type = other RNA
atggagaacaccgagaactccgtcgactccaagtccatcaagaacctcgagcccaagatcatccacggctccgagtccatggactccggcatctccctcgacaactcctacaagatggactaccccgagatgggcctctgcatcatcatcaacaacaagaacttccacaagtccaccggcatgacctcccgctccggcaccgacgtcgacgccgccaacctccgcgagaccttccgcaacctcaagtacgaggtccgcaacaagaacgacctcacccgcgaggagatcgtcgagctcatgcgcgacgtctccaaggaggaccactccaagcgctcctccttcgtctgcgtcctcctctcccacggcgaggagggcatcatcttcggcaccaacggccccgtcgacctcaagaagatcaccaacttcttccgcggcgaccgctgccgctccctcaccggcaagcccaagctcttcatcatccaggcctgccgcggcaccgagctcgactgcggcatcgagaccgactccggcgtcgacgacgacatggcctgccacaagatccccgtcgaggccgacttcctctacgcctactccaccgcccccggctactactcctggcgcaactccaaggacggctcctggttcatccagtccctctgcgccatgctcaagcagtacgccgacaagctcgagttcatgcacatcctcacccgcgtcaaccgcaaggtcgccaccgagttcgagtccttctccttcgacgccaccttccacgccaagaagcagatcccctgcatcgtctccatgctcaccaaggagctctacttctaccactga

SEQ ID NO: 7069 - RNA, 834 nt, synthetic construct
  misc_feature 1..834: note = derived and/or modified sequence opt3 fromCaspase_3__Homo_sapiens__AAA74929
  source 1..834: mol_type = other RNA
atggagaacaccgaaaatagcgtggactccaagtctatcaaaaacctggagcccaagattatacacggctcagaaagtatggatagcgggatctccctcgacaattcttacaaaatggattatcctgagatgggactttgcattatcattaacaataagaacttccataaatcgacaggtatgacttcaagaagcggcacggacgtcgatgccgctaatctgagggaaacctttcggaacttgaagtacgaggttcgcaataagaacgacttaacacgagaggaaatcgtggagctgatgcgtgatgtaagtaaagaagaccactccaagagatctagcttcgtgtgtgtcctactctcccatggggaggagggaataatctttggcactaatggtccagtggatctgaaaaagattaccaacttctttaggggagaccggtgccgctcacttacagggaaaccgaagctgttcatcattcaggcatgtagaggcaccgaattggattgcggcatcgagactgacagtggggttgatgacgacatggcctgtcacaagatacccgtggaagcggattttctctatgcttacagcacagcccctggatattactcttggaggaactccaaagacggttcatggttcattcaaagcctgtgcgcaatgctgaagcagtatgccgataaactcgagtttatgcatatcttaacccgggtcaatcgcaaggtggctacggagttcgaaagtttttctttcgacgcaacttttcacgccaaaaagcagattccatgtatcgtatccatgctgaccaaagagctttacttctaccactga

SEQ ID NO: 7070 - RNA, 834 nt, synthetic construct
  misc_feature 1..834: note = derived and/or modified sequence opt4 fromCaspase_3__Homo_sapiens__AAA74929
  source 1..834: mol_type = other RNA
atggagaacaccgagaacagcgtggacagcaagagcatcaagaacctggagcccaagatcatccacggcagcgagagcatggacagcggcatcagcctggacaacagctacaagatggactaccccgagatgggcctgtgcatcatcatcaacaacaagaacttccacaagagcaccggcatgaccagcagaagcggcaccgacgtggacgccgccaacctgagagagaccttcagaaacctgaagtacgaggtgagaaacaagaacgacctgaccagagaggagatcgtggagctgatgagagacgtgagcaaggaggaccacagcaagagaagcagcttcgtgtgcgtgctgctgagccacggcgaggagggcatcatcttcggcaccaacggccccgtggacctgaagaagatcaccaacttcttcagaggcgacagatgcagaagcctgaccggcaagcccaagctgttcatcatccaggcctgcagaggcaccgagctggactgcggcatcgagaccgacagcggcgtggacgacgacatggcctgccacaagatccccgtggaggccgacttcctgtacgcctacagcaccgcccccggctactacagctggagaaacagcaaggacggcagctggttcatccagagcctgtgcgccatgctgaagcagtacgccgacaagctggagttcatgcacatcctgaccagagtgaacagaaaggtggccaccgagttcgagagcttcagcttcgacgccaccttccacgccaagaagcagatcccctgcatcgtgagcatgctgaccaaggagctgtacttctaccactga

SEQ ID NO: 7071 - RNA, 834 nt, synthetic construct
  misc_feature 1..834: note = derived and/or modified sequence opt5 fromCaspase_3__Homo_sapiens__AAA74929
  source 1..834: mol_type = other RNA
atggagaacaccgaaaatagcgtggactccaagtctatcaaaaacctggagcccaagattatccacggcagcgaatccatggattctgggattagcctcgacaattcctacaaaatggattatcctgagatgggactgtgcatcattatcaacaataagaacttccataaatctacaggcatgacgagcagatccgggaccgacgtcgatgccgctaatcttcgggaaacatttcgcaacctgaagtacgaggttagaaataagaacgacctcacccgggaggaaatcgtggagctgatgcgcgatgtgagcaaagaagaccactctaagagatccagcttcgtctgtgtgcttctgtctcatggagaggagggcattatctttgggacaaatggaccggttgatctcaaaaagattaccaacttctttcggggcgaccgctgcagatccctgacaggcaaacccaagctgttcatcattcaggcctgtcgggggaccgaactcgattgcggaatcgagacggacagcggcgtggatgacgacatggcgtgtcacaagattcctgtcgaagctgattttctgtatgcctactctaccgcccccgggtattactcctggcgcaatagcaaagacggatcctggttcatccaatctctttgcgctatgctgaagcagtatgccgataaactcgagtttatgcatatcctgacaagagtgaaccggaaggttgctaccgaatttgagagcttctccttcgacgccacatttcacgcgaaaaagcagattccttgtatcgtgagcatgcttaccaaagagctgtacttctaccactga

SEQ ID NO: 7072 - RNA, 834 nt, synthetic construct
  misc_feature 1..834: note = derived and/or modified sequence opt6 fromCaspase_3__Homo_sapiens__AAA74929
  source 1..834: mol_type = other RNA
atggaaaacacagaaaatagcgtagactcaaaatcaataaaaaacctagaaccaaaaataatacacggatcagaatcaatggactcaggaataagcctagacaactcatacaaaatggattacccagaaatgggattatgcataataataaacaacaaaaacttccataaatcaacaggaatgacctcaagaagcggcacagacgtagacgcagcaaacctaagagaaacattcagaaacctaaaatacgaagtaagaaacaaaaacgacctaacaagagaagaaatagtagaactaatgagagacgtatcaaaagaagaccattccaaaagatcatcattcgtatgcgtactactaagccacggagaagaaggaataatattcggaaccaacggaccagtagacctaaaaaaaattaccaacttttttcgaggagacagatgccgatcactaaccggaaaaccaaaattattcataatacaagcatgcagaggcacagaactagactgcggaatagaaacagactcaggagtagacgacgacatggcatgccacaaaatacccgtagaagcagatttcctatatgcatacagtacagcaccaggatactattcatggagaaactcaaaagacggcagctggttcatacaatcactatgcgcaatgttaaaacaatacgcagacaaactagaattcatgcacatattaacaagagtaaacagaaaagtagcaacagaattcgaatcattcagcttcgacgcaacattccacgcaaaaaaacaaataccatgcatagtatcaatgctaacaaaagaactatacttctaccactaa

SEQ ID NO: 7073 - protein, 293 aa, synthetic construct
  REGION 1..293: note = Caspase_6__Homo_sapiens__P55212
MSSASGLRRGHPAGGEENMTETDAFYKREMFDPAEKYKMDHRRRGIALIFNHERFFWHLTLPERRGTCADRDNLTRRFSDLGFEVKCFNDLKAEELLLKIHEVSTVSHADADCFVCVFLSHGEGNHIYAYDAKIEIQTLTGLFKGDKCHSLVGKPKIFIIQACRGNQHDVPVIPLDVVDNQTEKLDTNITEVDAASVYTLPAGADFLMCYSVAEGYYSHRETVNGSWYIQDLCEMLGKYGSSLEFTELLTLVNRKVSQRRVDFCKDPSAIGKKQVPCFASMLTKKLHFFPKSN

SEQ ID NO: 7074 - RNA, 882 nt, synthetic construct
  misc_feature 1..882: note = Caspase_6__Homo_sapiens__AAH00305
  source 1..882: mol_type = other RNA
atgagctcggcctcggggctccgcagggggcacccggcaggtggggaagaaaacatgacagaaacagatgccttctataaaagagaaatgtttgatccggcagaaaagtacaaaatggaccacaggaggagaggaattgctttaatcttcaatcatgagaggttcttttggcacttaacactgccagaaaggcggggcacctgcgcagatagagacaatcttacccgcaggttttcagatctaggatttgaagtgaaatgctttaatgatcttaaagcagaagaactactgctcaaaattcatgaggtgtcaactgttagccacgcagatgccgattgctttgtgtgtgtcttcctgagccatggcgaaggcaatcacatttatgcatatgatgctaaaatcgaaattcagacattaactggcttgttcaaaggagacaagtgtcacagcctggttggaaaacccaagatatttatcattcaggcatgtcggggaaaccagcacgatgtgccagtcattcctttggatgtagtagataatcagacagagaagttggacaccaacataactgaggtggatgcagcctccgtttacacgctgcctgctggagctgacttcctcatgtgttactctgttgcagaaggatattattctcaccgggaaactgtgaacggctcatggtacattcaagatttgtgtgagatgttgggaaaatatggctcctccttagagttcacagaactcctcacactggtgaacaggaaagtttctcagcgccgagtggacttttgcaaagacccaagtgcaattggaaagaagcaggttccctgttttgcctcaatgctaactaaaaagctgcatttctttccaaaatctaattaa

SEQ ID NO: 7075 - RNA, 882 nt, synthetic construct
  misc_feature 1..882: note = derived and/or modified sequence opt1 fromCaspase_6__Homo_sapiens__AAH00305
  source 1..882: mol_type = other RNA
atgagctccgccagcggcctgcgccgggggcaccccgccggcggggaggagaacatgaccgagaccgacgcgttctacaagcgcgagatgttcgacccggccgagaagtacaagatggaccaccggcgccggggcatcgccctcatcttcaaccacgagcgcttcttctggcacctgacgctgcccgagcggcgcgggacctgcgccgaccgggacaacctcacccgccggttctccgacctgggcttcgaggtgaagtgcttcaacgacctgaaggccgaggagctcctgctgaagatccacgaggtgagcaccgtgtcccacgcggacgccgactgcttcgtgtgcgtcttcctcagccacggcgaggggaaccacatctacgcctacgacgccaagatcgagatccagacgctgaccggcctgttcaagggggacaagtgccactccctcgtgggcaagcccaagatcttcatcatccaggcgtgccgcgggaaccagcacgacgtgcccgtcatcccgctggacgtggtggacaaccagaccgagaagctggacaccaacatcacggaggtcgacgccgccagcgtgtacaccctccccgccggcgccgacttcctgatgtgctactccgtggcggagggctactacagccaccgggagaccgtcaacgggtcctggtacatccaggacctgtgcgagatgctcggcaagtacgggagctccctggagttcaccgagctgctcacgctggtgaaccgcaaggtgagccagcggcgcgtcgacttctgcaaggacccctccgccatcggcaagaagcaggtcccctgcttcgccagcatgctgaccaagaagctccacttcttcccgaagtccaactga

SEQ ID NO: 7076 - RNA, 882 nt, synthetic construct
  misc_feature 1..882: note = derived and/or modified sequence opt2 fromCaspase_6__Homo_sapiens__AAH00305
  source 1..882: mol_type = other RNA
atgtcctccgcctccggcctccgccgcggccaccccgccggcggcgaggagaacatgaccgagaccgacgccttctacaagcgcgagatgttcgaccccgccgagaagtacaagatggaccaccgccgccgcggcatcgccctcatcttcaaccacgagcgcttcttctggcacctcaccctccccgagcgccgcggcacctgcgccgaccgcgacaacctcacccgccgcttctccgacctcggcttcgaggtcaagtgcttcaacgacctcaaggccgaggagctcctcctcaagatccacgaggtctccaccgtctcccacgccgacgccgactgcttcgtctgcgtcttcctctcccacggcgagggcaaccacatctacgcctacgacgccaagatcgagatccagaccctcaccggcctcttcaagggcgacaagtgccactccctcgtcggcaagcccaagatcttcatcatccaggcctgccgcggcaaccagcacgacgtccccgtcatccccctcgacgtcgtcgacaaccagaccgagaagctcgacaccaacatcaccgaggtcgacgccgcctccgtctacaccctccccgccggcgccgacttcctcatgtgctactccgtcgccgagggctactactcccaccgcgagaccgtcaacggctcctggtacatccaggacctctgcgagatgctcggcaagtacggctcctccctcgagttcaccgagctcctcaccctcgtcaaccgcaaggtctcccagcgccgcgtcgacttctgcaaggacccctccgccatcggcaagaagcaggtcccctgcttcgcctccatgctcaccaagaagctccacttcttccccaagtccaactga

SEQ ID NO: 7077 - RNA, 882 nt, synthetic construct
  misc_feature 1..882: note = derived and/or modified sequence opt3 fromCaspase_6__Homo_sapiens__AAH00305
  source 1..882: mol_type = other RNA
atgagctccgcctctggccttagaagggggcaccccgctggaggtgaggaaaacatgaccgagacagacgcattctacaagcgggaaatgtttgatcctgccgagaaatataagatggaccatcgccgacgtggcatcgcgctcattttcaatcacgaaagatttttctggcatcttactctgccagagaggcgggggacgtgcgctgatcgcgacaacttgaccagaaggttttcagatttaggattcgaggtgaaatgttttaatgacctgaaggccgaggaactactcctgaaaatacacgaagtcagtacagttagccatgcagatgccgactgcttcgtgtgtgtatttctttcccacggcgagggtaaccacatctacgcttatgatgcaaagattgagatccagactctgaccgggttgttcaagggagacaaatgccattctctcgtgggcaagccgaaaatttttatcatacaagcctgtcggggcaatcagcacgatgtccccgtgatccctctggacgttgtggataaccagacagaaaagctggacaccaatattactgaggtcgacgctgcctcggtgtacacactcccagcgggggcagatttcttaatgtgctattcagtagccgaaggatactatagccatcgcgagaccgttaacggtagttggtacatccaggacctgtgtgaaatgcttggcaaatacgggtcctctttggagtttacggagctgctaactctcgtgaatcgaaaggtcagccaaagaagggtggatttctgcaaggacccctccgctattggaaagaaacaggtgccttgtttcgcctcaatgctgaccaaaaagctgcactttttcccaaaaagtaactga

SEQ ID NO: 7078 - RNA, 882 nt, synthetic construct
  misc_feature 1..882: note = derived and/or modified sequence opt4 fromCaspase_6__Homo_sapiens__AAH00305
  source 1..882: mol_type = other RNA
atgagcagcgccagcggcctgagaagaggccaccccgccggcggcgaggagaacatgaccgagaccgacgccttctacaagagagagatgttcgaccccgccgagaagtacaagatggaccacagaagaagaggcatcgccctgatcttcaaccacgagagattcttctggcacctgaccctgcccgagagaagaggcacctgcgccgacagagacaacctgaccagaagattcagcgacctgggcttcgaggtgaagtgcttcaacgacctgaaggccgaggagctgctgctgaagatccacgaggtgagcaccgtgagccacgccgacgccgactgcttcgtgtgcgtgttcctgagccacggcgagggcaaccacatctacgcctacgacgccaagatcgagatccagaccctgaccggcctgttcaagggcgacaagtgccacagcctggtgggcaagcccaagatcttcatcatccaggcctgcagaggcaaccagcacgacgtgcccgtgatccccctggacgtggtggacaaccagaccgagaagctggacaccaacatcaccgaggtggacgccgccagcgtgtacaccctgcccgccggcgccgacttcctgatgtgctacagcgtggccgagggctactacagccacagagagaccgtgaacggcagctggtacatccaggacctgtgcgagatgctgggcaagtacggcagcagcctggagttcaccgagctgctgaccctggtgaacagaaaggtgagccagagaagagtggacttctgcaaggaccccagcgccatcggcaagaagcaggtgccctgcttcgccagcatgctgaccaagaagctgcacttcttccccaagagcaactga

SEQ ID NO: 7079 - RNA, 882 nt, synthetic construct
  misc_feature 1..882: note = derived and/or modified sequence opt5 fromCaspase_6__Homo_sapiens__AAH00305
  source 1..882: mol_type = other RNA
atgagctccgcctctggacttagacgggggcaccccgctggaggcgaggaaaacatgaccgagacagacgccttctacaagcgcgaaatgtttgatcctgcggagaaatataagatggaccatagacggcgcgggatcgctctcattttcaatcacgaaagatttttctggcatctgacgcttccggagcggcgcggaacctgcgccgatagagacaacctgacacggcgctttagcgatctcggcttcgaggtgaaatgttttaatgacctgaaggccgaggaacttctgctcaaaatccacgaagtctccaccgtttctcatgctgatgccgactgcttcgtgtgtgtgtttctgagccacggggagggaaaccacatttacgcttatgatgccaagatcgagattcagacactgaccggcctcttcaagggcgacaaatgccattccctggtcgggaagcccaaaatctttatcattcaagcgtgtagaggaaatcagcacgatgtgcctgttatcccccttgacgtggtcgataaccagacagaaaagctggacaccaatattacggaggtggacgccgcttctgtttacaccctccctgccggcgctgatttcctgatgtgctatagcgtggccgaagggtactattcccatcgggagacagtcaacggaagctggtacatccaggacctttgtgaaatgctgggcaaatacgggtcttccctcgagtttaccgagctgctgacactcgtgaatcgcaaggtgagccaaagacgggtcgatttctgcaaggacccctctgcgattggcaaaaagcaggttccttgtttcgcctccatgctgaccaaaaagctgcactttttcccgaaaagcaactga

SEQ ID NO: 7080 - RNA, 882 nt, synthetic construct
  misc_feature 1..882: note = derived and/or modified sequence opt6 fromCaspase_6__Homo_sapiens__AAH00305
  source 1..882: mol_type = other RNA
atgagtagtgcatcaggactaagaagaggacatccagcaggaggagaagaaaacatgacagaaacagatgcattctacaaaagagaaatgttcgacccagcagaaaaatacaaaatggatcaccgaagaagaggaatagcattaatattcaatcacgaaagatttttttggcacttaacactaccagaaagaagaggaacatgcgcagacagagacaacctaacacgaagattttcagacttaggattcgaagtcaaatgcttcaatgacctaaaagcagaagaactactactaaaaatacacgaagtaagcacagtatcacacgcagatgcagactgcttcgtatgcgtatttttatcacacggtgaaggaaatcacatatacgcatacgacgcaaaaatagaaatacaaacactaacaggactatttaaaggagacaaatgccacagtttagtaggaaaaccaaaaatattcataatacaagcatgcagaggcaatcaacacgacgtaccagtaataccactagatgtagtagataaccaaacagaaaaactagacacaaacataaccgaagtagacgcagcaagcgtatacacactaccagcaggagcagatttcctaatgtgctactcagtagcagaaggatattactcacacagagaaacagtaaatggatcatggtacatacaagacctttgcgaaatgcttggaaaatatgggtcatcactagaattcacagaactattaacactagtaaatagaaaagtatcacaaagaagagtcgacttttgtaaagacccatcagcaatcggaaaaaaacaagtaccctgtttcgcaagcatgctaacaaaaaaattacacttcttccctaaatcaaactaa

SEQ ID NO: 7081 - protein, 303 aa, synthetic construct
  REGION 1..303: note = Caspase_7__Homo_sapiens__P55210
MADDQGCIEEQGVEDSANEDSVDAKPDRSSFVPSLFSKKKKNVTMRSIKTTRDRVPTYQYNMNFEKLGKCIIINNKNFDKVTGMGVRNGTDKDAEALFKCFRSLGFDVIVYNDCSCAKMQDLLKKASEEDHTNAACFACILLSHGEENVIYGKDGVTPIKDLTAHFRGDRCKTLLEKPKLFFIQACRGTELDDGIQADSGPINDTDANPRYKIPVEADFLFAYSTVPGYYSWRSPGRGSWFVQALCSILEEHGKDLEIMQILTRVNDRVARHFESQSDDPHFHEKKQIPCVVSMLTKELYFSQ

SEQ ID NO: 7082 - RNA, 912 nt, synthetic construct
  misc_feature 1..912: note = Caspase_7__Homo_sapiens__AAC50303
  source 1..912: mol_type = other RNA
atggcagatgatcagggctgtattgaagagcagggggttgaggattcagcaaatgaagattcagtggatgctaagccagaccggtcctcgtttgtaccgtccctcttcagtaagaagaagaaaaatgtcaccatgcgatccatcaagaccacccgggaccgagtgcctacatatcagtacaacatgaattttgaaaagctgggcaaatgcatcataataaacaacaagaactttgataaagtgacaggtatgggcgttcgaaacggaacagacaaagatgccgaggcgctcttcaagtgcttccgaagcctgggttttgacgtgattgtctataatgactgctcttgtgccaagatgcaagatctgcttaaaaaagcttctgaagaggaccatacaaatgccgcctgcttcgcctgcatcctcttaagccatggagaagaaaatgtaatttatgggaaagatggtgtcacaccaataaaggatttgacagcccactttaggggggatagatgcaaaacccttttagagaaacccaaactcttcttcattcaggcttgccgagggaccgagcttgatgatggcatccaggccgactcggggcccatcaatgacacagatgctaatcctcgatacaagatcccagtggaagctgacttcctcttcgcctattccacggttccaggctattactcgtggaggagcccaggaagaggctcctggtttgtgcaagccctctgctccatcctggaggagcacggaaaagacctggaaatcatgcagatcctcaccagggtgaatgacagagttgccaggcactttgagtctcagtctgatgacccacacttccatgagaagaagcagatcccctgtgtggtctccatgctcaccaaggaactctacttcagtcaatag

SEQ ID NO: 7083 - RNA, 912 nt, synthetic construct
  misc_feature 1..912: note = derived and/or modified sequence opt1 fromCaspase_7__Homo_sapiens__AAC50303
  source 1..912: mol_type = other RNA
atggccgacgaccagggctgcatcgaggagcagggggtggaggacagcgccaacgaggactccgtcgacgcgaagcccgaccgcagctccttcgtgccgagcctgttctccaagaagaagaagaacgtgaccatgcggagcatcaagaccacgcgcgaccgggtccccacctaccagtacaacatgaacttcgagaagctcggcaagtgcatcatcatcaacaacaagaacttcgacaaggtgaccgggatgggcgtgcgcaacgggaccgacaaggacgccgaggccctgttcaagtgcttccggtccctgggcttcgacgtcatcgtgtacaacgactgcagctgcgccaagatgcaggacctcctgaagaaggcctccgaggaggaccacacgaacgcggcctgcttcgcctgcatcctgctcagccacggcgaggagaacgtgatctacgggaaggacggcgtcacccccatcaaggacctgaccgcccacttccgcggggaccggtgcaagaccctgctcgagaagcccaagctgttcttcatccaggcgtgccgcggcacggagctggacgacgggatccaggccgactccggcccgatcaacgacaccgacgccaacccccggtacaagatccccgtggaggccgacttcctcttcgcctacagcaccgtgcccggctactactcctggcgcagcccggggcggggctcctggttcgtccaggcgctgtgcagcatcctggaggagcacgggaaggacctcgagatcatgcagatcctgacccgcgtgaacgaccgggtggcccgccacttcgagtcccagagcgacgacccccacttccacgagaagaagcagatcccctgcgtcgtgtccatgctgacgaaggagctctacttcagccagtga

SEQ ID NO: 7084 - RNA, 912 nt, synthetic construct
  misc_feature 1..912: note = derived and/or modified sequence opt2 fromCaspase_7__Homo_sapiens__AAC50303
  source 1..912: mol_type = other RNA
atggccgacgaccagggctgcatcgaggagcagggcgtcgaggactccgccaacgaggactccgtcgacgccaagcccgaccgctcctccttcgtcccctccctcttctccaagaagaagaagaacgtcaccatgcgctccatcaagaccacccgcgaccgcgtccccacctaccagtacaacatgaacttcgagaagctcggcaagtgcatcatcatcaacaacaagaacttcgacaaggtcaccggcatgggcgtccgcaacggcaccgacaaggacgccgaggccctcttcaagtgcttccgctccctcggcttcgacgtcatcgtctacaacgactgctcctgcgccaagatgcaggacctcctcaagaaggcctccgaggaggaccacaccaacgccgcctgcttcgcctgcatcctcctctcccacggcgaggagaacgtcatctacggcaaggacggcgtcacccccatcaaggacctcaccgcccacttccgcggcgaccgctgcaagaccctcctcgagaagcccaagctcttcttcatccaggcctgccgcggcaccgagctcgacgacggcatccaggccgactccggccccatcaacgacaccgacgccaacccccgctacaagatccccgtcgaggccgacttcctcttcgcctactccaccgtccccggctactactcctggcgctcccccggccgcggctcctggttcgtccaggccctctgctccatcctcgaggagcacggcaaggacctcgagatcatgcagatcctcacccgcgtcaacgaccgcgtcgcccgccacttcgagtcccagtccgacgacccccacttccacgagaagaagcagatcccctgcgtcgtctccatgctcaccaaggagctctacttctcccagtga

SEQ ID NO: 7085 - RNA, 912 nt, synthetic construct
  misc_feature 1..912: note = derived and/or modified sequence opt3 fromCaspase_7__Homo_sapiens__AAC50303
  source 1..912: mol_type = other RNA
atggccgacgatcagggctgcatcgaggaacaaggggtggaggacagcgctaacgaagattccgtcgacgcaaagcccgatagatcttcattcgttcctagtctgtttagcaaaaagaaaaagaatgtgaccatgaggtccattaaaacaactcgggaccgcgtaccaacgtaccagtataacatgaatttcgagaagctcggaaagtgtataatcattaacaataaaaactttgataaggtgaccggtatgggcgtccgaaatgggacagacaaagatgccgaagcgcttttcaagtgctttcgttctctgggattcgacgtgatcgtttacaacgattgttcgtgcgctaaaatgcaggacttgttaaagaaggcctcagaggaggatcacactaatgcagcctgttttgcttgcattctgctaagccatggcgaagagaacgtgatctatggtaaagacggggtcaccccgataaaggacctcacagcacacttcagaggagataggtgtaaaaccctgcttgaaaagcccaaactgtttttcatccaggcctgccggggcactgagttggacgatggcattcaagctgacagtgggcctatcaatgatacagacgccaacccacgctacaagattcccgtggaggcggattttctcttcgcatattccaccgtacctggatactattcttggagaagcccaggtaggggctcctggtttgttcaggccctgtgttcaatcctggaggaacatgggaaagacctcgaaataatgcagattttaacgcgggtgaatgatcgcgtcgctcgacacttcgagagtcagagcgacgatccccatttccacgaaaagaagcaaatcccttgcgtggtgtctatgctgactaaagagctttacttttcccagtga

SEQ ID NO: 7086 - RNA, 912 nt, synthetic construct
  misc_feature 1..912: note = derived and/or modified sequence opt4 fromCaspase_7__Homo_sapiens__AAC50303
  source 1..912: mol_type = other RNA
atggccgacgaccagggctgcatcgaggagcagggcgtggaggacagcgccaacgaggacagcgtggacgccaagcccgacagaagcagcttcgtgcccagcctgttcagcaagaagaagaagaacgtgaccatgagaagcatcaagaccaccagagacagagtgcccacctaccagtacaacatgaacttcgagaagctgggcaagtgcatcatcatcaacaacaagaacttcgacaaggtgaccggcatgggcgtgagaaacggcaccgacaaggacgccgaggccctgttcaagtgcttcagaagcctgggcttcgacgtgatcgtgtacaacgactgcagctgcgccaagatgcaggacctgctgaagaaggccagcgaggaggaccacaccaacgccgcctgcttcgcctgcatcctgctgagccacggcgaggagaacgtgatctacggcaaggacggcgtgacccccatcaaggacctgaccgcccacttcagaggcgacagatgcaagaccctgctggagaagcccaagctgttcttcatccaggcctgcagaggcaccgagctggacgacggcatccaggccgacagcggccccatcaacgacaccgacgccaaccccagatacaagatccccgtggaggccgacttcctgttcgcctacagcaccgtgcccggctactacagctggagaagccccggcagaggcagctggttcgtgcaggccctgtgcagcatcctggaggagcacggcaaggacctggagatcatgcagatcctgaccagagtgaacgacagagtggccagacacttcgagagccagagcgacgacccccacttccacgagaagaagcagatcccctgcgtggtgagcatgctgaccaaggagctgtacttcagccagtga

SEQ ID NO: 7087 - RNA, 912 nt, synthetic construct
  misc_feature 1..912: note = derived and/or modified sequence opt5 fromCaspase_7__Homo_sapiens__AAC50303
  source 1..912: mol_type = other RNA
atggccgacgatcagggctgcatcgaggaacaaggggtggaggacagcgctaacgaagattccgtcgacgccaagcccgatagatctagcttcgttccttccctgttttctaaaaagaaaaagaatgtgaccatgcggagcattaaaacaacgcgcgacagagtgccgacctaccagtataacatgaatttcgagaagctcggaaagtgtatcattatcaacaataaaaactttgataaggtcacaggcatgggggtgcggaatggaaccgacaaagatgcggaagctctgttcaagtgctttcgctcccttggcttcgacgttattgtgtacaacgattgttcttgcgccaaaatgcaggacctgctcaagaaggccagcgaggaggatcacacaaatgctgcctgttttgcttgcatcctgctttcccatggggaagagaacgtcatctatggaaaagacggcgtgacccccattaaggacctgacagcccacttcagaggcgatcggtgtaaaaccctcctggaaaagcctaaactgtttttcatccaggcgtgccgcgggacggagctcgacgatggcattcaagccgacagcggacccatcaatgataccgacgctaaccctagatacaagattcccgttgaggccgattttctgttcgcttattctacagtgcctgggtactattcctggcggagcccgggacgcggctcttggtttgtccaggccctttgttccatcctggaggaacatgggaaagacctcgaaattatgcagatcctgaccagagtgaatgatcgggtggcgcgccacttcgagagccagtctgacgatccccatttccacgaaaagaagcaaatcccttgcgtcgtttccatgcttacaaaagagctgtactttagccagtga

SEQ ID NO: 7088 - RNA, 912 nt, synthetic construct
  misc_feature 1..912: note = derived and/or modified sequence opt6 fromCaspase_7__Homo_sapiens__AAC50303
  source 1..912: mol_type = other RNA
atggctgatgaccaaggatgcatcgaagaacaaggagtagaagactcagcaaatgaagacagcgtagacgcaaaaccagacagatcatcattcgtaccatcacttttcagcaaaaaaaaaaaaaacgtaacaatgagatcaataaaaacaacaagagacagagtaccaacataccaatataacatgaattttgaaaaactaggaaaatgcataataataaacaacaaaaacttcgacaaagtaacaggcatgggagtaagaaacggaacagacaaagacgccgaagcactattcaaatgcttcagatccctaggattcgacgtaatagtctacaacgactgctcatgtgccaaaatgcaagacctattaaaaaaagcatcagaagaagatcacacaaacgcagcatgctttgcatgtatactactaagccacggagaagaaaacgtaatatacggaaaagacggagttacacccataaaagatttaacagcacacttcagaggtgacagatgcaaaacactactagaaaaaccaaaactcttcttcatacaagcatgcagaggaacagaattagacgacggaatacaagcagactcaggacccataaacgacacagacgcaaatccaagatacaaaataccagtagaagcagatttcctattcgcatacagcacagtaccaggatactactcatggagatcaccaggaagaggatcatggttcgtacaagcactatgttcaatactagaagaacacggaaaagacttagaaataatgcaaatactaacaagagttaacgacagagtagcaagacacttcgaatcacaaagcgacgacccccatttccacgaaaaaaaacaaataccatgtgtagtaagtatgctaacaaaagaattatacttctcacaataa

SEQ ID NO: 7089 - protein, 464 aa, synthetic construct [sequence omitted]

SEQ ID NO: 7090 - RNA, 1395 nt, synthetic construct
  misc_feature 1..1395: note = Caspase_8__Homo_sapiens__BAG70096
  source 1..1395: mol_type = other RNA
atggacttcagcagaaatctttatgatattggggaacaactggacagtgaagatctggcctccctcaagttcctgagcctggactacattccgcaaaggaagcaagaacccatcaaggatgccttgatgttattccagagactccaggaaaagagaatgttggaggaaagcaatctgtccttcctgagggagctgctcttccgaattaatagactggatttgctgattacctacctaaacactagaaaggaggagatggaaagggaacttcagacaccaggcagggctcaaatttctgcctacagggtcatgctctatcagatttcagaagaagtgagcagatcagaattgaggtcttttaagtttcttttgcaagaggaaatctccaaatgcaaactggatgatgacatgaacctgctggatattttcatagagatggagaagagggtcatcctgggagaaggaaagttggacatcctgaaaagagtctgtgcccaaatcaacaagagcctgctgaagataatcaacgactatgaagaattcagcaaaggggaggagttgtgtggggtaatgacaatctcggactctccaagagaacaggatagtgaatcacagactttggacaaagtttaccaaatgaaaagcaaacctcggggatactgtctgatcatcaacaatcacaattttgcaaaagcacgggagaaagtgcccaaacttcacagcattagggacaggaatggaacacacttggatgcaggggctttgaccacgacctttgaagagcttcattttgagatcaagccccacgatgactgcacagtagagcaaatctatgagattttgaaaatctaccaactcatggaccacagtaacatggactgcttcatctgctgtatcctctcccatggagacaagggcatcatctatggcactgatggacaggaggcccccatctatgagctgacatctcagttcactggtttgaagtgcccttcccttgctggaaaacccaaagtgttttttattcaggcttgtcagggggataactaccagaaaggtatacctgttgagactgattcagaggagcaaccctatttagaaatggatttatcatcacctcaaacgagatatatcccggatgaggctgactttctgctggggatggccactgtgaataactgtgtttcctaccgaaaccctgcagagggaacctggtacatccagtcactttgccagagcctgggagagcgatgtcctcgaggcgatgatattctcaccatcctgactgaagtgaactatgaagtaagcaacaaggatgacaagaaaaacatggggaaacagatgcctcagcctacttgcacactaagaaaaaaacttgtcttcccttctgattaa

SEQ ID NO: 7091 - RNA, 1395 nt, synthetic construct
  misc_feature 1..1395: note = derived and/or modified sequence opt1 fromCaspase_8__Homo_sapiens__BAG70096
  source 1..1395: mol_type = other RNA
atggacttcagccgcaacctgtacgacatcggcgagcagctcgactccgaggacctggccagcctgaagttcctctccctggactacatcccccagcggaagcaggagccgatcaaggacgccctgatgctgttccagcgcctgcaggagaagcggatgctggaggagagcaacctctccttcctgcgcgagctcctcttccggatcaaccgcctggacctgctcatcacctacctgaacacccggaaggaggagatggagcgcgagctgcagacgcccgggcgggcgcagatcagcgcctaccgcgtgatgctctaccagatctccgaggaggtcagccggtccgagctgcgcagcttcaagttcctgctccaggaggagatctccaagtgcaagctggacgacgacatgaacctgctcgacatcttcatcgagatggagaagcgggtgatcctgggcgaggggaagctggacatcctcaagcgcgtgtgcgcccagatcaacaagagcctgctgaagatcatcaacgactacgaggagttctccaagggcgaggagctctgcggggtcatgaccatcagcgacagcccccgggagcaggacagcgagtcccagaccctggacaaggtgtaccagatgaagtccaagccccgcggctactgcctgatcatcaacaaccacaacttcgccaaggcccgggagaaggtgccgaagctccactccatccgcgaccggaacggcacccacctggacgcgggggccctgacgaccaccttcgaggagctccacttcgagatcaagccccacgacgactgcaccgtcgagcagatctacgagatcctgaagatctaccagctgatggaccacagcaacatggactgcttcatctgctgcatcctcagccacggcgacaaggggatcatctacggcacggacgggcaggaggcccccatctacgagctgacctcccagttcaccggcctgaagtgccccagcctcgccggcaagccgaaggtgttcttcatccaggcgtgccagggggacaactaccagaagggcatccccgtggagaccgactccgaggagcagccctacctggagatggacctgagcagcccccagacgcgctacatcccggacgaggccgacttcctcctggggatggccaccgtcaacaactgcgtgtcctaccggaaccccgccgagggcacctggtacatccagtccctgtgccagagcctcggcgagcgctgcccccgcggggacgacatcctgaccatcctgacggaggtgaactacgaggtctccaacaaggacgacaagaagaacatgggcaagcagatgccccagccgacctgcaccctgcggaagaagctcgtgttccccagcgactga

SEQ ID NO: 7092 - RNA, 1395 nt, synthetic construct
  misc_feature 1..1395: note = derived and/or modified sequence opt2 fromCaspase_8__Homo_sapiens__BAG70096
  source 1..1395: mol_type = other RNA
atggacttctcccgcaacctctacgacatcggcgagcagctcgactccgaggacctcgcctccctcaagttcctctccctcgactacatcccccagcgcaagcaggagcccatcaaggacgccctcatgctcttccagcgcctccaggagaagcgcatgctcgaggagtccaacctctccttcctccgcgagctcctcttccgcatcaaccgcctcgacctcctcatcacctacctcaacacccgcaaggaggagatggagcgcgagctccagacccccggccgcgcccagatctccgcctaccgcgtcatgctctaccagatctccgaggaggtctcccgctccgagctccgctccttcaagttcctcctccaggaggagatctccaagtgcaagctcgacgacgacatgaacctcctcgacatcttcatcgagatggagaagcgcgtcatcctcggcgagggcaagctcgacatcctcaagcgcgtctgcgcccagatcaacaagtccctcctcaagatcatcaacgactacgaggagttctccaagggcgaggagctctgcggcgtcatgaccatctccgactccccccgcgagcaggactccgagtcccagaccctcgacaaggtctaccagatgaagtccaagccccgcggctactgcctcatcatcaacaaccacaacttcgccaaggcccgcgagaaggtccccaagctccactccatccgcgaccgcaacggcacccacctcgacgccggcgccctcaccaccaccttcgaggagctccacttcgagatcaagccccacgacgactgcaccgtcgagcagatctacgagatcctcaagatctaccagctcatggaccactccaacatggactgcttcatctgctgcatcctctcccacggcgacaagggcatcatctacggcaccgacggccaggaggcccccatctacgagctcacctcccagttcaccggcctcaagtgcccctccctcgccggcaagcccaaggtcttcttcatccaggcctgccagggcgacaactaccagaagggcatccccgtcgagaccgactccgaggagcagccctacctcgagatggacctctcctccccccagacccgctacatccccgacgaggccgacttcctcctcggcatggccaccgtcaacaactgcgtctcctaccgcaaccccgccgagggcacctggtacatccagtccctctgccagtccctcggcgagcgctgcccccgcggcgacgacatcctcaccatcctcaccgaggtcaactacgaggtctccaacaaggacgacaagaagaacatgggcaagcagatgccccagcccacctgcaccctccgcaagaagctcgtcttcccctccgactga

SEQ ID NO: 7093 - RNA, 1395 nt, synthetic construct
  misc_feature 1..1395: note = derived and/or modified sequence opt3 fromCaspase_8__Homo_sapiens__BAG70096
  source 1..1395: mol_type = other RNA
atggacttcagcagaaacctgtacgatatcggcgagcagctcgactccgaagatcttgcctctctgaagtttttgtcattagactatattccccaaaggaaacaggagcctataaaggatgctctgatgctattccagcggctccaggaaaaacgcatgctggaggaaagtaatcttagctttctgcgagagctcttgttccgtatcaacagactggacctgctcattacctacttaaatacaaggaaggaggaaatggagcgggaactgcaaactccagggcgcgcacagatctccgcctatagagtgatgctttaccagatttctgaggaggtctcgaggtcagaattgcggagctttaaattcctgctacaggaggaaatcagtaagtgcaagctcgatgacgatatgaacctgcttgacatatttatcgagatggaaaaacgcgttattctgggagagggtaagttggatatcctcaaacgagtgtgtgcgcaaattaataagtccctgttaaaaatcataaacgactatgaggagttctctaagggcgaggaactgtgcggggtaatgacgattagcgattccccgagagagcaggactcagaaagtcagaccctcgacaaggtgtaccagatgaaaagcaagcccaggggatattgtcttatcattaataaccacaattttgctaaagcccgggagaaggtccctaaactgcattctatccgtgatcgcaacggcacacacttggacgccggtgcactaactaccacattcgaggaactgcattttgagatcaagccacacgatgactgcaccgtggaacaaatttacgagatactcaaaatctaccagctgatggatcattccaatatggactgtttcatttgctgtatcctttcacacggggataagggaataatttatggcactgacggccaggaagctcccatctacgagctgacaagccaatttaccgggttgaagtgccctagtctcgcaggaaaaccaaaggttttcttcatccaggcctgtcagggtgataactatcagaaaggcattcccgtggagacggactctgaagaacaaccttacctggaaatggatttatccagcccacagactagatatatcccggacgaggctgactttctgctagggatggccaccgtcaataactgcgtgtcgtacaggaatcccgcggagggaacatggtatattcagtctctctgtcagtccctgggcgaacggtgccctcgaggtgatgacatacttactatcttgaccgaggtaaactacgaagtttcaaacaaggatgacaaaaagaatatggggaagcaaatgccacagcccacatgcaccctgcgcaaaaagctcgtgttccctagtgattga

SEQ ID NO: 7094 - RNA, 1395 nt, synthetic construct
  misc_feature 1..1395: note = derived and/or modified sequence opt4 fromCaspase_8__Homo_sapiens__BAG70096
  source 1..1395: mol_type = other RNA
atggacttcagcagaaacctgtacgacatcggcgagcagctggacagcgaggacctggccagcctgaagttcctgagcctggactacatcccccagagaaagcaggagcccatcaaggacgccctgatgctgttccagagactgcaggagaagagaatgctggaggagagcaacctgagcttcctgagagagctgctgttcagaatcaacagactggacctgctgatcacctacctgaacaccagaaaggaggagatggagagagagctgcagacccccggcagagcccagatcagcgcctacagagtgatgctgtaccagatcagcgaggaggtgagcagaagcgagctgagaagcttcaagttcctgctgcaggaggagatcagcaagtgcaagctggacgacgacatgaacctgctggacatcttcatcgagatggagaagagagtgatcctgggcgagggcaagctggacatcctgaagagagtgtgcgcccagatcaacaagagcctgctgaagatcatcaacgactacgaggagttcagcaagggcgaggagctgtgcggcgtgatgaccatcagcgacagccccagagagcaggacagcgagagccagaccctggacaaggtgtaccagatgaagagcaagcccagaggctactgcctgatcatcaacaaccacaacttcgccaaggccagagagaaggtgcccaagctgcacagcatcagagacagaaacggcacccacctggacgccggcgccctgaccaccaccttcgaggagctgcacttcgagatcaagccccacgacgactgcaccgtggagcagatctacgagatcctgaagatctaccagctgatggaccacagcaacatggactgcttcatctgctgcatcctgagccacggcgacaagggcatcatctacggcaccgacggccaggaggcccccatctacgagctgaccagccagttcaccggcctgaagtgccccagcctggccggcaagcccaaggtgttcttcatccaggcctgccagggcgacaactaccagaagggcatccccgtggagaccgacagcgaggagcagccctacctggagatggacctgagcagcccccagaccagatacatccccgacgaggccgacttcctgctgggcatggccaccgtgaacaactgcgtgagctacagaaaccccgccgagggcacctggtacatccagagcctgtgccagagcctgggcgagagatgccccagaggcgacgacatcctgaccatcctgaccgaggtgaactacgaggtgagcaacaaggacgacaagaagaacatgggcaagcagatgccccagcccacctgcaccctgagaaagaagctggtgttccccagcgactga

SEQ ID NO: 7095 - RNA, 1395 nt, synthetic construct
  misc_feature 1..1395: note = derived and/or modified sequence opt5 fromCaspase_8__Homo_sapiens__BAG70096
  source 1..1395: mol_type = other RNA
atggacttcagcagaaacctgtacgatatcggcgagcagctcgactccgaagatctggcctctcttaagtttctgagcctcgactatattccccaacggaaacaggagcctatcaaggatgctctgatgcttttccagcgcctgcaggagaaaagaatgctcgaggaatccaatctgtcttttctgcgggagctcctgttccgcattaacagacttgacctgctcatcacctacctgaatacacggaaggaggaaatggagcgcgaacttcaaacgccggggagagcccagattagcgcgtatcgggtgatgctgtaccagatctccgaggaggtctctcgcagcgaactcagatcctttaaattcctgctgcaggaggaaatcagcaagtgcaagctcgatgacgatatgaacctgcttgacatttttatcgagatggaaaaacgggttattctgggagagggcaagctcgatatcctgaaacgcgtgtgtgctcaaattaataagtctcttctgaaaatcattaacgactatgaggagttctccaagggggaagaactctgcggagtgatgaccatcagcgattctcccagagagcaggactccgaaagccagacactggacaaggtctaccagatgaaatctaagcctcggggctattgtctgatcattaataaccacaattttgccaaagcccgcgagaaggtgcccaaactccattccatcagagatcggaacgggacccacctggacgctggagcccttacaaccacattcgaggaactgcattttgagattaagcctcacgatgactgcaccgttgaacaaatctacgagattctcaaaatctaccagctgatggatcatagcaatatggactgtttcatctgctgtattctttcccacggcgataagggcatcatttatgggacggacggacaggaagctcccatctacgagctgacctctcaatttacaggcctcaagtgccctagcctggccgggaaaccgaaggtgttcttcattcaggcgtgtcagggagataactatcagaaaggcatccccgtcgagaccgactccgaagaacaaccttacctggaaatggatctcagctctccccagacaagatatatccctgacgaggccgactttctgcttgggatggctaccgtgaataactgcgtttcctaccgcaatcccgccgagggaacgtggtatattcagagcctgtgtcagtctctcggcgaacggtgcccgagaggcgatgacatcctgacaattctgaccgaggtgaactacgaagtcagcaacaaggatgacaaaaagaatatggggaagcaaatgcctcagcccacatgcacccttcgcaaaaagctcgtgttcccttccgattga

SEQ ID NO: 7096 - RNA, 1395 nt, synthetic construct
  misc_feature 1..1395: note = derived and/or modified sequence opt6 fromCaspase_8__Homo_sapiens__BAG70096
  source 1..1395: mol_type = other RNA
atggacttctccagaaacttatacgacataggagaacaattagattctgaagacctcgcctcactaaaattcctatcattagactatataccacaaagaaaacaagaacctataaaagatgcattaatgctcttccaaagattacaagaaaaacgaatgctagaagaaagtaacttatcattcttaagggaactattattccgcataaaccgtctagaccttctaataacatatctaaacactagaaaagaagaaatggaacgagaactacaaacaccaggaagagcacaaatatcagcatatagagtaatgttatatcaaataagcgaagaagtaagtagatcagaattaagaagcttcaaattcttactacaagaagaaatatcaaaatgtaaactcgacgacgatatgaatttactagacatattcatcgaaatggaaaaaagagtaatactaggcgaaggaaaactagacatattaaaacgagtatgtgcacaaatcaataaatcgctattaaaaattataaacgattacgaagaattcagcaaaggcgaagaactatgcggagtaatgacaatatcagactcaccaagagaacaagactcagaatcacaaactctagacaaagtttatcaaatgaaatccaaaccacgaggatattgcctaataataaacaatcacaacttcgcaaaagccagagaaaaagtaccaaaactccactcaataagagacagaaacggaacacacctagacgccggagcactaacaaccacattcgaagaactacacttcgaaataaaaccacacgacgactgtaccgtagaacaaatatatgaaatattaaaaatctaccaattaatggatcactcaaatatggactgcttcatatgctgcatcttgtcacacggagacaaagggatcatttacggaacagacggacaagaagcaccaatatacgaactaacctcacaattcacaggactcaaatgcccatcattagcaggcaaaccaaaagtctttttcatccaagcatgccaaggcgataattaccaaaaaggaataccagtagaaacagacagcgaagaacaaccatacctagaaatggatctctcatcaccccaaacaagatatataccagatgaagcagacttcctactaggcatggcaactgtaaacaactgcgtaagctacagaaacccagcggaaggaacctggtacatacaatctctatgccaatcattaggagaaagatgcccaagaggagacgacatactaacaattttaacagaagtaaactatgaagtatccaataaagacgataaaaaaaatatgggtaaacaaatgccacaaccaacatgcaccctaagaaaaaaattagtattccctagtgattaa

SEQ ID NO: 7097 - protein, 395 aa, synthetic construct [sequence omitted]

SEQ ID NO: 7098 - RNA, 1188 nt, synthetic construct
  misc_feature 1..1188: note = Caspase_8__Homo_sapiens__ABX09989
  source 1..1188: mol_type = other RNA
atggacttcagcagaaatctttatgatattggggaacaactggacagtgaagatctggcctccctcaagttcctgagcctggactacattccgcaaaggaagcaagaacccatcaaggatgccttgatgttattccagagactccaggaaaagagaatgttggaggaaagcaatctgtccttcctgaaggagctgctcttccgaattaatagactggatttgctgattacctacctaaacactagaaaggaggagatggaaagggaacttcagacaccaggcagggctcaaatttctgcctacagggtcatgctctatcagatttcagaagaagtgagcagatcagaattgaggtcttttaagtttcttttgcaagaggaaatctccaaatgcaaactggatgatgacatgaacctgctggatattttcatagagatggagaagagggtcatcctgggagaaggaaagttggacatcctgaaaagagtctgtgcccaaatcaacaagagcctgctgaagataatcaacgactatgaagaattcagcaaaggggctttgaccacgacctttgaagagcttcattttgagatcaagccccaccatgactgcacagtagagcaaatctatgagattttgaaaatctaccaactcatggaccacagtaacatggactgcttcatctgctgtatcctctcccatggagacaagggcatcatctatggcactgatggacaggaggcccccatctatgagctgacatctcagttcactggtttgaagtgcccttcccttgctggaaaacccaaagtgttttttattcaggcttgtcagggggataactaccagaaaggtatacctgttgagactgattcagaggagcaaccctatttagaaatggatttatcatcacctcaaacgagatatatcccggatgaggctgactttctgctggggatggccactgtgaataactgtgtttcctaccgaaaccctgcagagggaacctggtacatccagtcactttgccagagcctgagagagcgatgtcctcgaggcgatgatattctcaccatcctgactgaagtgaactatgaagtaagcaacaaggatgacaagaaaaacatggggaaacagatgcctcagcctactttcacactaagaaaaaaacttgtcttcccttctgattga

SEQ ID NO: 7099 - RNA, 1188 nt, synthetic construct
  misc_feature 1..1188: note = derived and/or modified sequence opt1 fromCaspase_8__Homo_sapiens__ABX09989
  source 1..1188: mol_type = other RNA
atggacttcagccgcaacctgtacgacatcggcgagcagctcgactccgaggacctggccagcctgaagttcctctccctggactacatcccccagcggaagcaggagccgatcaaggacgccctgatgctgttccagcgcctgcaggagaagcggatgctggaggagagcaacctctccttcctgaaggagctcctcttccgcatcaaccggctggacctgctcatcacctacctgaacacccgcaaggaggagatggagcgggagctgcagacgcccgggcgcgcgcagatcagcgcctaccgggtgatgctctaccagatctccgaggaggtcagccgctccgagctgcggagcttcaagttcctgctccaggaggagatctccaagtgcaagctggacgacgacatgaacctgctcgacatcttcatcgagatggagaagcgcgtgatcctgggcgaggggaagctggacatcctcaagcgggtgtgcgcccagatcaacaagagcctgctgaagatcatcaacgactacgaggagttctccaagggcgccctcaccaccaccttcgaggagctgcacttcgagatcaagccccaccacgactgcacggtcgagcagatctacgagatcctgaagatctaccagctcatggaccacagcaacatggactgcttcatctgctgcatcctgtcccacggggacaagggcatcatctacggcaccgacgggcaggaggcccccatctacgagctgaccagccagttcaccggcctcaagtgcccgtccctggcggggaagcccaaggtgttcttcatccaggcctgccagggcgacaactaccagaaggggatccccgtggagacggacagcgaggagcagccctacctggagatggacctctccagcccgcagacccgctacatccccgacgaggccgacttcctgctgggcatggccaccgtcaacaactgcgtgagctaccggaaccccgcggagggcacctggtacatccagtccctctgccagagcctgcgcgagcggtgcccccgcggggacgacatcctgacgatcctcaccgaggtgaactacgaggtctccaacaaggacgacaagaagaacatgggcaagcagatgccgcagcccaccttcaccctgcggaagaagctggtgttccccagcgactga

SEQ ID NO: 7100 - RNA, 1188 nt, synthetic construct
  misc_feature 1..1188: note = derived and/or modified sequence opt2 fromCaspase_8__Homo_sapiens__ABX09989
  source 1..1188: mol_type = other RNA
atggacttctcccgcaacctctacgacatcggcgagcagctcgactccgaggacctcgcctccctcaagttcctctccctcgactacatcccccagcgcaagcaggagcccatcaaggacgccctcatgctcttccagcgcctccaggagaagcgcatgctcgaggagtccaacctctccttcctcaaggagctcctcttccgcatcaaccgcctcgacctcctcatcacctacctcaacacccgcaaggaggagatggagcgcgagctccagacccccggccgcgcccagatctccgcctaccgcgtcatgctctaccagatctccgaggaggtctcccgctccgagctccgctccttcaagttcctcctccaggaggagatctccaagtgcaagctcgacgacgacatgaacctcctcgacatcttcatcgagatggagaagcgcgtcatcctcggcgagggcaagctcgacatcctcaagcgcgtctgcgcccagatcaacaagtccctcctcaagatcatcaacgactacgaggagttctccaagggcgccctcaccaccaccttcgaggagctccacttcgagatcaagccccaccacgactgcaccgtcgagcagatctacgagatcctcaagatctaccagctcatggaccactccaacatggactgcttcatctgctgcatcctctcccacggcgacaagggcatcatctacggcaccgacggccaggaggcccccatctacgagctcacctcccagttcaccggcctcaagtgcccctccctcgccggcaagcccaaggtcttcttcatccaggcctgccagggcgacaactaccagaagggcatccccgtcgagaccgactccgaggagcagccctacctcgagatggacctctcctccccccagacccgctacatccccgacgaggccgacttcctcctcggcatggccaccgtcaacaactgcgtctcctaccgcaaccccgccgagggcacctggtacatccagtccctctgccagtccctccgcgagcgctgcccccgcggcgacgacatcctcaccatcctcaccgaggtcaactacgaggtctccaacaaggacgacaagaagaacatgggcaagcagatgccccagcccaccttcaccctccgcaagaagctcgtcttcccctccgactga

SEQ ID NO: 7101 - RNA, 1188 nt, synthetic construct
  misc_feature 1..1188: note = derived and/or modified sequence opt3 fromCaspase_8__Homo_sapiens__ABX09989
  source 1..1188: mol_type = other RNA
atggacttcagcagaaacctgtacgatatcggcgagcagctcgactccgaagatcttgcctctctgaagtttttgtcattagactatattccccaaaggaaacaggagcctataaaggatgctctgatgctattccagcggctccaggaaaaacgcatgctggaggaaagtaatcttagctttctgaaggagctcttgttccgaatcaaccgtctggacctgctcattacctacttaaatacaagaaaagaggaaatggagagggaactgcaaactccagggcgggcacagatctccgcctatcgcgtgatgctttaccagatttctgaggaggtctcgagatcagaattgaggagctttaagttcctgctacaggaggaaatcagtaagtgcaaactcgatgacgatatgaacctgcttgacatatttatcgagatggaaaagcgggttattctgggagagggtaaattggatatcctcaagcgcgtgtgtgcgcaaattaataaatccctgttaaagatcataaacgactatgaggagttctctaagggcgctctgacgaccacatttgaggaactccacttcgagattaaaccgcatcacgattgcactgtagaacagatctacgagattcttaagatctatcagctgatggaccatagcaatatggactgttttatctgctgtattttgtcccacggggataaaggaataatctacggcaccgacggtcaggaggcccccatttacgaactaacatcacaattcaccgggctgaagtgccctagtctcgcaggaaaaccaaaggtgtttttcatccaggcctgtcagggcgataactatcaaaaaggcatacccgtcgagactgacagcgaagaacagccttacctggaaatggatctttcttccccacagacacgatatattcccgacgaggctgatttcctgttggggatggcaaccgtgaataactgcgtttcatacagaaatcctgccgagggaacgtggtatatccagagcctctgtcaaagtctgagggaacggtgcccacgtggtgacgatatcttaactattctgaccgaggtgaactacgaagtctctaataaggacgataagaaaaacatgggcaagcagatgccgcagcccacatttactctacgcaaaaagctcgtgttcccttccgactga

SEQ ID NO: 7102 - RNA, 1188 nt, synthetic construct
  misc_feature 1..1188: note = derived and/or modified sequence opt4 fromCaspase_8__Homo_sapiens__ABX09989
  source 1..1188: mol_type = other RNA
atggacttcagcagaaacctgtacgacatcggcgagcagctggacagcgaggacctggccagcctgaagttcctgagcctggactacatcccccagagaaagcaggagcccatcaaggacgccctgatgctgttccagagactgcaggagaagagaatgctggaggagagcaacctgagcttcctgaaggagctgctgttcagaatcaacagactggacctgctgatcacctacctgaacaccagaaaggaggagatggagagagagctgcagacccccggcagagcccagatcagcgcctacagagtgatgctgtaccagatcagcgaggaggtgagcagaagcgagctgagaagcttcaagttcctgctgcaggaggagatcagcaagtgcaagctggacgacgacatgaacctgctggacatcttcatcgagatggagaagagagtgatcctgggcgagggcaagctggacatcctgaagagagtgtgcgcccagatcaacaagagcctgctgaagatcatcaacgactacgaggagttcagcaagggcgccctgaccaccaccttcgaggagctgcacttcgagatcaagccccaccacgactgcaccgtggagcagatctacgagatcctgaagatctaccagctgatggaccacagcaacatggactgcttcatctgctgcatcctgagccacggcgacaagggcatcatctacggcaccgacggccaggaggcccccatctacgagctgaccagccagttcaccggcctgaagtgccccagcctggccggcaagcccaaggtgttcttcatccaggcctgccagggcgacaactaccagaagggcatccccgtggagaccgacagcgaggagcagccctacctggagatggacctgagcagcccccagaccagatacatccccgacgaggccgacttcctgctgggcatggccaccgtgaacaactgcgtgagctacagaaaccccgccgagggcacctggtacatccagagcctgtgccagagcctgagagagagatgccccagaggcgacgacatcctgaccatcctgaccgaggtgaactacgaggtgagcaacaaggacgacaagaagaacatgggcaagcagatgccccagcccaccttcaccctgagaaagaagctggtgttccccagcgactga

SEQ ID NO: 7103 - RNA, 1188 nt, synthetic construct
  misc_feature 1..1188: note = derived and/or modified sequence opt5 fromCaspase_8__Homo_sapiens__ABX09989
  source 1..1188: mol_type = other RNA
atggacttcagcagaaacctgtacgatatcggcgagcagctcgactccgaagatctggcctctcttaagtttctgagcctcgactatattccccaacggaaacaggagcctatcaaggatgctctgatgcttttccagcgcctgcaggagaaaagaatgctcgaggaatccaatctgtcttttctgaaggagctcctgttccggattaaccgccttgacctgctcatcacctacctgaatacaagaaaagaggaaatggagcgggaacttcaaacgccggggcgcgcccagattagcgcgtatagagtgatgctgtaccagatctccgaggaggtctctcggagcgaactccgctcctttaagttcctgctgcaggaggaaatcagcaagtgcaaactcgatgacgatatgaacctgcttgacatttttatcgagatggaaaagagagttattctgggagagggcaaactcgatatcctgaagcgggtgtgtgctcaaattaataaatctcttctgaagatcattaacgactatgaggagttctccaagggggccctcaccacaacctttgaagaactgcacttcgagatcaaaccccatcacgattgcacagtggaacagatctacgagattctgaagatctatcagctcatggaccatagcaatatggactgttttatttgctgtatcctgtctcacggagataaaggcattatctacgggaccgacggacaggaggcccctatctacgaacttacatcccaattcaccggcctgaagtgccccagcctcgctggcaaacctaaggtctttttcattcaggcctgtcagggggataactatcaaaaaggaatccccgtggagacggactctgaagaacagccttacctggaaatggatctttccagcccgcagacccgctatattcccgacgaggctgatttcctgctcggcatggccacagttaataactgcgtgtcctacagaaatcctgcggaggggacctggtatatccagtctctgtgtcaaagcctgcgggaacgctgccccagaggagacgatattctcacaatcctgaccgaggtcaactacgaagtgtccaataaggacgataagaaaaacatgggcaagcagatgcctcagcccacgtttacacttcggaaaaagctggttttcccgagcgactga

SEQ ID NO: 7104 - RNA, 1188 nt, synthetic construct
  misc_feature 1..1188: note = derived and/or modified sequence opt6 fromCaspase_8__Homo_sapiens__ABX09989
  source 1..1188: mol_type = other RNA
atggacttctccagaaatctatacgacataggagaacaactagactcagaagacctagcttctctaaaatttctatcactagactacataccacaacgaaaacaagaaccaataaaagacgcattaatgctattccaaagattacaagaaaaaagaatgctagaagaatcaaatctatcattcctaaaagaactactatttagaataaacagactcgacctcctaataacatacctaaacacaagaaaagaagaaatggaaagagaactccaaaccccaggaagagcacaaatatcagcataccgagtaatgctatatcaaatatcagaagaagtctcacgatcagaactacgatccttcaaattcctattacaagaagaaatatcaaaatgcaaactagacgacgacatgaacttactagacatatttatagaaatggaaaaaagagtaatactaggagagggcaaactcgacatactaaaaagagtttgcgcccaaattaataaatcactgctaaaaataatcaatgactacgaagaattctcaaaaggagcactaaccactacattcgaagaactgcacttcgaaataaaaccacaccacgactgtacagtagaacaaatatacgaaatattaaaaatataccaactgatggatcattccaatatggactgctttatatgctgcatactctcacacggagacaaaggaataatatacggaacagacggtcaagaagcaccaatatacgaacttacatcacaattcacaggattaaaatgcccatcattagccggaaaaccaaaagtattcttcatccaagcatgccaaggcgacaactaccaaaaaggcataccagtagaaacagacagtgaagaacaaccatacttagaaatggatttatcctcaccccaaacaagatatatacccgacgaagcagacttcttactaggaatggcaactgttaataactgcgtttcatatagaaatccagcagaaggaacatggtatatacaatcattatgccaaagcctaagagaaagatgccccagaggagacgatatacttacaatactaacagaagtaaactacgaagtttccaacaaagacgacaaaaaaaacatgggcaaacaaatgcctcaaccaacattcactttaagaaaaaaattagtattccctagcgattaa

SEQ ID NO: 7105 - protein, 108 aa, synthetic construct
  REGION 1..108: note = Caspase_8__Homo_sapiens__C3S3G0
MDFSRNLYDIGEQLDSEDLASLKFLSLDYIPQRKQEPIKDALMLFQRLQEKRMLEESNLSFLKELLFRINRLDLLITYLNTRKEEMERELQTPGRAQISAYRTCWIFS

SEQ ID NO: 7106 - RNA, 327 nt, synthetic construct
  misc_feature 1..327: note = Caspase_8__Homo_sapiens__ACF93415
  source 1..327: mol_type = other RNA
atggacttcagcagaaatctttatgatattggggaacaactggacagtgaagatctggcctccctcaagttcctgagcctggactacattccgcaaaggaagcaagaacccatcaaggatgccttgatgttattccagagactccaggaaaagagaatgttggaggaaagcaatctgtccttcctgaaggagctgctcttccgaattaatagactggatttgctgattacctacctaaacactagaaaggaggagatggaaagggaacttcagacaccaggcagggctcaaatttctgcctacagaacctgctggatattttcatag

SEQ ID NO: 7107 - RNA, 327 nt, synthetic construct
  misc_feature 1..327: note = derived and/or modified sequence opt1 fromCaspase_8__Homo_sapiens__ACF93415
  source 1..327: mol_type = other RNA
atggacttcagccgcaacctgtacgacatcggcgagcagctcgactccgaggacctggccagcctgaagttcctctccctggactacatcccccagcggaagcaggagccgatcaaggacgccctgatgctgttccagcgcctgcaggagaagcggatgctggaggagagcaacctctccttcctgaaggagctcctcttccgcatcaaccggctggacctgctcatcacctacctgaacacccgcaaggaggagatggagcgggagctgcagacgcccgggcgcgcgcagatcagcgcctaccggacctgctggatcttctcctga

SEQ ID NO: 7108 - RNA, 327 nt, synthetic construct
  misc_feature 1..327: note = derived and/or modified sequence opt2 fromCaspase_8__Homo_sapiens__ACF93415
  source 1..327: mol_type = other RNA
atggacttctcccgcaacctctacgacatcggcgagcagctcgactccgaggacctcgcctccctcaagttcctctccctcgactacatcccccagcgcaagcaggagcccatcaaggacgccctcatgctcttccagcgcctccaggagaagcgcatgctcgaggagtccaacctctccttcctcaaggagctcctcttccgcatcaaccgcctcgacctcctcatcacctacctcaacacccgcaaggaggagatggagcgcgagctccagacccccggccgcgcccagatctccgcctaccgcacctgctggatcttctcctga

SEQ ID NO: 7109 - RNA, 327 nt, synthetic construct
  misc_feature 1..327: note = derived and/or modified sequence opt3 fromCaspase_8__Homo_sapiens__ACF93415
  source 1..327: mol_type = other RNA
atggacttcagcagaaacctgtacgatatcggcgagcagctcgactccgaagatcttgcctctctgaagtttttgtcattagactatattccccaaaggaaacaggagcctataaaggatgctctgatgctattccagcggctccaggaaaaacgcatgctggaggaaagtaatcttagctttctgaaggagttgctctttcgaatcaaccgtctggacctgctcattacctacttaaatacaagaaaagaggaaatggagagggaactgcaaactccagggcgggcacagatctccgcctatcgcacgtgctggattttctcttga

SEQ ID NO: 7110 - RNA, 327 nt, synthetic construct
  misc_feature 1..327: note = derived and/or modified sequence opt4 fromCaspase_8__Homo_sapiens__ACF93415
  source 1..327: mol_type = other RNA
atggacttcagcagaaacctgtacgacatcggcgagcagctggacagcgaggacctggccagcctgaagttcctgagcctggactacatcccccagagaaagcaggagcccatcaaggacgccctgatgctgttccagagactgcaggagaagagaatgctggaggagagcaacctgagcttcctgaaggagctgctgttcagaatcaacagactggacctgctgatcacctacctgaacaccagaaaggaggagatggagagagagctgcagacccccggcagagcccagatcagcgcctacagaacctgctggatcttcagctga

SEQ ID NO: 7111 - RNA, 327 nt, synthetic construct
  misc_feature 1..327: note = derived and/or modified sequence opt5 fromCaspase_8__Homo_sapiens__ACF93415
  source 1..327: mol_type = other RNA
atggacttcagcagaaacctgtacgatatcggcgagcagctcgactccgaagatctggcctctcttaagtttctgagcctcgactatattccccaacggaaacaggagcctatcaaggatgctctgatgcttttccagcgcctgcaggagaaaagaatgctcgaagaatccaatctgtcttttctgaaggagctcctgttccggattaaccgccttgacctgctcatcacctacctgaatacaagaaaagaggaaatggagcgggaacttcaaacgccggggcgcgcccagattagcgcgtatagaacctgctggatcttttcctga

SEQ ID NO: 7112 - RNA, 327 nt, synthetic construct
  misc_feature 1..327: note = derived and/or modified sequence opt6 fromCaspase_8__Homo_sapiens__ACF93415
  source 1..327: mol_type = other RNA
atggacttctcaagaaacctatacgacataggagaacaactagactcagaagacctagcatcactaaaattcctatcactagactacataccacaaagaaaacaagaaccaataaaagacgcactaatgctattccaaagactacaagaaaaaagaatgctagaagaatcaaacctatcattcctaaaagaactactattcagaataaacagactagacctactaataacatacctaaacacaagaaaagaagaaatggaaagagaactacaaacaccaggaagagcacaaatatcagcatacagaacatgctggatattctcataa

SEQ ID NO: 7113 - protein, 479 aa, synthetic construct
  REGION 1..479: note = Caspase_8__Homo_sapiens__Q14790
MDFSRNLYDIGEQLDSEDLASLKFLSLDYIPQRKQEPIKDALMLFQRLQEKRMLEESNLSFLKELLFRINRLDLLITYLNTRKEEMERELQTPGRAQISAYRVMLYQISEEVSRSELRSFKFLLQEEISKCKLDDDMNLLDIFIEMEKRVILGEGKLDILKRVCAQINKSLLKIINDYEEFSKERSSSLEGSPDEFSNGEELCGVMTISDSPREQDSESQTLDKVYQMKSKPRGYCLIINNHNFAKAREKVPKLHSIRDRNGTHLDAGALTTTFEELHFEIKPHDDCTVEQIYEILKIYQLMDHSNMDCFICCILSHGDKGIIYGTDGQEAPIYELTSQFTGLKCPSLAGKPKVFFIQACQGDNYQKGIPVETDSEEQPYLEMDLSSPQTRYIPDEADFLLGMATVNNCVSYRNPAEGTWYIQSLCQSLRERCPRGDDILTILTEVNYEVSNKDDKKNMGKQMPQPTFTLRKKLVFPSD

SEQ ID NO: 7114 - RNA, 1440 nt, synthetic construct
  misc_feature 1..1440: note = Caspase_8__Homo_sapiens__CAA66853
  source 1..1440: mol_type = other RNA
atggacttcagcagaaatctttatgatattggggaacaactggacagtgaagatctggcctccctcaagttcctgagcctggactacattccgcaaaggaagcaagaacccatcaaggatgccttgatgttattccagagactccaggaaaagagaatgttggaggaaagcaatctgtccttcctgaaggagctgctcttccgaattaatagactggatttgctgattacctacctaaacactagaaaggaggagatggaaagggaacttcagacaccaggcagggctcaaatttctgcctacagggtcatgctctatcagatttcagaagaagtgagcagatcagaattgaggtcttttaagtttcttttgcaagaggaaatctccaaatgcaaactggatgatgacatgaacctgctggatattttcatagagatggagaagagggtcatcctgggagaaggaaagttggacatcctgaaaagagtctgtgcccaaatcaacaagagcctgctgaagataatcaacgactatgaagaattcagcaaagagagaagcagcagccttgaaggaagtcctgatgaattttcaaatggggaggagttgtgtggggtaatgacaatctcggactctccaagagaacaggatagtgaatcacagactttggacaaagtttaccaaatgaaaagcaaacctcggggatactgtctgatcatcaacaatcacaattttgcaaaagcacgggagaaagtgcccaaacttcacagcattagggacaggaatggaacacacttggatgcaggggctttgaccacgacctttgaagagcttcattttgagatcaagccccacgatgactgcacagtagagcaaatctatgagattttgaaaatctaccaactcatggaccacagtaacatggactgcttcatctgctgtatcctctcccatggagacaaaggcatcatctatggcactgatggacaggaggcccccatctatgagctgacatctcagttcactggtttgaagtgcccttcccttgctggaaaacccaaagtgttttttattcaggcttgtcagggggataactaccagaaaggtatacctgttgagactgattcagaggagcaaccctatttagaaatggatttatcatcacctcaaacgagatatatcccggatgaggctgactttctgctggggatggccactgtgaataactgtgtttcctaccgaaaccctgcagagggaacctggtacatccagtcactttgccagagcctgagagagcgatgtcctcgaggcgatgatattctcaccatcctgactgaagtgaactatgaagtaagcaacaaggatgacaagaaaaacatggggaaacagatgcctcagcctactttcacactaagaaaaaaacttgtcttcccttctgattga

SEQ ID NO: 7115 - RNA, 1440 nt, synthetic construct
  misc_feature 1..1440: note = derived and/or modified sequence opt1 fromCaspase_8__Homo_sapiens__CAA66853
  source 1..1440: mol_type = other RNA
atggacttcagccgcaacctgtacgacatcggcgagcagctcgactccgaggacctggccagcctgaagttcctctccctggactacatcccccagcggaagcaggagccgatcaaggacgccctgatgctgttccagcgcctgcaggagaagcggatgctggaggagagcaacctctccttcctgaaggagctcctcttccgcatcaaccggctggacctgctcatcacctacctgaacacccgcaaggaggagatggagcgggagctgcagacgcccgggcgcgcgcagatcagcgcctaccgggtgatgctctaccagatctccgaggaggtcagccgctccgagctgcggagcttcaagttcctgctccaggaggagatctccaagtgcaagctggacgacgacatgaacctgctcgacatcttcatcgagatggagaagcgcgtgatcctgggcgaggggaagctggacatcctcaagcgggtgtgcgcccagatcaacaagagcctgctgaagatcatcaacgactacgaggagttctccaaggagcgcagctccagcctcgagggctcccccgacgagttcagcaacggggaggagctgtgcggcgtcatgaccatctccgacagcccccgggagcaggacagcgagtcccagaccctggacaaggtgtaccagatgaagtccaagccgcgcggctactgcctcatcatcaacaaccacaacttcgccaaggcccgggagaaggtgcccaagctgcacagcatccgcgaccggaacgggacccacctggacgcgggcgccctcacgaccaccttcgaggagctgcacttcgagatcaagccccacgacgactgcaccgtcgagcagatctacgagatcctgaagatctaccagctcatggaccacagcaacatggactgcttcatctgctgcatcctgtcccacggggacaagggcatcatctacgggacggacggccaggaggcccccatctacgagctgaccagccagttcaccggcctcaagtgcccgtccctggccgggaagcccaaggtgttcttcatccaggcgtgccagggcgacaactaccagaaggggatccccgtggagaccgacagcgaggagcagccctacctggagatggacctctccagcccgcagacgcgctacatccccgacgaggccgacttcctgctgggcatggccaccgtcaacaactgcgtgtcctaccggaaccccgccgagggcacctggtacatccagagcctctgccagtccctgcgcgagcgctgcccccgcggggacgacatcctgaccatcctgacggaggtgaactacgaggtcagcaacaaggacgacaagaagaacatgggcaagcagatgccgcagcccaccttcaccctccggaagaagctggtgttcccctccgactga

SEQ ID NO: 7116 - RNA, 1440 nt, synthetic construct
  misc_feature 1..1440: note = derived and/or modified sequence opt2 fromCaspase_8__Homo_sapiens__CAA66853
  source 1..1440: mol_type = other RNA
atggacttctcccgcaacctctacgacatcggcgagcagctcgactccgaggacctcgcctccctcaagttcctctccctcgactacatcccccagcgcaagcaggagcccatcaaggacgccctcatgctcttccagcgcctccaggagaagcgcatgctcgaggagtccaacctctccttcctcaaggagctcctcttccgcatcaaccgcctcgacctcctcatcacctacctcaacacccgcaaggaggagatggagcgcgagctccagacccccggccgcgcccagatctccgcctaccgcgtcatgctctaccagatctccgaggaggtctcccgctccgagctccgctccttcaagttcctcctccaggaggagatctccaagtgcaagctcgacgacgacatgaacctcctcgacatcttcatcgagatggagaagcgcgtcatcctcggcgagggcaagctcgacatcctcaagcgcgtctgcgcccagatcaacaagtccctcctcaagatcatcaacgactacgaggagttctccaaggagcgctcctcctccctcgagggctcccccgacgagttctccaacggcgaggagctctgcggcgtcatgaccatctccgactccccccgcgagcaggactccgagtcccagaccctcgacaaggtctaccagatgaagtccaagccccgcggctactgcctcatcatcaacaaccacaacttcgccaaggcccgcgagaaggtccccaagctccactccatccgcgaccgcaacggcacccacctcgacgccggcgccctcaccaccaccttcgaggagctccacttcgagatcaagccccacgacgactgcaccgtcgagcagatctacgagatcctcaagatctaccagctcatggaccactccaacatggactgcttcatctgctgcatcctctcccacggcgacaagggcatcatctacggcaccgacggccaggaggcccccatctacgagctcacctcccagttcaccggcctcaagtgcccctccctcgccggcaagcccaaggtcttcttcatccaggcctgccagggcgacaactaccagaagggcatccccgtcgagaccgactccgaggagcagccctacctcgagatggacctctcctccccccagacccgctacatccccgacgaggccgacttcctcctcggcatggccaccgtcaacaactgcgtctcctaccgcaaccccgccgagggcacctggtacatccagtccctctgccagtccctccgcgagcgctgcccccgcggcgacgacatcctcaccatcctcaccgaggtcaactacgaggtctccaacaaggacgacaagaagaacatgggcaagcagatgccccagcccaccttcaccctccgcaagaagctcgtcttcccctccgactga

SEQ ID NO: 7117 - RNA, 1440 nt, synthetic construct
  misc_feature 1..1440: note = derived and/or modified sequence opt3 fromCaspase_8__Homo_sapiens__CAA66853
  source 1..1440: mol_type = other RNA
atggacttcagcagaaacctgtacgatatcggcgagcagctcgactccgaagatcttgcctctctgaagtttttgtcattagactatattccccaaaggaaacaggagcctataaaggatgctctgatgctattccagcggctccaggaaaaacgcatgctggaggaaagtaatcttagctttctgaaggagctcctcttccgaatcaaccgtctggacctgctcattacctacttaaatacaagaaaagaggaaatggagagggaactgcaaactccagggcgggcacagatctccgcctatcgcgtgatgctttaccagatttctgaggaggtctcgagatcagaattgaggagctttaagttcctgctacaggaggaaatcagtaagtgcaaactcgatgacgatatgaacctgcttgacatatttatcgagatggaaaagcgggttattctgggagagggtaaattggatatcctcaagcgcgtgtgtgcgcaaattaataaatccctgttaaagatcataaacgactatgaggagttctctaaggagcgaagctcctcactggaaggcagtccggatgagtttagcaatggggaagagttgtgcggagtaatgacgatttctgactcccccagagagcaggactcagaaagccagacccttgataaagtgtaccagatgaagagtaaacctaggggctattgtctgatcattaacaatcacaacttcgctaaggcccgggagaaagtcccaaagttgcattctatccgtgaccgcaatggtacacacctagatgcaggggccctgactaccacatttgaagaactccatttcgaaatcaaaccccacgacgattgcaccgtggagcaaatttacgagatactgaagatctaccagcttatggaccattccaacatggattgttttatttgctgtatcctgagccacggagacaagggcataatttatggcactgatgggcaggaagctcctatctacgagttgacatcgcaattcaccggactcaaatgcccatctctggcaggtaagcccaaagttttctttatccaggcctgtcagggcgacaattatcagaaggggattcctgtggaaacggattccgaggagcaaccatacttagaaatggacctgtcaagtccgcagactagatatatccccgacgaggctgatttcctactcggaatggccaccgtcaacaattgcgtgagctacaggaaccctgcggaaggcacatggtatattcagtccctgtgtcagtctcttcgggagcgatgcccacgcggtgacgatatattgactatcctgaccgaagtaaactacgaggttagcaataaagacgataagaagaacatggggaaacaaatgccccagcctacatttaccctcagaaagaaactggtgttcccatcagactga

SEQ ID NO: 7118 - RNA, 1440 nt, synthetic construct
  misc_feature 1..1440: note = derived and/or modified sequence opt4 fromCaspase_8__Homo_sapiens__CAA66853
  source 1..1440: mol_type = other RNA
atggacttcagcagaaacctgtacgacatcggcgagcagctggacagcgaggacctggccagcctgaagttcctgagcctggactacatcccccagagaaagcaggagcccatcaaggacgccctgatgctgttccagagactgcaggagaagagaatgctggaggagagcaacctgagcttcctgaaggagctgctgttcagaatcaacagactggacctgctgatcacctacctgaacaccagaaaggaggagatggagagagagctgcagacccccggcagagcccagatcagcgcctacagagtgatgctgtaccagatcagcgaggaggtgagcagaagcgagctgagaagcttcaagttcctgctgcaggaggagatcagcaagtgcaagctggacgacgacatgaacctgctggacatcttcatcgagatggagaagagagtgatcctgggcgagggcaagctggacatcctgaagagagtgtgcgcccagatcaacaagagcctgctgaagatcatcaacgactacgaggagttcagcaaggagagaagcagcagcctggagggcagccccgacgagttcagcaacggcgaggagctgtgcggcgtgatgaccatcagcgacagccccagagagcaggacagcgagagccagaccctggacaaggtgtaccagatgaagagcaagcccagaggctactgcctgatcatcaacaaccacaacttcgccaaggccagagagaaggtgcccaagctgcacagcatcagagacagaaacggcacccacctggacgccggcgccctgaccaccaccttcgaggagctgcacttcgagatcaagccccacgacgactgcaccgtggagcagatctacgagatcctgaagatctaccagctgatggaccacagcaacatggactgcttcatctgctgcatcctgagccacggcgacaagggcatcatctacggcaccgacggccaggaggcccccatctacgagctgaccagccagttcaccggcctgaagtgccccagcctggccggcaagcccaaggtgttcttcatccaggcctgccagggcgacaactaccagaagggcatccccgtggagaccgacagcgaggagcagccctacctggagatggacctgagcagcccccagaccagatacatccccgacgaggccgacttcctgctgggcatggccaccgtgaacaactgcgtgagctacagaaaccccgccgagggcacctggtacatccagagcctgtgccagagcctgagagagagatgccccagaggcgacgacatcctgaccatcctgaccgaggtgaactacgaggtgagcaacaaggacgacaagaagaacatgggcaagcagatgccccagcccaccttcaccctgagaaagaagctggtgttccccagcgactga

SEQ ID NO: 7119 - RNA, 1440 nt, synthetic construct
  misc_feature 1..1440: note = derived and/or modified sequence opt5 fromCaspase_8__Homo_sapiens__CAA66853
  source 1..1440: mol_type = other RNA
atggacttcagcagaaacctgtacgatatcggcgagcagctcgactccgaagatctggcctctcttaagtttctgagcctcgactatattccccaacggaaacaggagcctatcaaggatgctctgatgcttttccagcgcctgcaggagaaaagaatgctcgaggaatccaatctgtcttttctgaaggagctcctgttccggattaaccgccttgacctgctcatcacctacctgaatacaagaaaagaggaaatggagcgggaacttcaaacgccggggcgcgcccagattagcgcgtatagagtgatgctgtaccagatctccgaggaggtctctcggagcgaactccgctcctttaagttcctgctgcaggaggaaatcagcaagtgcaaactcgatgacgatatgaacctgcttgacatttttatcgagatggaaaagagagttattctgggagagggcaaactcgatatcctgaagcgggtgtgtgctcaaattaataaatctcttctgaagatcattaacgactatgaggagttctccaaggagcgcagcagctccctcgaagggagccccgatgagttttctaatggagaagaactgtgcggcgtgatgaccatctccgacagccctagagagcaggactccgaatctcagacactggataaagtctaccagatgaagtctaaaccccgggggtattgtctcatcattaacaatcacaacttcgccaaggcccgcgagaaagtgcctaagctgcattccatcagagaccggaatggaacccaccttgatgctggcgccctgacaaccacatttgaagaactccatttcgaaattaaaccccacgacgattgcaccgttgagcaaatctacgagattctgaagatctaccagcttatggaccatagcaacatggattgttttatctgctgtattctgtctcacggcgacaaggggatcatttatggaacggatggccaggaagctcctatctacgagctcacctcccaattcacagggctgaaatgcccgagcctggccggaaagcccaaagtgttctttattcaggcgtgtcagggcgacaattatcagaaggggatccctgtcgaaaccgattctgaggagcaaccctacctcgaaatggacctgagctcccctcagacaagatatatccccgacgaggccgatttccttctgggaatggctaccgtgaacaattgcgtttcttaccgcaacccggccgaaggcacgtggtatattcagagcctctgtcagtccctgcgggagagatgccctcgcggcgacgatatcctgacaattcttaccgaagtgaactacgaggtcagcaataaagacgataagaagaacatggggaaacaaatgccccagcctacatttaccctccggaagaaactggtgttcccctctgactga

SEQ ID NO: 7120 - RNA, 1440 nt, synthetic construct
  misc_feature 1..1440: note = derived and/or modified sequence opt6 fromCaspase_8__Homo_sapiens__CAA66853
  source 1..1440: mol_type = other RNA
atggacttctcaagaaatttatacgacataggtgaacaactagattcagaagacttagcatctctaaagtttctttcactagactacataccacaaagaaaacaagaaccaataaaagatgccctaatgctattccaaagattacaagaaaaacgaatgctagaagaatcaaatttatcttttctcaaagaattactctttagaataaacagactagacctactaataacatacctgaacacacgcaaagaagaaatggaacgagaactacaaaccccaggaagagcacaaatatcagcatatagagtaatgctataccaaatctccgaagaagtatccagatcagaactaagatcatttaaattcctcctacaagaagaaatttcaaaatgtaaattagacgacgacatgaatctactagacatcttcatagaaatggaaaaaagagtaatactaggagaaggaaaattagatatactaaaacgagtatgcgcacaaataaataaatcattattaaaaatcataaacgactatgaagaattttcaaaagaaagaagttcatcattagaaggatcacccgacgaattctccaatggagaagaattatgcggagtaatgacaatctcagacagtccaagagaacaagactcagaatcacaaaccctcgacaaagtataccaaatgaaatcaaaaccaagaggatactgtctaataataaacaaccacaacttcgccaaagcaagagaaaaagtacccaaattacactccatcagagacagaaacggtactcatctagatgcaggcgctcttacaactacattcgaagaactacacttcgaaataaaacctcacgacgactgcacagtagaacaaatatatgaaatactaaaaatctatcaactaatggatcattcaaacatggactgcttcatttgctgcatactatctcacggagacaaaggaataatctacggaacagacggacaagaagcaccaatatatgaattaacaagccaatttacaggactaaaatgtccatcactcgcaggaaaacctaaagtatttttcatacaagcatgccaaggcgataattaccaaaaaggaatacccgtagaaacagactccgaagaacaaccatacctcgaaatggatctatcatcaccacaaactcgatatataccagacgaagcagactttttattaggcatggcaacagtaaataattgcgtatcatatagaaacccagccgaaggcacttggtacatacaatccctatgtcaatcattaagagaacgatgcccccgaggagacgacatactcacaatattaacagaagtaaactatgaagtatccaataaagacgataaaaaaaacatgggcaaacaaatgcctcaacctacatttacactcagaaaaaaactagtatttccaagcgactaa

SEQ ID NO: 7121 - protein, 536 aa, synthetic construct
  REGION 1..536: note = Caspase_9__Homo_sapiens__A0A024R8F1
MSDYENDDECWSVLEGFRVTLTSVIDPSRITPYLRQCKVLNPDDEEQVLSDPNLVIRKRKVGVLLDILQRTGHKGYVAFLESLELYYPQLYKKVTGKEPARVFSMIIDASGESGLTQLLMTEVMKLQKKVQDLTALLSSKDDFIKELRVKDSLLRKHQERVQRLKEECEAGSRELKRCKEENYDLAMRLAHQSEEKGAALMRNRDLQLEIDQLKHSLMKAEDDCKVERKHTLKLRHAMEQRPSQELLWELQQEKALLQARVQELEASVQEGKLDRSSPYIQVLEEDWRQALRDHQEQANTIFSLRKDLRQGEARRLRCMEEKEMFELQCLALRKDSKMYKDRIEAILLQMEEVAIERDQAIATREELHAQHARGLQEKDALRKQVRELGEKADELQLQVFQCEAQLLAVEGRLRRQQLETLVLSSDLEDGSPRRSQELSLPQDLEDTQLSDKGCLAGGGSPKQPFAALHQEQVLRNPHDAGLSSGEPPEKERRRLKESFENYRRKRALRKMQKGWRQGEEDRENTTGSDNTDTEGS

SEQ ID NO: 7122 - RNA, 1611 nt, synthetic construct
  misc_feature 1..1611: note = Caspase_9__Homo_sapiens__EAW88222
  source 1..1611: mol_type = other RNA
atgtcggactacgagaacgatgacgagtgctggagcgtcctggagggcttccgggtgacgctcacctcggtcatcgacccctcacgcatcacaccttacctgcggcagtgcaaggtcctgaaccccgatgatgaggagcaggtgctcagcgaccccaacctggtcatccgcaaacggaaagtgggtgtgctcctggacatcctgcagcggaccggccacaagggctacgtggccttcctcgagagcctggagctctactacccgcagctgtacaagaaggtcacaggcaaggagccggcccgcgtcttctccatgatcatcgacgcgtccggggagtcaggcctgactcagctgctgatgactgaggtcatgaagctgcagaagaaggtgcaggacctgaccgcgctgctgagctccaaagatgacttcatcaaggagctgcgggtgaaggacagcctgctgcgcaagcaccaggagcgtgtgcagaggctcaaggaggagtgcgaggccggcagccgcgagctcaagcgctgcaaggaggagaactacgacctggccatgcgcctggcgcaccagagtgaggagaagggcgccgcgctcatgcggaaccgtgacctgcagctggagattgaccagctcaagcacagcctcatgaaggccgaggacgactgcaaggtggagcgcaagcacacgctgaagctcaggcacgccatggagcagcggcccagccaggagctgctgtgggagctgcagcaggagaaggccctgctccaggcccgggtgcaggagctggaggcctccgtccaggaggggaagctggacaggagcagcccctacatccaggtactggaggaggactggcggcaggcgctgcgggaccaccaggagcaggccaacaccatcttctccctgcgcaaggacctccgccagggcgaggcccgacgcctccggtgcatggaggagaaggagatgttcgagctgcagtgcctggcactacgtaaggactccaagatgtacaaggaccgcatcgaggccatcctgctgcagatggaggaggtcgccattgagcgggaccaggccatagccacgcgggaggagctgcacgcacagcacgcccggggcctgcaggagaaggacgcgctgcgcaagcaggtgcgggagctgggcgagaaggcggatgagctgcagctgcaggtgttccagtgtgaggcgcagctactggccgtggagggcaggctcaggcggcagcagctggagacgctcgtcctgagctccgacctggaagatggctcacccaggaggtcccaggagctctcactcccccaggacctggaggacacccagctctcagacaaaggctgccttgccggcggggggagcccgaaacagccctttgcagctctgcaccaggagcaggttttgcggaacccccatgacgcaggcctgagcagcggggagccgcccgagaaggagcggcggcgcctcaaagagagttttgagaactaccgcaggaagcgcgccctcaggaagatgcagaaaggatggcggcagggggaggaggaccgggagaacaccacgggcagcgacaacaccgacactgagggctcctag

SEQ ID NO: 7123 - RNA, 1611 nt, synthetic construct
  misc_feature 1..1611: note = derived and/or modified sequence opt1 fromCaspase_9__Homo_sapiens__EAW88222
  source 1..1611: mol_type = other RNA
atgagcgactacgagaacgacgacgagtgctggtccgtgctggagggcttccgcgtgaccctcaccagcgtgatcgacccctcccggatcacgccgtacctgcgccagtgcaaggtgctgaaccccgacgacgaggagcaggtcctcagcgaccccaacctggtgatccggaagcgcaaggtgggggtcctgctcgacatcctgcagcggaccggccacaaggggtacgtggccttcctggagtccctcgagctgtactacccccagctgtacaagaaggtgaccggcaaggagccggcccgcgtcttcagcatgatcatcgacgcgtccggggagagcggcctcacccagctgctgatgacggaggtgatgaagctccagaagaaggtgcaggacctgaccgccctgctctccagcaaggacgacttcatcaaggagctgcgggtcaaggactccctgctccgcaagcaccaggagcgggtgcagcgcctgaaggaggagtgcgaggccggcagccgggagctgaagcgctgcaaggaggagaactacgacctcgccatgcggctggcccaccagtccgaggagaagggggcggccctgatgcgcaaccgggacctccagctggagatcgaccagctgaagcacagcctcatgaaggccgaggacgactgcaaggtggagcgcaagcacaccctgaagctgcggcacgccatggagcagcgcccctcccaggagctcctgtgggagctgcagcaggagaaggcgctcctgcaggcccgggtccaggagctggaggccagcgtgcaggagggcaagctcgaccgctccagcccctacatccaggtgctggaggaggactggcggcaggccctgcgcgaccaccaggagcaggccaacaccatcttctccctccgcaaggacctgcggcagggggaggcgcgccggctgcgctgcatggaggagaaggagatgttcgagctccagtgcctggccctgcggaaggacagcaagatgtacaaggaccgcatcgaggccatcctcctgcagatggaggaggtcgccatcgagcgggaccaggccatcgcgacgcgcgaggagctgcacgcccagcacgcccggggcctgcaggagaaggacgccctccgcaagcaggtccgggagctgggggagaaggccgacgagctgcagctccaggtgttccagtgcgaggcgcagctgctggccgtggagggccgcctccggcgccagcagctggagaccctggtgctcagctccgacctggaggacggcagcccccggcgctcccaggagctgagcctcccgcaggacctggaggacacccagctgtccgacaaggggtgcctcgccggcgggggcagccccaagcagcccttcgccgccctgcaccaggagcaggtcctgcggaacccccacgacgcgggcctctccagcggggagccgcccgagaaggagcgccggcgcctgaaggagtccttcgagaactaccgccggaagcgcgccctgcggaagatgcagaagggctggcgccagggggaggaggaccgggagaacaccacgggcagcgacaacaccgacaccgaggggtcctga

SEQ ID NO: 7124 - RNA, 1611 nt, synthetic construct
  misc_feature 1..1611: note = derived and/or modified sequence opt2 fromCaspase_9__Homo_sapiens__EAW88222
  source 1..1611: mol_type = other RNA
atgtccgactacgagaacgacgacgagtgctggtccgtcctcgagggcttccgcgtcaccctcacctccgtcatcgacccctcccgcatcaccccctacctccgccagtgcaaggtcctcaaccccgacgacgaggagcaggtcctctccgaccccaacctcgtcatccgcaagcgcaaggtcggcgtcctcctcgacatcctccagcgcaccggccacaagggctacgtcgccttcctcgagtccctcgagctctactacccccagctctacaagaaggtcaccggcaaggagcccgcccgcgtcttctccatgatcatcgacgcctccggcgagtccggcctcacccagctcctcatgaccgaggtcatgaagctccagaagaaggtccaggacctcaccgccctcctctcctccaaggacgacttcatcaaggagctccgcgtcaaggactccctcctccgcaagcaccaggagcgcgtccagcgcctcaaggaggagtgcgaggccggctcccgcgagctcaagcgctgcaaggaggagaactacgacctcgccatgcgcctcgcccaccagtccgaggagaagggcgccgccctcatgcgcaaccgcgacctccagctcgagatcgaccagctcaagcactccctcatgaaggccgaggacgactgcaaggtcgagcgcaagcacaccctcaagctccgccacgccatggagcagcgcccctcccaggagctcctctgggagctccagcaggagaaggccctcctccaggcccgcgtccaggagctcgaggcctccgtccaggagggcaagctcgaccgctcctccccctacatccaggtcctcgaggaggactggcgccaggccctccgcgaccaccaggagcaggccaacaccatcttctccctccgcaaggacctccgccagggcgaggcccgccgcctccgctgcatggaggagaaggagatgttcgagctccagtgcctcgccctccgcaaggactccaagatgtacaaggaccgcatcgaggccatcctcctccagatggaggaggtcgccatcgagcgcgaccaggccatcgccacccgcgaggagctccacgcccagcacgcccgcggcctccaggagaaggacgccctccgcaagcaggtccgcgagctcggcgagaaggccgacgagctccagctccaggtcttccagtgcgaggcccagctcctcgccgtcgagggccgcctccgccgccagcagctcgagaccctcgtcctctcctccgacctcgaggacggctccccccgccgctcccaggagctctccctcccccaggacctcgaggacacccagctctccgacaagggctgcctcgccggcggcggctcccccaagcagcccttcgccgccctccaccaggagcaggtcctccgcaacccccacgacgccggcctctcctccggcgagccccccgagaaggagcgccgccgcctcaaggagtccttcgagaactaccgccgcaagcgcgccctccgcaagatgcagaagggctggcgccagggcgaggaggaccgcgagaacaccaccggctccgacaacaccgacaccgagggctcctga

SEQ ID NO: 7125 - RNA, 1611 nt, synthetic construct
  misc_feature 1..1611: note = derived and/or modified sequence opt3 fromCaspase_9__Homo_sapiens__EAW88222
  source 1..1611: mol_type = other RNA
atgagcgactacgagaacgatgacgaatgctggtccgtgctggagggcttcagagtcaccctcacatctgttatcgatccctcaaggattactccttatcttcggcagtgtaaggtgctgaatccagacgatgaggagcaagtattgagtgacccgaacttagtgatacgcaaacgaaaggtcggggtgctgctagatatcctccagcgtacgggacacaaaggttacgttgcctttctggaaagccttgagctgtattacccccagttgtataagaaagtgaccggcaaggagcctgctagagtcttctccatgattatcgacgcatctggggaatcgggactcacacagctgctgatgactgaggtgatgaagctccaaaagaaggtacaggatttaaccgccctgctttcaagcaaagacgattttattaaggaattgagggttaaagacagtctgctacggaagcatcaggagcgcgtgcagagactcaaggaggaatgcgaggcgggctccagggaactgaaacggtgtaaggaggaaaattacgatcttgctatgcgcctggcccaccaatctgaggagaaaggtgcagccttgatgcgaaacagagacctccagctggaaatcgaccagttaaagcatagcctgatgaaagctgaggatgactgcaaggtcgaaaggaaacacacactcaaacttcggcatgcaatggagcagcgtccatcccaagaactgttgtgggagctacagcaggagaaggccctgctccaagctcgcgtgcaggaactggaggcctcagtgcaggaagggaaacttgatagaagtagcccctatatacaggtcctggaggaagactggaggcaagcgttgcgggatcaccaggagcaggcaaataccatcttctctctccgaaaggacctgcgccagggagaggccagaaggttacggtgtatggaagagaaagaaatgtttgagctgcaatgcctagctctccgcaaggattccaaaatgtacaaggacagaattgaggccatcctgcttcagatggaagaggttgcaattgaaagggatcaggctatcgccactcgtgaggaattgcacgcgcagcatgcccggggcctgcaagagaaggacgcactccgaaaacaggtgagagagctgggcgaaaaggctgatgagcttcagctgcaggtattccaatgtgaagcccagttgctcgctgtggaggggaggctgcgccggcagcaattagaaacactggtcctatcaagcgacctcgaggacggaagtcctagaaggtctcaggagctgtcccttccacaggatttggaagacacccagctgagcgataaaggttgcctcgccggcgggggatcgcccaagcaaccttttgcagccctgcaccaggaacaggtgttacgcaacccacatgacgctggcctgtcttccggtgaaccgcccgagaaagaacgacggcgtcttaaggagtcattcgagaattacagaaggaagcgcgcgttgcggaaaatgcagaaggggtggagacaaggagaagaggatagggaaaacacgactggcagtgacaataccgatacagagggcagctga

SEQ ID NO: 7126 - RNA, 1611 nt, synthetic construct
  misc_feature 1..1611: note = derived and/or modified sequence opt4 fromCaspase_9__Homo_sapiens__EAW88222
  source 1..1611: mol_type = other RNA
atgagcgactacgagaacgacgacgagtgctggagcgtgctggagggcttcagagtgaccctgaccagcgtgatcgaccccagcagaatcaccccctacctgagacagtgcaaggtgctgaaccccgacgacgaggagcaggtgctgagcgaccccaacctggtgatcagaaagagaaaggtgggcgtgctgctggacatcctgcagagaaccggccacaagggctacgtggccttcctggagagcctggagctgtactacccccagctgtacaagaaggtgaccggcaaggagcccgccagagtgttcagcatgatcatcgacgccagcggcgagagcggcctgacccagctgctgatgaccgaggtgatgaagctgcagaagaaggtgcaggacctgaccgccctgctgagcagcaaggacgacttcatcaaggagctgagagtgaaggacagcctgctgagaaagcaccaggagagagtgcagagactgaaggaggagtgcgaggccggcagcagagagctgaagagatgcaaggaggagaactacgacctggccatgagactggcccaccagagcgaggagaagggcgccgccctgatgagaaacagagacctgcagctggagatcgaccagctgaagcacagcctgatgaaggccgaggacgactgcaaggtggagagaaagcacaccctgaagctgagacacgccatggagcagagacccagccaggagctgctgtgggagctgcagcaggagaaggccctgctgcaggccagagtgcaggagctggaggccagcgtgcaggagggcaagctggacagaagcagcccctacatccaggtgctggaggaggactggagacaggccctgagagaccaccaggagcaggccaacaccatcttcagcctgagaaaggacctgagacagggcgaggccagaagactgagatgcatggaggagaaggagatgttcgagctgcagtgcctggccctgagaaaggacagcaagatgtacaaggacagaatcgaggccatcctgctgcagatggaggaggtggccatcgagagagaccaggccatcgccaccagagaggagctgcacgcccagcacgccagaggcctgcaggagaaggacgccctgagaaagcaggtgagagagctgggcgagaaggccgacgagctgcagctgcaggtgttccagtgcgaggcccagctgctggccgtggagggcagactgagaagacagcagctggagaccctggtgctgagcagcgacctggaggacggcagccccagaagaagccaggagctgagcctgccccaggacctggaggacacccagctgagcgacaagggctgcctggccggcggcggcagccccaagcagcccttcgccgccctgcaccaggagcaggtgctgagaaacccccacgacgccggcctgagcagcggcgagccccccgagaaggagagaagaagactgaaggagagcttcgagaactacagaagaaagagagccctgagaaagatgcagaagggctggagacagggcgaggaggacagagagaacaccaccggcagcgacaacaccgacaccgagggcagctga

SEQ ID NO: 7127 - RNA, 1611 nt, synthetic construct
  misc_feature 1..1611: note = derived and/or modified sequence opt5 fromCaspase_9__Homo_sapiens__EAW88222
  source 1..1611: mol_type = other RNA
atgagcgactacgagaacgatgacgaatgctggtccgtgctggagggcttcagagtcaccctcacatctgttatcgatcccagccggattacgccttatctgcgccagtgtaaggtgcttaatccggacgatgaggaacaagtgctgtccgaccccaacctcgtcatcagaaaacggaaggtgggggttctgcttgatattctgcagcgcaccggacacaaaggctacgtggcctttctcgaatctctggagctgtattaccctcagctctataagaaagtcacagggaaggagcccgctagagtgttcagcatgatcattgacgcctccggagaatctggcctgacccagcttctgatgacagaggttatgaagctccagaaaaaggtgcaagatctgaccgcgcttctgagctccaaagacgattttatcaaggaactccgggtcaaagacagcctgctgcgcaagcatcaggagagagtgcagcggctcaaggaggaatgcgaggctgggtctcgcgaactgaaaagatgtaaggaggaaaattacgatcttgccatgcggctggcccaccaatccgaggagaaaggagctgccctcatgcgcaacagagacctgcagcttgaaatcgaccagctgaagcatagcctcatgaaagctgaggatgactgcaaggtggaacggaaacacacactgaagctgcgccatgccatggagcagagaccttctcaagaactcctgtgggagcttcagcaggagaaggcgctgctccaagcccgggtccaggaactggaggcttccgttcaggaaggcaaacttgatagaagctctccctatattcaggtgctggaggaagactggcgccaagccctccgggatcaccaggagcaggctaataccatcttctccctgagaaaggacctgcgccagggcgaggcccggagactccgctgtatggaagagaaagaaatgtttgagctgcaatgccttgcgctgcggaaggatagcaaaatgtacaaggacagaattgaggccatcctcctgcagatggaagaggtggctattgaacgcgatcaggccatcgctacgcgggaggaactgcacgcccagcatgccagagggcttcaagagaaggacgctctccgcaaacaggtccgggagctgggagaaaaggcggatgagctgcagctccaggtgttccaatgtgaagcccagctgcttgctgttgagggcagactgcggcgccagcaactcgaaaccctggtgctgtcctctgaccttgaggacgggagccctagacggtcccaggagctcagcctgccgcaggatctggaagacacacagctctctgataaaggatgcctggccggcgggggatcccccaagcaaccttttgccgcccttcaccaggagcaggtcctgagaaacccccatgacgctggcctcagctctggcgaacctcccgagaaagaacgccggagactgaaggagagcttcgagaattaccgcagaaagcgggcgctgcgcaaaatgcagaaggggtggagacaaggagaagaggatcgggaaaacaccacaggctccgacaataccgatacggaggggtcttga

SEQ ID NO: 7128 - RNA, 1611 nt, synthetic construct
  misc_feature 1..1611: note = derived and/or modified sequence opt6 fromCaspase_9__Homo_sapiens__EAW88222
  source 1..1611: mol_type = other RNA
atgtcagattacgaaaatgatgatgaatgttggtcagttttagaaggatttagagtgacactaacctcagtaatagacccaagtaggataacaccatatctaagacaatgtaaagtgctaaatccagatgacgaagaacaagtattaagcgatccaaatctagtaataagaaaaagaaaagtaggagttctcttagacatactccaacgaacaggacacaagggatacgtagcatttctagaaagcctggaattatattatccacaactctacaaaaaagtcacaggaaaagaaccagcaagagtctttagcatgataatagatgcgagtggagaatctggactaacacaattattaatgactgaagttatgaaacttcaaaaaaaagtacaagacttaacagctttattaagctcaaaagacgactttattaaagaattacgagtaaaagatagcttactgagaaaacaccaagaacgagtacaaagactaaaagaagaatgcgaagcagggagcagagaactaaaaagatgtaaagaagaaaattatgacttagccatgagattagctcatcaatcggaagaaaaaggagctgcattaatgcgaaatcgagatctccaacttgaaatagatcagttgaaacattcattaatgaaagcagaagacgattgcaaagtagaacgaaagcacacactaaaactaagacacgcaatggaacaaagacccagtcaagaattactgtgggaattacaacaagaaaaagcactattacaagcaagggtacaagaactagaagcctcagtacaagaagggaaactagaccgtagcagcccttacatacaagtactagaagaagactggcgacaagcactaagagatcaccaggaacaggccaatacaatattttcactaaggaaagatctaaggcaaggtgaagcaagacgattaagatgtatggaagaaaaagaaatgtttgaattgcaatgtttagcactaagaaaagattcaaaaatgtataaagatagaattgaagcaatacttttacaaatggaagaagtagccatagaaagagatcaggcaatcgcaacaagagaagaattgcacgcacaacatgcaagaggactacaagaaaaagatgcattacgcaaacaagtgagagaactaggagaaaaagcagatgaattacaattacaagtattccaatgcgaagcacagctattagcagtagaaggaagattaagaagacaacaattagaaaccttagtcttatcatcagacttagaagatggatcacccagaagatcacaagaattatcgttaccacaagatcttgaagacacacaattaagtgataaaggatgcttagcaggcgggggaagcccaaaacaaccctttgcagcattacatcaagaacaagtgctccgcaatccgcatgatgccggactcagtagcggtgaacctccagagaaagaaagaagaagattgaaagaaagctttgaaaattataggcgcaaaagagcactcagaaaaatgcaaaaaggatggagacaaggagaagaagatcgagaaaacacaaccggtagcgataatacagacacagaaggaagttaa

SEQ ID NO: 7129 - protein, 366 aa, synthetic construct
  REGION 1..366: note = Caspase_9__Homo_sapiens__A0A024R8I4
MSDYENDDECWSVLEGFRVTLTSVIDPSRITPYLRQCKVLNPDDEEQVLSDPNLVIRKRKVGVLLDILQRTGHKGYVAFLESLELYYPQLYKKVTGKEPARVFSMIIDASGESGLTQLLMTEVMKLQKKVQDLTALLSSKDDFIKELRVKDSLLRKHQERVQRLKEECEAGSRELKRCKEENYDLAMRLAHQSEEKGAALMRNRDLQLEIDQLKHSLMKAEDDCKVERKHTLKLRHAMEQRPSQELLWELQQEKALLQARVQELEASVQEGKLDRSSPYIQVLEEDWRQALRDHQEQANTIFSLRKDLRQGEARRLRCMEEKEMFELQCLALRKDSKMYKDRIEAILLQMEEVAIERDQSTQMEGL

SEQ ID NO: 7130 - RNA, 1101 nt, synthetic construct
  misc_feature 1..1101: note = Caspase_9__Homo_sapiens__EAW88219
  source 1..1101: mol_type = other RNA
atgtcggactacgagaacgatgacgagtgctggagcgtcctggagggcttccgggtgacgctcacctcggtcatcgacccctcacgcatcacaccttacctgcggcagtgcaaggtcctgaaccccgatgatgaggagcaggtgctcagcgaccccaacctggtcatccgcaaacggaaagtgggtgtgctcctggacatcctgcagcggaccggccacaagggctacgtggccttcctcgagagcctggagctctactacccgcagctgtacaagaaggtcacaggcaaggagccggcccgcgtcttctccatgatcatcgacgcgtccggggagtcaggcctgactcagctgctgatgactgaggtcatgaagctgcagaagaaggtgcaggacctgaccgcgctgctgagctccaaagatgacttcatcaaggagctgcgggtgaaggacagcctgctgcgcaagcaccaggagcgtgtgcagaggctcaaggaggagtgcgaggccggcagccgcgagctcaagcgctgcaaggaggagaactacgacctggccatgcgcctggcgcaccagagtgaggagaagggcgccgcgctcatgcggaaccgtgacctgcagctggagattgaccagctcaagcacagcctcatgaaggccgaggacgactgcaaggtggagcgcaagcacacgctgaagctcaggcacgccatggagcagcggcccagccaggagctgctgtgggagctgcagcaggagaaggccctgctccaggcccgggtgcaggagctggaggcctccgtccaggaggggaagctggacaggagcagcccctacatccaggtactggaggaggactggcggcaggcgctgcgggaccaccaggagcaggccaacaccatcttctccctgcgcaaggacctccgccagggcgaggcccgacgcctccggtgcatggaggagaaggagatgttcgagctgcagtgcctggcactacgtaaggactccaagatgtacaaggaccgcatcgaggccatcctgctgcagatggaggaggtcgccattgagcgggaccagagcacacaaatggaggggctgtga

SEQ ID NO: 7131 - RNA, 1101 nt, synthetic construct
  misc_feature 1..1101: note = derived and/or modified sequence opt1 fromCaspase_9__Homo_sapiens__EAW88219
  source 1..1101: mol_type = other RNA
atgagcgactacgagaacgacgacgagtgctggtccgtgctggagggcttccgcgtcaccctcaccagcgtgatcgacccctcccggatcacgccgtacctgcgccagtgcaaggtgctgaaccccgacgacgaggagcaggtcctcagcgaccccaacctggtgatccggaagcgcaaggtgggggtcctgctcgacatcctgcagcggaccggccacaaggggtacgtggccttcctggagtccctcgagctgtactacccccagctgtacaagaaggtgaccggcaaggagccggcccgcgtcttcagcatgatcatcgacgcgtccggggagagcggcctcacccagctgctgatgacggaggtgatgaagctccagaagaaggtgcaggacctgaccgccctgctctccagcaaggacgacttcatcaaggagctgcgggtcaaggactccctgctccgcaagcaccaggagcgggtgcagcgcctgaaggaggagtgcgaggccggcagccgggagctgaagcgctgcaaggaggagaactacgacctcgccatgcggctggcccaccagtccgaggagaagggggcggccctgatgcgcaaccgggacctccagctggagatcgaccagctgaagcacagcctcatgaaggccgaggacgactgcaaggtggagcgcaagcacaccctgaagctgcggcacgccatggagcagcgcccctcccaggagctcctgtgggagctgcagcaggagaaggcgctcctgcaggcccgggtccaggagctggaggccagcgtgcaggagggcaagctcgaccgctccagcccctacatccaggtgctggaggaggactggcggcaggccctgcgcgaccaccaggagcaggccaacaccatcttctccctccgcaaggacctgcggcagggggaggcgcgccggctgcgctgcatggaggagaaggagatgttcgagctccagtgcctggccctgcggaaggacagcaagatgtacaaggaccgcatcgaggccatcctcctgcagatggaggaggtcgccatcgagcgggaccagagcacgcagatggagggcctgtga

SEQ ID NO: 7132 - RNA, 1101 nt, synthetic construct
  misc_feature 1..1101: note = derived and/or modified sequence opt2 fromCaspase_9__Homo_sapiens__EAW88219
  source 1..1101: mol_type = other RNA
atgtccgactacgagaacgacgacgagtgctggtccgtcctcgagggcttccgcgtcaccctcacctccgtcatcgacccctcccgcatcaccccctacctccgccagtgcaaggtcctcaaccccgacgacgaggagcaggtcctctccgaccccaacctcgtcatccgcaagcgcaaggtcggcgtcctcctcgacatcctccagcgcaccggccacaagggctacgtcgccttcctcgagtccctcgagctctactacccccagctctacaagaaggtcaccggcaaggagcccgcccgcgtcttctccatgatcatcgacgcctccggcgagtccggcctcacccagctcctcatgaccgaggtcatgaagctccagaagaaggtccaggacctcaccgccctcctctcctccaaggacgacttcatcaaggagctccgcgtcaaggactccctcctccgcaagcaccaggagcgcgtccagcgcctcaaggaggagtgcgaggccggctcccgcgagctcaagcgctgcaaggaggagaactacgacctcgccatgcgcctcgcccaccagtccgaggagaagggcgccgccctcatgcgcaaccgcgacctccagctcgagatcgaccagctcaagcactccctcatgaaggccgaggacgactgcaaggtcgagcgcaagcacaccctcaagctccgccacgccatggagcagcgcccctcccaggagctcctctgggagctccagcaggagaaggccctcctccaggcccgcgtccaggagctcgaggcctccgtccaggagggcaagctcgaccgctcctccccctacatccaggtcctcgaggaggactggcgccaggccctccgcgaccaccaggagcaggccaacaccatcttctccctccgcaaggacctccgccagggcgaggcccgccgcctccgctgcatggaggagaaggagatgttcgagctccagtgcctcgccctccgcaaggactccaagatgtacaaggaccgcatcgaggccatcctcctccagatggaggaggtcgccatcgagcgcgaccagtccacccagatggagggcctctga

SEQ ID NO: 7133 - RNA, 1101 nt, synthetic construct
  misc_feature 1..1101: note = derived and/or modified sequence opt3 fromCaspase_9__Homo_sapiens__EAW88219
  source 1..1101: mol_type = other RNA
atgagcgactacgagaacgatgacgaatgctggtccgtgctggagggcttcagagtcaccctcacatctgttatcgatccctcaaggattactccttatcttcggcagtgtaaggtgctgaatccagacgatgaggaacaagtattgagtgacccgaacttagtgatacgcaaacgaaaggtcggggtgctgctagatatcctccagcgtacgggacacaaaggttacgttgcctttctggaaagccttgagctgtattacccccagttgtataagaaagtgaccggcaaggagcctgctagagtcttctccatgattatcgacgcatctggggaatcgggactcacacagctgctgatgactgaggtgatgaagctccaaaagaaggtacaggatttaaccgccctgctttcaagcaaagacgattttattaaggaattgagggttaaagacagtctgctacggaagcatcaggagcgcgtgcagagactcaaggaggaatgcgaggcgggctccagggaactgaaacggtgtaaggaggaaaattacgatcttgctatgcgcctggcccaccaatctgaggagaaaggtgcagccttgatgcgaaacagagacctccagctggaaatcgaccagttaaagcatagcctgatgaaagctgaggatgactgcaaggtcgaaaggaaacacacactcaaacttcggcatgcaatggagcagcgtccatcccaagaactgttgtgggagctacagcaggagaaggccctgctccaagctcgcgtgcaggaactggaggcctcagtgcaggaagggaaacttgatagaagtagcccctatatacaggtcctggaggaagactggaggcaagcgttgcgggatcaccaggagcaggcaaataccatcttctctctccgaaaggacctgcgccagggagaggccagaaggttacggtgtatggaagagaaagaaatgtttgagctgcaatgcctagctctccgcaaggattccaaaatgtacaaggacagaattgaggccatcctgcttcagatggaagaggttgcaattgaaagggatcagtcaactcagatggagggcttgtga

SEQ ID NO: 7134 - RNA, 1101 nt, synthetic construct
  misc_feature 1..1101: note = derived and/or modified sequence opt4 fromCaspase_9__Homo_sapiens__EAW88219
  source 1..1101: mol_type = other RNA
atgagcgactacgagaacgacgacgagtgctggagcgtgctggagggcttcagagtgaccctgaccagcgtgatcgaccccagcagaatcaccccctacctgagacagtgcaaggtgctgaaccccgacgacgaggagcaggtgctgagcgaccccaacctggtgatcagaaagagaaaggtgggcgtgctgctggacatcctgcagagaaccggccacaagggctacgtggccttcctggagagcctggagctgtactacccccagctgtacaagaaggtgaccggcaaggagcccgccagagtgttcagcatgatcatcgacgccagcggcgagagcggcctgacccagctgctgatgaccgaggtgatgaagctgcagaagaaggtgcaggacctgaccgccctgctgagcagcaaggacgacttcatcaaggagctgagagtgaaggacagcctgctgagaaagcaccaggagagagtgcagagactgaaggaggagtgcgaggccggcagcagagagctgaagagatgcaaggaggagaactacgacctggccatgagactggcccaccagagcgaggagaagggcgccgccctgatgagaaacagagacctgcagctggagatcgaccagctgaagcacagcctgatgaaggccgaggacgactgcaaggtggagagaaagcacaccctgaagctgagacacgccatggagcagagacccagccaggagctgctgtgggagctgcagcaggagaaggccctgctgcaggccagagtgcaggagctggaggccagcgtgcaggagggcaagctggacagaagcagcccctacatccaggtgctggaggaggactggagacaggccctgagagaccaccaggagcaggccaacaccatcttcagcctgagaaaggacctgagacagggcgaggccagaagactgagatgcatggaggagaaggagatgttcgagctgcagtgcctggccctgagaaaggacagcaagatgtacaaggacagaatcgaggccatcctgctgcagatggaggaggtggccatcgagagagaccagagcacccagatggagggcctgtga

SEQ ID NO: 7135 - RNA, 1101 nt, synthetic construct
  misc_feature 1..1101: note = derived and/or modified sequence opt5 fromCaspase_9__Homo_sapiens__EAW88219
  source 1..1101: mol_type = other RNA
atgagcgactacgagaacgatgacgaatgctggtccgtgctggagggcttcagagtcaccctcacatctgttatcgatcccagccggattacgccttatctgcgccagtgtaaggtgcttaatccggacgatgaggaacaagtgctgtccgaccccaacctcgtcatcagaaaacggaaggtgggggttctgcttgatattctgcagcgcaccggacacaaaggctacgtggcctttctcgaatctctggagctgtattaccctcagctctataagaaagtcacagggaaggagcccgctagagtgttcagcatgatcattgacgcctccggagaatctggcctgacccagcttctgatgacagaggttatgaagctccagaaaaaggtgcaagatctgaccgcgcttctgagctccaaagacgattttatcaaggaactccgggtcaaagacagcctgctgcgcaagcatcaggagagagtgcagcggctcaaggaggaatgcgaggctgggtctcgcgaactgaaaagatgtaaggaggaaaattacgatcttgccatgcggctggcccaccaatccgaggagaaaggagctgccctcatgcgcaacagagacctgcagcttgaaatcgaccagctgaagcatagcctcatgaaagctgaggatgactgcaaggtggaacggaaacacacactgaagctgcgccatgccatggagcagagaccttctcaagaactcctgtgggagcttcagcaggagaaggcgctgctccaagcccgggtccaggaactggaggcttccgttcaggaaggcaaacttgatagaagctctccctatattcaggtgctggaggaagactggcgccaagccctccgggatcaccaggagcaggctaataccatcttctccctgagaaaggacctgcgccagggcgaggcccggagactccgctgtatggaagagaaagaaatgtttgagctgcaatgccttgcgctgcggaaggatagcaaaatgtacaaggacagaattgaggccatcctcctgcagatggaagaggtggctattgaacgcgatcagtccacgcagatggaggggctgtga

SEQ ID NO: 7136 - RNA, 1101 nt, synthetic construct
  misc_feature 1..1101: note = derived and/or modified sequence opt6 fromCaspase_9__Homo_sapiens__EAW88219
  source 1..1101: mol_type = other RNA
atgagtgattacgaaaatgatgatgagtgctggagcgtattagaaggattcagagtaacattaacatcagtaatagacccaagtagaataacaccatacctaagacaatgcaaagtactaaatcccgatgacgaagaacaagtactatcagatccaaatctagtaataagaaaaagaaaagtaggagtactattagacatattacagagaacaggacataaaggatacgtagcattcctagaaagtttagaattatactatccacaactatataaaaaagtaactggaaaagaaccagcaagagtatttagtatgataatagacgcaagtggggaaagtggattaacacaactattgatgacagaagtaatgaaactacagaaaaaagtacaagacctaacagcgctactaagctcaaaagacgactttataaaggaactgagagtaaaagacagtttactaagaaaacaccaagaacgagttcaacgactcaaagaagaatgcgaagcaggaagcagagaattgaaaagatgcaaagaagaaaactatgatttagcaatgagattagcacatcaatcagaagaaaaaggagccgcactaatgcgaaacagagatctccaactagagatagatcaattaaaacatagtctaatgaaagcagaagacgattgcaaagtagaaagaaaacacacgctaaagctaagacatgcaatggaacaaagaccatcacaagaactactatgggaactacaacaagaaaaagcactattacaagcaagagtacaagaactagaagcatcagtccaagaaggaaaattagacagaagctcaccctatatccaagtcctggaagaagattggcgacaggcattaagagatcaccaagaacaagcaaacacaatattctcattaagaaaagatttaagacaaggtgaggcaagaagactaagatgcatggaggaaaaggaaatgttcgaattacaatgtctagcactaagaaaagatagcaagatgtataaagatagaatagaagctatattactacaaatggaagaagtagcaatagaaagagatcaatcaacacaaatggaaggactataa

SEQ ID NO: 7137 - protein, 416 aa, synthetic construct
  REGION 1..416: note = Caspase_9__Homo_sapiens__P55211
MDEADRRLLRRCRLRLVEELQVDQLWDALLSRELFRPHMIEDIQRAGSGSRRDQARQLIIDLETRGSQALPLFISCLEDTGQDMLASFLRTNRQAAKLSKPTLENLTPVVLRPEIRKPEVLRPETPRPVDIGSGGFGDVGALESLRGNADLAYILSMEPCGHCLIINNVNFCRESGLRTRTGSNIDCEKLRRRFSSLHFMVEVKGDLTAKKMVLALLELAQQDHGALDCCVVVILSHGCQASHLQFPGAVYGTDGCPVSVEKIVNIFNGTSCPSLGGKPKLFFIQACGGEQKDHGFEVASTSPEDESPGSNPEPDATPFQEGLRTFDQLDAISSLPTPSDIFVSYSTFPGFVSWRDPKSGSWYVETLDDIFEQWAHSEDLQSLLLRVANAVSVKGIYKQMPGCFNFLRKKLFFKTS

SEQ ID NO: 7138 - RNA, 1251 nt, synthetic construct
  misc_feature 1..1251: note = Caspase_9__Homo_sapiens__AAH02452
  source 1..1251: mol_type = other RNA
atggacgaagcggatcggcggctcctgcggcggtgccggctgcggctggtggaagagctgcaggtggaccagctctgggacgccctgctgagccgcgagctgttcaggccccatatgatcgaggacatccagcgggcaggctctggatctcggcgggatcaggccaggcagctgatcatagatctggagactcgagggagtcaggctcttcctttgttcatctcctgcttagaggacacaggccaggacatgctggcttcgtttctgcgaactaacaggcaagcagcaaagttgtcgaagccaaccctagaaaaccttaccccagtggtgctcagaccagagattcgcaaaccagaggttctcagaccggaaacacccagaccagtggacattggttctggaggatttggtgatgtcggtgctcttgagagtttgaggggaaatgcagatttggcttacatcctgagcatggagccctgtggccactgcctcattatcaacaatgtgaacttctgccgtgagtccgggctccgcacccgcactggctccaacatcgactgtgagaagttgcggcgtcgcttctcctcgctgcatttcatggtggaggtgaagggcgacctgactgccaagaaaatggtgctggctttgctggagctggcgcagcaggaccacggtgctctggactgctgcgtggtggtcattctctctcacggctgtcaggccagccacctgcagttcccaggggctgtctacggcacagatggatgccctgtgtcggtcgagaagattgtgaacatcttcaatgggaccagctgccccagcctgggagggaagcccaagctctttttcatccaggcctgtggtggggagcagaaagaccatgggtttgaggtggcctccacttcccctgaagacgagtcccctggcagtaaccccgagccagatgccaccccgttccaggaaggtttgaggaccttcgaccagctggacgccatatctagtttgcccacacccagtgacatctttgtgtcctactctactttcccaggttttgtttcctggagggaccccaagagtggctcctggtacgttgagaccctggacgacatctttgagcagtgggctcactctgaagacctgcagtccctcctgcttagggtcgctaatgctgtttcggtgaaagggatttataaacagatgcctggttgctttaatttcctccggaaaaaacttttctttaaaacatcataa

SEQ ID NO: 7139 - RNA, 1251 nt, synthetic construct
  misc_feature 1..1251: note = derived and/or modified sequence opt1 fromCaspase_9__Homo_sapiens__AAH02452
  source 1..1251: mol_type = other RNA
atggacgaggccgaccgccggctgctccgccggtgccgcctgcggctggtggaggagctccaggtcgaccagctgtgggacgccctgctcagccgcgagctgttccggccccacatgatcgaggacatccagcgcgcgggctccgggagccggcgcgaccaggcccggcagctgatcatcgacctcgagacccgcggctcccaggccctgccgctgttcatcagctgcctcgaggacaccgggcaggacatgctggcctccttcctgcggacgaaccgccaggccgcgaagctcagcaagcccaccctggagaacctgacccccgtggtgctccggcccgagatccgcaagccggaggtcctgcggcccgagacgccccgccccgtggacatcggctccgggggcttcggcgacgtgggggccctggagagcctccggggcaacgccgacctggcctacatcctgtccatggagccgtgcgggcactgcctcatcatcaacaacgtcaacttctgccgcgagagcggcctgcggacccgcaccgggtccaacatcgactgcgagaagctgcgccggcgcttcagctccctccacttcatggtggaggtgaagggcgacctgaccgcgaagaagatggtcctggccctcctggagctggcccagcaggaccacggcgccctcgactgctgcgtggtggtcatcctgagccacgggtgccaggcctcccacctccagttccccggcgcggtgtacgggaccgacggctgccccgtgagcgtcgagaagatcgtgaacatcttcaacggcacgtcctgccccagcctcgggggcaagccgaagctgttcttcatccaggcctgcgggggcgagcagaaggaccacgggttcgaggtggcctccaccagccccgaggacgagagccccggctccaaccccgagccggacgccacccccttccaggagggcctgcggaccttcgaccagctggacgccatcagctccctgcccacgcccagcgacatcttcgtctcctacagcaccttcccggggttcgtgtcctggcgcgaccccaagagcggctcctggtacgtggagaccctggacgacatcttcgagcagtgggcgcacagcgaggacctccagtccctgctgctccgggtcgccaacgccgtgagcgtgaaggggatctacaagcagatgcccggctgcttcaacttcctgcgcaagaagctgttcttcaagacctcctga

SEQ ID NO: 7140 - RNA, 1251 nt, synthetic construct
  misc_feature 1..1251: note = derived and/or modified sequence opt2 fromCaspase_9__Homo_sapiens__AAH02452
  source 1..1251: mol_type = other RNA
atggacgaggccgaccgccgcctcctccgccgctgccgcctccgcctcgtcgaggagctccaggtcgaccagctctgggacgccctcctctcccgcgagctcttccgcccccacatgatcgaggacatccagcgcgccggctccggctcccgccgcgaccaggcccgccagctcatcatcgacctcgagacccgcggctcccaggccctccccctcttcatctcctgcctcgaggacaccggccaggacatgctcgcctccttcctccgcaccaaccgccaggccgccaagctctccaagcccaccctcgagaacctcacccccgtcgtcctccgccccgagatccgcaagcccgaggtcctccgccccgagaccccccgccccgtcgacatcggctccggcggcttcggcgacgtcggcgccctcgagtccctccgcggcaacgccgacctcgcctacatcctctccatggagccctgcggccactgcctcatcatcaacaacgtcaacttctgccgcgagtccggcctccgcacccgcaccggctccaacatcgactgcgagaagctccgccgccgcttctcctccctccacttcatggtcgaggtcaagggcgacctcaccgccaagaagatggtcctcgccctcctcgagctcgcccagcaggaccacggcgccctcgactgctgcgtcgtcgtcatcctctcccacggctgccaggcctcccacctccagttccccggcgccgtctacggcaccgacggctgccccgtctccgtcgagaagatcgtcaacatcttcaacggcacctcctgcccctccctcggcggcaagcccaagctcttcttcatccaggcctgcggcggcgagcagaaggaccacggcttcgaggtcgcctccacctcccccgaggacgagtcccccggctccaaccccgagcccgacgccacccccttccaggagggcctccgcaccttcgaccagctcgacgccatctcctccctccccaccccctccgacatcttcgtctcctactccaccttccccggcttcgtctcctggcgcgaccccaagtccggctcctggtacgtcgagaccctcgacgacatcttcgagcagtgggcccactccgaggacctccagtccctcctcctccgcgtcgccaacgccgtctccgtcaagggcatctacaagcagatgcccggctgcttcaacttcctccgcaagaagctcttcttcaagacctcctga

SEQ ID NO: 7141 - RNA, 1251 nt, synthetic construct
  misc_feature 1..1251: note = derived and/or modified sequence opt3 fromCaspase_9__Homo_sapiens__AAH02452
  source 1..1251: mol_type = other RNA
atggacgaggccgatagaaggctgctccggcgctgccgacttcgtctggtggaagagttgcaggtcgaccaattatgggatgctctgctaagcagagaactcttcaggccccacatgatcgaggacattcagcgggcaggctccgggtctcgcagagatcaggccaggcagctgataatcgaccttgaaacccggggatcacaagcgctgcctttgtttattagttgtctcgaggatacaggtcaggacatgctggctagcttcctgcgcactaaccgacaggccgcaaagctctccaaaccaacgttagagaatctgaccccggttgtgcttagacccgaaatcaggaagcctgaggtattgcggccagaaacaccccgtcctgtggatattggctctgggggatttggcgacgtcggtgccctggagtcgctacgcgggaacgctgatctcgcatacatcctgtcaatggagccatgcggacattgtcttataatcaataacgtgaatttctgcagagaaagcggcctgaggactcggaccggcagtaacattgactgtgagaaattgcgacgcagattttcctctctccacttcatggttgaagtgaagggggatctgacagccaaaaagatggtcttagctctgctcgagcttgcccagcaagaccatggagcgctggactgctgtgtggtagttatcttgagccacggttgccaggcatcccatctacagtttcccggcgccgtgtatgggaccgatggatgtcctgtctcagtggaaaagattgtgaatatcttcaacggcacaagttgcccaagcctgggtgggaaaccgaagctctttttcatacaggcttgtggaggcgagcaaaaagaccacggctttgaggtcgcctctacttcccccgaagatgagtcacctgggagcaatccagaacccgacgcaacccctttccaggagggactgaggacgtttgatcagcttgacgctattagttctctgccaactccctccgatatcttcgttagctactcgaccttcccgggttttgtgtcttggcgggaccctaagtccggctcatggtatgtagaaacattggatgacattttcgagcaatgggcccacagtgaggatctccagagcctgttactgcgcgtggcgaacgccgtctccgtgaaagggatctacaagcagatgcccggatgctttaatttcctaagaaagaaactctttttcaagacttcttga

SEQ ID NO: 7142 - RNA, 1251 nt, synthetic construct
  misc_feature 1..1251: note = derived and/or modified sequence opt4 fromCaspase_9__Homo_sapiens__AAH02452
  source 1..1251: mol_type = other RNA
atggacgaggccgacagaagactgctgagaagatgcagactgagactggtggaggagctgcaggtggaccagctgtgggacgccctgctgagcagagagctgttcagaccccacatgatcgaggacatccagagagccggcagcggcagcagaagagaccaggccagacagctgatcatcgacctggagaccagaggcagccaggccctgcccctgttcatcagctgcctggaggacaccggccaggacatgctggccagcttcctgagaaccaacagacaggccgccaagctgagcaagcccaccctggagaacctgacccccgtggtgctgagacccgagatcagaaagcccgaggtgctgagacccgagacccccagacccgtggacatcggcagcggcggcttcggcgacgtgggcgccctggagagcctgagaggcaacgccgacctggcctacatcctgagcatggagccctgcggccactgcctgatcatcaacaacgtgaacttctgcagagagagcggcctgagaaccagaaccggcagcaacatcgactgcgagaagctgagaagaagattcagcagcctgcacttcatggtggaggtgaagggcgacctgaccgccaagaagatggtgctggccctgctggagctggcccagcaggaccacggcgccctggactgctgcgtggtggtgatcctgagccacggctgccaggccagccacctgcagttccccggcgccgtgtacggcaccgacggctgccccgtgagcgtggagaagatcgtgaacatcttcaacggcaccagctgccccagcctgggcggcaagcccaagctgttcttcatccaggcctgcggcggcgagcagaaggaccacggcttcgaggtggccagcaccagccccgaggacgagagccccggcagcaaccccgagcccgacgccacccccttccaggagggcctgagaaccttcgaccagctggacgccatcagcagcctgcccacccccagcgacatcttcgtgagctacagcaccttccccggcttcgtgagctggagagaccccaagagcggcagctggtacgtggagaccctggacgacatcttcgagcagtgggcccacagcgaggacctgcagagcctgctgctgagagtggccaacgccgtgagcgtgaagggcatctacaagcagatgcccggctgcttcaacttcctgagaaagaagctgttcttcaagaccagctga

SEQ ID NO: 7143 - RNA, 1251 nt, synthetic construct
  misc_feature 1..1251: note = derived and/or modified sequence opt5 fromCaspase_9__Homo_sapiens__AAH02452
  source 1..1251: mol_type = other RNA
atggacgaggccgatagacggctgctccgcagatgccggctgcgccttgtggaggaactgcaggtcgaccaactctgggatgctctgcttagcagagaactgttccggccccacatgatcgaggacattcagcgcgccggctccgggtctagacgggatcaggcgcgccagctcatcattgacctggaaaccagaggaagccaagctctgcctctctttatctcctgtctggaggatacaggccaggacatgcttgcctctttcctgcggacgaaccgccaggccgctaagctcagcaaaccgaccctggagaatcttacacccgttgtgctgagacctgaaattcggaagcccgaggtgctccgccctgaaacccccagacctgtcgatatcgggtccggaggctttggggacgtgggagccctggagtctctgcggggcaacgctgatctcgcctacatcctgagcatggagccgtgcggccattgtcttattatcaataacgttaatttctgcagagaatccgggctgcgcacacggaccggaagcaacattgactgtgagaaactcagacgccggttttcttccctgcacttcatggtggaagtcaagggcgatcttacagcgaaaaagatggtgctggccctcctggagctggctcagcaagaccatggggccctcgactgctgtgttgtggtcatcctgagccacggatgccaggcttctcatcttcagtttcccggcgccgtgtatgggaccgatggatgtcctgtgtccgtcgaaaagattgttaatatcttcaacggcacgagctgcccctctctgggcgggaaacctaagctctttttcattcaggcgtgtggaggcgagcaaaaagaccacgggtttgaggtggcctccaccagccccgaagatgagtccccgggatctaatcctgaacccgacgctacacctttccaggagggcctgagaacctttgatcagcttgacgccatcagctccctgcccacacccagcgatatcttcgtgtcttactccaccttccctgggtttgtcagctggcgcgacccgaagtctggaagctggtatgtggaaacgctcgatgacattttcgagcaatgggctcactccgaggatctgcagtctctgctcctgcgggttgccaacgccgtgagcgtcaaaggcatctacaagcagatgcccggctgctttaatttccttagaaagaaactgtttttcaagacatcctga

SEQ ID NO: 7144 - RNA, 1251 nt, synthetic construct
  misc_feature 1..1251: note = derived and/or modified sequence opt6 fromCaspase_9__Homo_sapiens__AAH02452
  source 1..1251: mol_type = other RNA
atggatgaagccgatagaagactactaagaagatgcagattaagactagtagaagagttacaagtagaccaactatgggacgctttattatcaagagaattattcagaccccatatgattgaagatatacaaagagcaggatcaggatcaagacgagatcaagctagacaactaataatagacctagaaactagaggatcacaagctttaccactattcatatcatgtttggaagatacgggacaagatatgttagcctcattcttaagaactaatagacaagcagcaaaactatcaaaaccaacattagaaaacttaacaccagttgtattacgaccagaaatacgaaaacctgaagtactaagaccagaaactccccgaccagtagacataggatcaggaggttttggagacgtaggagcactagaatcattaagaggtaacgctgatttagcttatatattaagcatggaaccctgcggacattgtctaataataaataacgtaaatttttgtagagaatcaggattaagaacgcgcacaggatctaatatagattgtgaaaaattaagaagaagattctcaagcttacatttcatggtagaagtaaaaggtgacctaacagcaaaaaaaatggtactagcattactagaattagctcaacaagatcacggagcactagattgttgtgtagtagtaatattatctcatggatgtcaagcaagtcatctccaattcccaggtgcagtatatggaacagacggatgcccagtatcagtagaaaaaatagtaaatatctttaacggaacctcatgtccaagccttggaggaaaaccaaaattattctttattcaagcatgcggaggagaacaaaaagatcacggatttgaagtcgcatcaacatcacctgaagatgaatccccagggtcaaatccagaacctgacgcaacacctttccaagaaggattaagaacattcgatcaattagatgccataagctcattaccaacaccatcagatatattcgtaagttattcaacattcccaggatttgtatcctggcgagatccaaaaagtggaagttggtatgtagaaacactagacgacatatttgaacaatgggcacattcagaagatctacaatcattactccttagagtcgccaatgcagtatctgtaaaaggaatatataaacaaatgcctggatgttttaatttcttaagaaaaaaattattttttaaaacaagttaa

SEQ ID NO: 7145 - protein, 536 aa, synthetic construct; identical to SEQ ID NO: 7121
  REGION 1..536: note = Caspase_9__Homo_sapiens__Q9H257

SEQ ID NO: 7146 - RNA, 1611 nt, synthetic construct; identical to SEQ ID NO: 7122
  misc_feature 1..1611: note = Caspase_9__Homo_sapiens__BAF84770
  source 1..1611: mol_type = other RNA

SEQ ID NO: 7147 - RNA, 1611 nt, synthetic construct; identical to SEQ ID NO: 7123
  misc_feature 1..1611: note = derived and/or modified sequence opt1 fromCaspase_9__Homo_sapiens__BAF84770
  source 1..1611: mol_type = other RNA

SEQ ID NO: 7148 - RNA, 1611 nt, synthetic construct; identical to SEQ ID NO: 7124
  misc_feature 1..1611: note = derived and/or modified sequence opt2 fromCaspase_9__Homo_sapiens__BAF84770
  source 1..1611: mol_type = other RNA

SEQ ID NO: 7149 - RNA, 1611 nt, synthetic construct; identical to SEQ ID NO: 7125
  misc_feature 1..1611: note = derived and/or modified sequence opt3 fromCaspase_9__Homo_sapiens__BAF84770
  source 1..1611: mol_type = other RNA

SEQ ID NO: 7150 - RNA, 1611 nt, synthetic construct; identical to SEQ ID NO: 7126
  misc_feature 1..1611: note = derived and/or modified sequence opt4 fromCaspase_9__Homo_sapiens__BAF84770
  source 1..1611: mol_type = other RNA

SEQ ID NO: 7151 - RNA, 1611 nt, synthetic construct; identical to SEQ ID NO: 7127
  misc_feature 1..1611: note = derived and/or modified sequence opt5 fromCaspase_9__Homo_sapiens__BAF84770
  source 1..1611: mol_type = other RNA

SEQ ID NO: 7152 - RNA, 1611 nt, synthetic construct
  misc_feature 1..1611: note = derived and/or modified sequence opt6 fromCaspase_9__Homo_sapiens__BAF84770
  source 1..1611: mol_type = other RNA
atgagtgactacgaaaacgacgatgaatgttggagcgtgttagaaggatttagggtaactttgacctcagtaattgacccatcaagaataacaccatatctgagacaatgtaaagtactaaacccagatgatgaagaacaagtactatcagatccaaatctagtaataagaaaaaggaaagtaggagtactacttgatattctgcaaagaacaggacataaaggatacgttgcatttctcgagtcattagaactatattacccacaactatataaaaaagtaacaggaaaagaaccagcaagagttttcagtatgataatagatgcaagtggagaaagtggactaacacaactattgatgaccgaagtaatgaaattgcaaaaaaaagtacaagacttaacagcattattgtcatcaaaagacgattttataaaagaactaagagtaaaagacagtctactaagaaaacaccaagaacgagtacaacgactaaaagaagaatgcgaagcaggcagtagagaattaaaaagatgcaaagaagaaaactatgatctagcaatgagactagcacatcaaagtgaagaaaaaggagccgcattaatgcggaatcgagatttacaactcgaaatagaccagttaaaacacagtctaatgaaagcggaagatgattgtaaagtagaacgcaaacacactcttaaactcagacacgccatggagcaaaggccaagtcaagaactattatgggaattacaacaagaaaaagctctattacaagcacgagtacaagaactagaagcatccgtacaagaagggaaacttgatagaagtagtccatatatacaagtactagaagaagactggagacaagcattgcgagaccatcaggaacaagcaaacacaatattcagtcttaggaaagatctaagacagggggaagcacgaagacttagatgcatggaagaaaaagaaatgtttgaactacaatgcctggccctaagaaaagactcaaaaatgtataaagatagaattgaagcaatattacttcaaatggaagaagtggcaattgaaagagaccaagcaatagcaactcgagaagaattacacgcacaacatgcaaggggattacaagaaaaagatgccttaagaaaacaagtaagagaactaggggaaaaagcagatgaactccaattacaagtattccagtgcgaggcacaactcctagctgtagaaggaagattaagaaggcagcaactagaaacattagtattaagctcagacttagaagatgggtcaccaagacgaagccaagaattatctttaccgcaagacctagaagacacacagttatcagataagggatgcttagccggtggaggaagcccgaaacaaccatttgcagcgttacatcaagaacaagtgctaagaaacccacatgatgctggactatcaagcggagaaccaccagaaaaagaaagaagaagactaaaagaaagtttcgaaaattataggagaaaaagagcactaagaaaaatgcaaaaaggttggagacagggagaagaagatagagaaaacacgacaggaagcgataacactgacacagaagggtcataa

SEQ ID NO: 7153 - protein, 75 aa, synthetic construct
  REGION 1..75: note = Cytochrome_c__Homo_sapiens__A0A024R9B7
MAPEVLPKPRMRGLLARRLRNHMAVAFVLSLGVAALYKFRVADQRKKAYADFYRNYDVMKDFEEMRKAGIFQSVK

SEQ ID NO: 7154 - RNA, 228 nt, synthetic construct
  misc_feature 1..228: note = Cytochrome_c__Homo_sapiens__EAW91792
  source 1..228: mol_type = other RNA
atggctcccgaagttttgccaaaacctcggatgcgtggccttctggccaggcgtctgcgaaatcatatggctgtagcattcgtgctatccctgggggttgcagctttgtataagtttcgtgtggctgatcaaagaaagaaggcatacgcagatttctacagaaactacgatgtcatgaaagattttgaggagatgaggaaggctggtatctttcagagtgtaaagtaa

SEQ ID NO: 7155 - RNA, 228 nt, synthetic construct
  misc_feature 1..228: note = derived and/or modified sequence opt1 fromCytochrome_c__Homo_sapiens__EAW91792
  source 1..228: mol_type = other RNA
atggcccccgaggtgctgccgaagccccgcatgcggggcctcctggcccgccggctgcgcaaccacatggcggtcgccttcgtgctcagcctgggggtggccgccctgtacaagttccgggtcgccgaccagcgcaagaaggcgtacgccgacttctaccggaactacgacgtgatgaaggacttcgaggagatgcgcaaggccggcatcttccagtccgtgaagtga

SEQ ID NO: 7156 - RNA, 228 nt, synthetic construct
  misc_feature 1..228: note = derived and/or modified sequence opt2 fromCytochrome_c__Homo_sapiens__EAW91792
  source 1..228: mol_type = other RNA
atggcccccgaggtcctccccaagccccgcatgcgcggcctcctcgcccgccgcctccgcaaccacatggccgtcgccttcgtcctctccctcggcgtcgccgccctctacaagttccgcgtcgccgaccagcgcaagaaggcctacgccgacttctaccgcaactacgacgtcatgaaggacttcgaggagatgcgcaaggccggcatcttccagtccgtcaagtga

SEQ ID NO: 7157 - RNA, 228 nt, synthetic construct
  misc_feature 1..228: note = derived and/or modified sequence opt3 fromCytochrome_c__Homo_sapiens__EAW91792
  source 1..228: mol_type = other RNA
atggcccccgaggtgctgcctaagccaagaatgaggggcctccttgctcggcgcctgcgaaaccacatggcagtcgccttcgttttgagcttaggggtggcggctctgtacaaatttcgtgtagccgaccagagaaagaaagcatatgccgatttctacaggaattatgacgtgatgaaggattttgaagagatgcggaaagctggaatcttccaatccgtcaagtga

SEQ ID NO: 7158 - RNA, 228 nt, synthetic construct
  misc_feature 1..228: note = derived and/or modified sequence opt4 fromCytochrome_c__Homo_sapiens__EAW91792
  source 1..228: mol_type = other RNA
atggcccccgaggtgctgcccaagcccagaatgagaggcctgctggccagaagactgagaaaccacatggccgtggccttcgtgctgagcctgggcgtggccgccctgtacaagttcagagtggccgaccagagaaagaaggcctacgccgacttctacagaaactacgacgtgatgaaggacttcgaggagatgagaaaggccggcatcttccagagcgtgaagtga

SEQ ID NO: 7159 - RNA, 228 nt, synthetic construct
  misc_feature 1..228: note = derived and/or modified sequence opt5 fromCytochrome_c__Homo_sapiens__EAW91792
  source 1..228: mol_type = other RNA
atggcccccgaggtgctgcctaagccgagaatgcggggcctcctggctcgcagacttcggaaccacatggccgtcgcgttcgttctgagcctcggggtggctgccctgtacaaatttcgcgtggccgaccagagaaagaaggcttatgccgatttctaccggaattatgacgtcatgaaagattttgaagagatgcgcaaagctggaatcttccaatccgtgaagtga

SEQ ID NO: 7160 - RNA, 228 nt, synthetic construct
  misc_feature 1..228: note = derived and/or modified sequence opt6 fromCytochrome_c__Homo_sapiens__EAW91792
  source 1..228: mol_type = other RNA
atggcaccagaagtactaccaaaaccaagaatgagaggactattagcaagaagattaagaaatcacatggcagtagcatttgtattaagcttaggagtagcagcactatataaatttagagtagcagatcaaagaaaaaaagcatatgcagatttctatagaaattacgatgtaatgaaagatttcgaagaaatgagaaaagcaggaatatttcaatcagtaaaataa

SEQ ID NO: 7161 - protein, 23 aa, synthetic construct
  REGION 1..23: note = Cytochrome_c__Homo_sapiens__A0A024RAP6
MCLYFGSAFATPFLVVRHQLLKT

SEQ ID NO: 7162 - RNA, 72 nt, synthetic construct
  misc_feature 1..72: note = Cytochrome_c__Homo_sapiens__EAW95922
  source 1..72: mol_type = other RNA
atgtgtttgtactttggatctgcatttgctacacccttccttgtagtaagacaccaactgcttaaaacataa

SEQ ID NO: 7163 - RNA, 72 nt, synthetic construct
  misc_feature 1..72: note = derived and/or modified sequence opt1 fromCytochrome_c__Homo_sapiens__EAW95922
  source 1..72: mol_type = other RNA
atgtgcctgtacttcggcagcgccttcgccacccccttcctcgtggtccgccaccagctgctgaagacctga

SEQ ID NO: 7164 - RNA, 72 nt, synthetic construct
  misc_feature 1..72: note = derived and/or modified sequence opt2 fromCytochrome_c__Homo_sapiens__EAW95922
  source 1..72: mol_type = other RNA
atgtgcctctacttcggctccgccttcgccacccccttcctcgtcgtccgccaccagctcctcaagacctga

SEQ ID NO: 7165 - RNA, 72 nt, synthetic construct
  misc_feature 1..72: note = derived and/or modified sequence opt3 fromCytochrome_c__Homo_sapiens__EAW95922
  source 1..72: mol_type = other RNA
atgtgcctgtacttcggcagcgcctttgctacccccttcctcgtggtcagacaccagcttctgaagacatga

SEQ ID NO: 7166 - RNA, 72 nt, synthetic construct
  misc_feature 1..72: note = derived and/or modified sequence opt4 fromCytochrome_c__Homo_sapiens__EAW95922
  source 1..72: mol_type = other RNA
atgtgcctgtacttcggcagcgccttcgccacccccttcctggtggtgagacaccagctgctgaagacctga

SEQ ID NO: 7167 - RNA, 72 nt, synthetic construct
  misc_feature 1..72: note = derived and/or modified sequence opt5 fromCytochrome_c__Homo_sapiens__EAW95922
  source 1..72: mol_type = other RNA
atgtgcctgtacttcggcagcgcctttgctacccccttcctcgtggtcagacaccagctgcttaagacatga

SEQ ID NO: 7168 - RNA, 72 nt, synthetic construct
  misc_feature 1..72: note = derived and/or modified sequence opt6 fromCytochrome_c__Homo_sapiens__EAW95922
  source 1..72: mol_type = other RNA
atgtgtctatatttcggttcagctttcgctacacctttccttgtagttagacatcaacttctaaaaacataa

SEQ ID NO: 7169 - protein, 152 aa, synthetic construct
  REGION 1..152: note = Cytochrome_c__Homo_sapiens__A0A024RBN6
MIVLRLMPVGGRRPIVTSFGGCSTAPRANFPLPLPALRQSRSKMAVVGVSSVSRLLGRSRPQLGRPMSSGAHGEEGSARMWKTLTFFVALPGVAVSMLNVYLKSHHGEHERPEFIAYPHLRIRTKPFPWGDGNHTLFHNPHVNPLPTGYEDE

SEQ ID NO: 7170 - RNA, 459 nt, synthetic construct
  misc_feature 1..459: note = Cytochrome_c__Homo_sapiens__EAW98190
  source 1..459: mol_type = other RNA
atgatagtgctcaggttaatgccagtgggagggcggcgcccaatagtaacttcctttggaggttgtagtaccgcccccagagccaattttccacttccgcttccggcgctgcggcagtccagatcaaaaatggcggtagttggtgtgtcctcggtttctcggctgctgggtcggtcccgcccacagctggggcggcctatgtcgagtggcgcccatggcgaagagggctcagctcgcatgtggaagactctcaccttcttcgtcgcgctccccggggtggcagtcagcatgctgaatgtgtacctgaagtcgcaccacggagagcacgagagacccgagttcatcgcctacccccatctccgcatcaggaccaagccgtttccctggggagatggtaaccatactctattccataaccctcatgtgaatccacttccaactggctacgaagatgaataa

SEQ ID NO: 7171 - RNA, 459 nt, synthetic construct
  misc_feature 1..459: note = derived and/or modified sequence opt1 fromCytochrome_c__Homo_sapiens__EAW98190
  source 1..459: mol_type = other RNA
atgatcgtgctgcgcctgatgcccgtcggcgggcggcgcccgatcgtgaccagcttcggcgggtgctccaccgcgccccgggccaacttccccctgcccctgccggccctccgccagagccggtccaagatggccgtggtcggcgtgagctccgtgagccgcctgctggggcggtcccgcccccagctcggccggcccatgagctccggcgcccacggggaggagggcagcgcccgcatgtggaagacgctgaccttcttcgtcgccctgcccggggtggcggtgtccatgctcaacgtctacctcaagagccaccacggcgagcacgagcggccggagttcatcgcctacccccacctccgcatccggaccaagcccttcccctggggcgacgggaaccacaccctgttccacaacccgcacgtgaaccccctgcccacgggctacgaggacgagtga

SEQ ID NO: 7172 - RNA, 459 nt, synthetic construct
  misc_feature 1..459: note = derived and/or modified sequence opt2 fromCytochrome_c__Homo_sapiens__EAW98190
  source 1..459: mol_type = other RNA
atgatcgtcctccgcctcatgcccgtcggcggccgccgccccatcgtcacctccttcggcggctgctccaccgccccccgcgccaacttccccctccccctccccgccctccgccagtcccgctccaagatggccgtcgtcggcgtctcctccgtctcccgcctcctcggccgctcccgcccccagctcggccgccccatgtcctccggcgcccacggcgaggagggctccgcccgcatgtggaagaccctcaccttcttcgtcgccctccccggcgtcgccgtctccatgctcaacgtctacctcaagtcccaccacggcgagcacgagcgccccgagttcatcgcctacccccacctccgcatccgcaccaagcccttcccctggggcgacggcaaccacaccctcttccacaacccccacgtcaaccccctccccaccggctacgaggacgagtga

SEQ ID NO: 7173 - RNA, 459 nt, synthetic construct
  misc_feature 1..459: note = derived and/or modified sequence opt3 fromCytochrome_c__Homo_sapiens__EAW98190
  source 1..459: mol_type = other RNA
atgatcgtgctgagactcatgcccgtcggcgggaggcggcctattgttaccagcttcggaggttgctccacagccccacgcgctaactttccgcttcccctgcctgcattgcgacagtctcgttcaaagatggccgtggtaggcgtgagtagcgtctccagattactggggaggtctcggccacaactaggacgccccatgtcgtcaggcgcgcacggtgaggaagggagcgctagaatgtggaaaactctcacgttctttgtggccctgcctggagttgcagtgagtatgcttaatgtctacctgaagtcccatcacggcgagcatgaaaggccagagttcatagcctatccccacttgcggatccgcaccaaaccttttccatggggcgacgggaaccatacactcttccacaatccgcacgtgaaccccctgcctactggatacgaagatgagtga

SEQ ID NO: 7174 - RNA, 459 nt, synthetic construct
  misc_feature 1..459: note = derived and/or modified sequence opt4 fromCytochrome_c__Homo_sapiens__EAW98190
  source 1..459: mol_type = other RNA
atgatcgtgctgagactgatgcccgtgggcggcagaagacccatcgtgaccagcttcggcggctgcagcaccgcccccagagccaacttccccctgcccctgcccgccctgagacagagcagaagcaagatggccgtggtgggcgtgagcagcgtgagcagactgctgggcagaagcagaccccagctgggcagacccatgagcagcggcgcccacggcgaggagggcagcgccagaatgtggaagaccctgaccttcttcgtggccctgcccggcgtggccgtgagcatgctgaacgtgtacctgaagagccaccacggcgagcacgagagacccgagttcatcgcctacccccacctgagaatcagaaccaagcccttcccctggggcgacggcaaccacaccctgttccacaacccccacgtgaaccccctgcccaccggctacgaggacgagtga

SEQ ID NO: 7175 - RNA, 459 nt, synthetic construct
  misc_feature 1..459: note = derived and/or modified sequence opt5 fromCytochrome_c__Homo_sapiens__EAW98190
  source 1..459: mol_type = other RNA
atgatcgtgctgagactcatgcccgtcggcgggcggcgccctattgttaccagcttcggaggctgctccacagccccgagagctaactttcccctgcctcttcccgccctgcggcagtctcgcagcaagatggcggtggtgggggtctcctctgtgagcagactcctgggacggtcccgccctcaacttggcagacccatgtctagcggggctcacggagaggaaggctccgcccggatgtggaaaacgctgaccttctttgttgccctccctggcgtggctgtcagcatgctgaatgtgtacctgaagtctcatcacggggagcatgaacgcccggagttcatcgcctatccccacctccggattagaacaaaaccttttccctggggagacggcaaccataccctgttccacaatcctcacgttaacccccttccgacagggtacgaagatgagtga

SEQ ID NO: 7176 - RNA, 459 nt, synthetic construct
  misc_feature 1..459: note = derived and/or modified sequence opt6 fromCytochrome_c__Homo_sapiens__EAW98190
  source 1..459: mol_type = other RNA
atgatagtattaagactaatgccagtaggaggaagaagaccaatagtaacatcattcggaggatgctcaacagcaccaagagcaaacttcccactaccactaccagcactaagacaatcaagatcaaaaatggcagtagtaggagtatcatcagtaagtagactattaggaagatcaagaccacaactaggaagaccaatgtcatcaggagcacacggagaagaaggatcagcaagaatgtggaaaacactaacattcttcgtagcattaccaggagtcgcagtatcaatgttaaacgtatacttaaaatcacaccacggcgaacacgaaagaccagaatttatagcatacccacacttaagaatacgaacaaaaccattcccatggggagatggaaatcacacactattccacaacccacacgtaaacccactaccaacaggatacgaagacgaataa

SEQ ID NO: 7177 - protein, 268 aa, synthetic construct
  REGION 1..268: note = Cytochrome_c__Homo_sapiens__A0A024RBY9
MGLSPSAPAVAVQASNASASPPSGCPMHEGKMKGCPVNTEPSGPTCEKKTYSVPAHQERAYEYVECPIRGTAAENKENLDPSNLMPPPNQTPAPDQPFALSTVREESSIPRADSEKKWVYPSEQMFWNAMLKKGWKWKDEDISQKDMYNIIRIHNQNNEQAWKEILKWEALHAAECPCGPSLIRFGGKAKEYSPRARIRSWMGYELPFDRHDWIINRCGTEVRYVIDYYDGGEVNKDYQFTILDVRPALDSLSAVWDRMKVAWWRWTS

SEQ ID NO: 7178 - RNA, 807 nt, synthetic construct
  misc_feature 1..807: note = Cytochrome_c__Homo_sapiens__EAW98784
  source 1..807: mol_type = other RNA
atgggtttgtctccatctgctcctgctgttgcagttcaggcctcaaatgcttcagcgtccccaccttcaggatgcccgatgcatgaagggaaaatgaaaggctgtccagtgaatacagagccatctggcccaacctgtgagaagaaaacatactctgtgcctgcccaccaggaacgcgcctatgagtacgtggagtgtcccattaggggcactgcggctgagaataaggagaacctagatccttcaaatctgatgccaccaccaaatcaaacaccagctccagatcagccatttgcattgtctactgtcagagaagagtcatccattccgagagcagattcagagaaaaagtgggtttacccttctgagcagatgttctggaatgcaatgttaaagaaagggtggaagtggaaggatgaggatatcagtcagaaggatatgtataatatcattagaattcacaatcagaataacgagcaggcttggaaggagattttgaagtgggaagcccttcatgctgcagagtgtccttgtggtccatcattgatccggtttggagggaaagcaaaagagtattcaccaagggcacgaattcgttcctggatggggtatgagttgccttttgataggcacgattggatcataaaccgttgcgggacagaagttagatatgtgattgattattatgatggtggtgaagtcaacaaggactaccagttcaccatcctggacgtccgtcctgccttagattcactttcggcagtatgggacagaatgaaagtcgcttggtggcgttggacctcgtaa

SEQ ID NO: 7179 - RNA, 807 nt, synthetic construct
  misc_feature 1..807: note = derived and/or modified sequence opt1 fromCytochrome_c__Homo_sapiens__EAW98784
  source 1..807: mol_type = other RNA
atgggcctgagcccctccgccccggccgtggcggtccaggccagcaacgcctccgccagcccgccctccgggtgccccatgcacgagggcaagatgaaggggtgccccgtgaacaccgagcccagcggcccgacctgcgagaagaagacgtactccgtgcccgcccaccaggagcgcgcgtacgagtacgtcgagtgccccatccgggggaccgccgccgagaacaaggagaacctcgaccccagcaacctgatgcccccgcccaaccagacccccgcccccgaccagcccttcgcgctgtccaccgtgcgcgaggagagctccatcccgcgggccgacagcgagaagaagtgggtgtacccctccgagcagatgttctggaacgccatgctcaagaagggctggaagtggaaggacgaggacatcagccagaaggacatgtacaacatcatccgcatccacaaccagaacaacgagcaggcctggaaggagatcctgaagtgggaggccctgcacgcggccgagtgcccctgcggcccctccctcatccggttcgggggcaaggccaaggagtacagcccgcgcgcccggatccgctcctggatggggtacgagctgcccttcgaccggcacgactggatcatcaaccgctgcggcacggaggtccggtacgtgatcgactactacgacgggggcgaggtgaacaaggactaccagttcaccatcctggacgtccgccccgccctcgacagcctgtccgcggtgtgggaccggatgaaggtggcctggtggcgctggaccagctga

SEQ ID NO: 7180 - RNA, 807 nt, synthetic construct
  misc_feature 1..807: note = derived and/or modified sequence opt2 fromCytochrome_c__Homo_sapiens__EAW98784
  source 1..807: mol_type = other RNA
atgggcctctccccctccgcccccgccgtcgccgtccaggcctccaacgcctccgcctcccccccctccggctgccccatgcacgagggcaagatgaagggctgccccgtcaacaccgagccctccggccccacctgcgagaagaagacctactccgtccccgcccaccaggagcgcgcctacgagtacgtcgagtgccccatccgcggcaccgccgccgagaacaaggagaacctcgacccctccaacctcatgcccccccccaaccagacccccgcccccgaccagcccttcgccctctccaccgtccgcgaggagtcctccatcccccgcgccgactccgagaagaagtgggtctacccctccgagcagatgttctggaacgccatgctcaagaagggctggaagtggaaggacgaggacatctcccagaaggacatgtacaacatcatccgcatccacaaccagaacaacgagcaggcctggaaggagatcctcaagtgggaggccctccacgccgccgagtgcccctgcggcccctccctcatccgcttcggcggcaaggccaaggagtactccccccgcgcccgcatccgctcctggatgggctacgagctccccttcgaccgccacgactggatcatcaaccgctgcggcaccgaggtccgctacgtcatcgactactacgacggcggcgaggtcaacaaggactaccagttcaccatcctcgacgtccgccccgccctcgactccctctccgccgtctgggaccgcatgaaggtcgcctggtggcgctggacctcctga

SEQ ID NO: 7181 - RNA, 807 nt, synthetic construct
  misc_feature 1..807: note = derived and/or modified sequence opt3 fromCytochrome_c__Homo_sapiens__EAW98784
  source 1..807: mol_type = other RNA
atgggcctgagcccctccgcccctgctgtggcagtccaggcctctaacgcgtcagctagtccaccgagcgggtgccccatgcacgagggaaagatgaaaggttgtcctgttaataccgaaccatccggccccacatgcgagaagaaaacttactctgtgcctgcccatcaagaaagagcatatgagtacgtagaatgtccaatcagggggacggccgctgagaacaaggagaatctcgacccctcgaaccttatgcctccaccgaatcagacccccgcacctgatcagccattcgccctgtcaacagtgcgggaagagagcagtattccccgcgctgactccgagaaaaagtgggtctatccttctgaacagatgttttggaacgccatgttgaagaaaggatggaagtggaaagatgaggacataagccaaaaggatatgtacaatatcattcgaatccacaaccagaataacgaacaggcgtggaaagagattttaaagtgggaagcactgcatgccgctgagtgcccatgtggcccctccctaatccgtttcggtgggaaggccaaagaatattcaccgagagcaaggatacggagttggatgggatacgagctcccttttgaccgccacgattggatcattaatagatgcggcactgaggtgaggtatgttatcgactactacgatggcggggaagtgaacaaggactatcagttcaccattctggatgtccggcccgctcttgacagcctgtctgccgtgtgggatcgcatgaaagtagcgtggtggcgatggacatcctga

SEQ ID NO: 7182 - RNA, 807 nt, synthetic construct
  misc_feature 1..807: note = derived and/or modified sequence opt4 fromCytochrome_c__Homo_sapiens__EAW98784
  source 1..807: mol_type = other RNA
atgggcctgagccccagcgcccccgccgtggccgtgcaggccagcaacgccagcgccagcccccccagcggctgccccatgcacgagggcaagatgaagggctgccccgtgaacaccgagcccagcggccccacctgcgagaagaagacctacagcgtgcccgcccaccaggagagagcctacgagtacgtggagtgccccatcagaggcaccgccgccgagaacaaggagaacctggaccccagcaacctgatgcccccccccaaccagacccccgcccccgaccagcccttcgccctgagcaccgtgagagaggagagcagcatccccagagccgacagcgagaagaagtgggtgtaccccagcgagcagatgttctggaacgccatgctgaagaagggctggaagtggaaggacgaggacatcagccagaaggacatgtacaacatcatcagaatccacaaccagaacaacgagcaggcctggaaggagatcctgaagtgggaggccctgcacgccgccgagtgcccctgcggccccagcctgatcagattcggcggcaaggccaaggagtacagccccagagccagaatcagaagctggatgggctacgagctgcccttcgacagacacgactggatcatcaacagatgcggcaccgaggtgagatacgtgatcgactactacgacggcggcgaggtgaacaaggactaccagttcaccatcctggacgtgagacccgccctggacagcctgagcgccgtgtgggacagaatgaaggtggcctggtggagatggaccagctga

SEQ ID NO: 7183 - RNA, 807 nt, synthetic construct
  misc_feature 1..807: note = derived and/or modified sequence opt5 fromCytochrome_c__Homo_sapiens__EAW98784
  source 1..807: mol_type = other RNA
atgggcctgagcccctccgcccctgctgtggccgtccaggcgtctaacgctagcgcctccccgccctctgggtgccctatgcacgagggaaagatgaaaggctgtcccgttaataccgaacctagcgggcccacatgcgagaagaaaacgtactccgtgcctgcccatcaagaaagagcttatgagtacgtggaatgtccgatccggggaaccgccgctgagaacaaggagaatctcgacccctctaacctgatgcctccccctaatcagacacccgccccggatcagcctttcgcgcttagcaccgtccgcgaagagtccagcattcccagagccgactctgagaaaaagtgggtgtatccttccgaacagatgttttggaacgctatgctgaagaaaggctggaagtggaaagatgaggacatcagccaaaaggatatgtacaatattatccggattcacaaccagaataacgaacaggcctggaaagagatcctcaagtgggaagctctgcatgccgcggagtgcccctgtgggccctctcttatccgcttcggaggcaaggccaaagaatattcccctagagctcggattcgcagctggatgggctacgagctgccgtttgacagacacgattggatcattaatcggtgcgggacagaggttcgctatgtgatcgactactacgatggaggcgaagtcaacaaggactatcagttcaccattctcgatgtgagacccgccctggactctctgtccgctgtttgggatcggatgaaagtggcctggtggcgctggacaagctga

SEQ ID NO: 7184 - RNA, 807 nt, synthetic construct
  misc_feature 1..807: note = derived and/or modified sequence opt6 fromCytochrome_c__Homo_sapiens__EAW98784
  source 1..807: mol_type = other RNA
atgggactaagtccaagcgcaccagcagtagcagtacaagcaagtaacgcaagcgcatcaccgccatcaggatgtccaatgcacgaaggaaaaatgaaaggatgtccagtaaacacagaaccaagcggaccaacatgcgaaaaaaaaacatatagcgtgccagcacaccaagaaagagcatatgaatatgtagaatgcccaataagaggaacagcagcagaaaataaagaaaatttagacccaagcaatctaatgcccccaccaaatcaaacaccagcaccagatcaaccattcgcattatcaacagtaagagaagaatcaagtataccaagagcagacagcgaaaaaaaatgggtatacccaagtgaacaaatgttttggaacgcaatgctaaaaaaaggatggaaatggaaagatgaagatatatcacaaaaagacatgtacaatataataagaatacacaatcaaaataatgaacaagcatggaaggaaatactaaaatgggaagcactacacgcagcagaatgcccatgcggaccaagtttaataagatttggaggaaaagcaaaagaatacagcccaagagcaagaataagaagctggatgggatacgaactaccatttgatagacatgactggataataaacagatgcggaacagaagtaagatacgtaatagattactatgacggaggagaagtaaataaagattaccaatttacaatactagatgtaagaccagcattagactcactatcagcagtatgggatagaatgaaagtagcatggtggagatggacaagttaa

SEQ ID NO: 7185 - protein, 106 aa, synthetic construct
  REGION 1..106: note = Cytochrome_c__Homo_sapiens__B8XYC5
MFAPAVMRAFRKNKTLGYGVPMLLLIVGGSFGLREFSQIRYDAVKSKMDPELEKKLKENKISLESEYEKIKDSKFDDWKNIRGPRPWEDPDLLQGRNPESLKTKTT

SEQ ID NO: 7186 - RNA, 321 nt, synthetic construct
  misc_feature 1..321: note = Cytochrome_c__Homo_sapiens__ACJ76681
  source 1..321: mol_type = other RNA
atgtttgcacccgcggtgatgcgtgcttttcgcaagaacaagactctcggctatggagtccccatgttgttgctgattgttggaggttcttttggtcttcgtgagttttctcaaatccgatatgatgctgtgaagagtaaaatggatcctgagcttgaaaaaaaactgaaagagaataaaatatctttagagtcggaatatgagaaaatcaaagactccaagtttgatgactggaagaatattcgaggacccaggccttgggaagatcctgacctcctccaaggaagaaatccagaaagccttaagactaagacaacttga

SEQ ID NO: 7187 - RNA, 321 nt, synthetic construct
  misc_feature 1..321: note = derived and/or modified sequence opt1 fromCytochrome_c__Homo_sapiens__ACJ76681
  source 1..321: mol_type = other RNA
atgttcgcccccgccgtgatgcgcgcgttccggaagaacaagaccctgggctacggggtgccgatgctcctgctgatcgtgggcgggagcttcggcctccgcgagttctcccagatccggtacgacgccgtcaagagcaagatggaccccgagctggagaagaagctgaaggagaacaagatctccctcgagagcgagtacgagaagatcaaggactccaagttcgacgactggaagaacatccgcgggccccggccctgggaggacccggacctgctgcagggccgcaaccccgagagcctcaagaccaagacgacctga

SEQ ID NO: 7188 - RNA, 321 nt, synthetic construct
  misc_feature 1..321: note = derived and/or modified sequence opt2 fromCytochrome_c__Homo_sapiens__ACJ76681
  source 1..321: mol_type = other RNA
atgttcgcccccgccgtcatgcgcgccttccgcaagaacaagaccctcggctacggcgtccccatgctcctcctcatcgtcggcggctccttcggcctccgcgagttctcccagatccgctacgacgccgtcaagtccaagatggaccccgagctcgagaagaagctcaaggagaacaagatctccctcgagtccgagtacgagaagatcaaggactccaagttcgacgactggaagaacatccgcggcccccgcccctgggaggaccccgacctcctccagggccgcaaccccgagtccctcaagaccaagaccacctga

SEQ ID NO: 7189 - RNA, 321 nt, synthetic construct
  misc_feature 1..321: note = derived and/or modified sequence opt3 fromCytochrome_c__Homo_sapiens__ACJ76681
  source 1..321: mol_type = other RNA
atgttcgcccccgctgtgatgagagcatttaggaagaacaaaaccctgggctacggggtccctatgctccttctgatcgttggaggtagcttcggcttgcgggagttttcccagattcgctatgacgccgtgaagtctaaaatggatccagaattagagaagaaactgaaggaaaataagatatcactagagagtgaatacgagaaaatcaaggacagcaaattcgatgactggaagaacattcgagggccgcgtccctgggaggatcctgacctcctgcaaggaagaaatccagaatcccttaaaacaaagactacgtga

SEQ ID NO: 7190 - RNA, 321 nt, synthetic construct
  misc_feature 1..321: note = derived and/or modified sequence opt4 fromCytochrome_c__Homo_sapiens__ACJ76681
  source 1..321: mol_type = other RNA
atgttcgcccccgccgtgatgagagccttcagaaagaacaagaccctgggctacggcgtgcccatgctgctgctgatcgtgggcggcagcttcggcctgagagagttcagccagatcagatacgacgccgtgaagagcaagatggaccccgagctggagaagaagctgaaggagaacaagatcagcctggagagcgagtacgagaagatcaaggacagcaagttcgacgactggaagaacatcagaggccccagaccctgggaggaccccgacctgctgcagggcagaaaccccgagagcctgaagaccaagaccacctga

SEQ ID NO: 7191 - RNA, 321 nt, synthetic construct
  misc_feature 1..321: note = derived and/or modified sequence opt5 fromCytochrome_c__Homo_sapiens__ACJ76681
  source 1..321: mol_type = other RNA
atgttcgcccccgctgtgatgagagcctttcggaagaacaaaaccctgggctacggggtccctatgctcctgcttatcgttggaggcagcttcgggctgcgcgagttttcccagattagatatgacgcggtgaagtctaaaatggatccggaactcgagaagaaactgaaggaaaataagatcagccttgagtccgaatacgagaaaattaaggactctaaattcgatgactggaagaacatccggggaccccgcccttgggaggatcccgacctgctccaaggcagaaatcctgaaagcctgaaaacaaagacgacctga

SEQ ID NO: 7192 - RNA, 321 nt, synthetic construct
  misc_feature 1..321: note = derived and/or modified sequence opt6 fromCytochrome_c__Homo_sapiens__ACJ76681
  source 1..321: mol_type = other RNA
atgttcgcaccagcagtaatgagagcattcagaaaaaacaaaacactaggatacggagtaccaatgctactattaatagtaggaggaagcttcggactaagagaattctcacaaataagatacgacgcagtaaaaagcaaaatggacccagaactagaaaaaaaactaaaagaaaacaaaataagcctagaatcagaatacgaaaaaataaaagactcaaaattcgacgactggaaaaacataagaggaccaagaccatgggaagacccagacctactacaaggaagaaacccagaaagcctaaaaacaaaaacaacataa

SEQ ID NO: 7193 - protein, 105 aa, synthetic construct
  REGION 1..105: note = Cytochrome_c__Homo_sapiens__G4XXL9
MGDVEKGKKIFIMKCSQCHTVEKGGKHKTGPNLHGLFGRKTGQAPGYSYTAANKNKGIIWGEDTLMEYLENPKKYIPGTKMIFVGIKKKEERADLIAYLKKATNE

SEQ ID NO: 7194 - RNA, 318 nt, synthetic construct
  misc_feature 1..318: note = Cytochrome_c__Homo_sapiens__AEP27189
  source 1..318: mol_type = other RNA
atgggtgatgttgagaaaggcaagaagatttttattatgaagtgttcccagtgccacaccgttgaaaagggaggcaagcacaagactgggccaaatctccatggtctctttgggcggaagacaggtcaggcccctggatactcttacacagccgccaataagaacaaaggcatcatctggggagaggatacactgatggagtatttggagaatcccaagaagtacatccctggaacaaaaatgatctttgtcggcattaagaagaaggaagaaagggcagacttaatagcttatctcaaaaaagctactaatgagtaa

SEQ ID NO: 7195 - RNA, 318 nt, synthetic construct
  misc_feature 1..318: note = derived and/or modified sequence opt1 fromCytochrome_c__Homo_sapiens__AEP27189
  source 1..318: mol_type = other RNA
atgggcgacgtggagaaggggaagaagatcttcatcatgaagtgcagccagtgccacaccgtcgagaagggcgggaagcacaagaccggccccaacctgcacggcctcttcgggcgcaagacgggccaggccccggggtactcctacaccgccgcgaacaagaacaagggcatcatctggggcgaggacaccctgatggagtacctggagaaccccaagaagtacatccccgggaccaagatgatcttcgtggggatcaagaagaaggaggagcgggccgacctcatcgcctacctgaagaaggccacgaacgagtga

SEQ ID NO: 7196 - RNA, 318 nt, synthetic construct
  misc_feature 1..318: note = derived and/or modified sequence opt2 fromCytochrome_c__Homo_sapiens__AEP27189
  source 1..318: mol_type = other RNA
atgggcgacgtcgagaagggcaagaagatcttcatcatgaagtgctcccagtgccacaccgtcgagaagggcggcaagcacaagaccggccccaacctccacggcctcttcggccgcaagaccggccaggcccccggctactcctacaccgccgccaacaagaacaagggcatcatctggggcgaggacaccctcatggagtacctcgagaaccccaagaagtacatccccggcaccaagatgatcttcgtcggcatcaagaagaaggaggagcgcgccgacctcatcgcctacctcaagaaggccaccaacgagtga

SEQ ID NO: 7197 - RNA, 318 nt, synthetic construct
  misc_feature 1..318: note = derived and/or modified sequence opt3 fromCytochrome_c__Homo_sapiens__AEP27189
  source 1..318: mol_type = other RNA
atgggcgacgtggagaaggggaaaaagatcttcattatgaaatgcagccagtgtcacaccgtcgaaaagggaggtaaacataagacaggccccaacctgcacgggctctttggaagaaagactggccaagcccctggttactcctatacggctgcaaataaaaacaaggggataatctggggagaggatacccttatggaatacctggagaatccgaaaaagtatattccaggcacaaaaatgatcttcgttggcattaagaagaaagaagagagggccgacttgatcgcgtacttaaagaaagctactaacgagtga

SEQ ID NO: 7198 - RNA, 318 nt, synthetic construct
  misc_feature 1..318: note = derived and/or modified sequence opt4 fromCytochrome_c__Homo_sapiens__AEP27189
  source 1..318: mol_type = other RNA
atgggcgacgtggagaagggcaagaagatcttcatcatgaagtgcagccagtgccacaccgtggagaagggcggcaagcacaagaccggccccaacctgcacggcctgttcggcagaaagaccggccaggcccccggctacagctacaccgccgccaacaagaacaagggcatcatctggggcgaggacaccctgatggagtacctggagaaccccaagaagtacatccccggcaccaagatgatcttcgtgggcatcaagaagaaggaggagagagccgacctgatcgcctacctgaagaaggccaccaacgagtga

SEQ ID NO: 7199 - RNA, 318 nt, synthetic construct
  misc_feature 1..318: note = derived and/or modified sequence opt5 fromCytochrome_c__Homo_sapiens__AEP27189
  source 1..318: mol_type = other RNA
atgggcgacgtggagaaggggaaaaagatcttcattatgaaatgcagccagtgtcacaccgtcgaaaagggaggcaaacataagacagggcccaacctgcacggactctttggcagaaagacggggcaagcccctggatactcctataccgctgccaataaaaacaagggcatcatttggggcgaggatacactgatggaataccttgagaatccgaaaaagtatatccccgggaccaaaatgattttcgttggaatcaagaagaaagaggaacgggcggacctgatcgcttacctcaagaaagccacaaacgagtga

SEQ ID NO: 7200 - RNA, 318 nt, synthetic construct
  misc_feature 1..318: note = derived and/or modified sequence opt6 fromCytochrome_c__Homo_sapiens__AEP27189
  source 1..318: mol_type = other RNA
atgggagacgtagaaaaaggaaaaaaaatattcataatgaaatgcagccaatgccacacagtagaaaaaggaggaaaacacaaaacaggaccaaacctacacggactattcggaagaaaaacaggacaagcaccaggatacagctacacagcagcaaacaaaaacaaaggaataatatggggagaagacacactaatggaatacctagaaaacccaaaaaaatacataccaggaacaaaaatgatattcgtaggaataaaaaaaaaagaagaaagagcagacctaatagcatacctaaaaaaagcaacaaacgaataa

SEQ ID NO: 7201 - protein, 115 aa, synthetic construct
  REGION 1..115: note = Cytochrome_c__Homo_sapiens__H0UI06
MHTQDSEVVPVPAWPFSLVVFSCGGCWSVTAKMLRNLLALRQIGQRTISTASRRHFKNKVPEKQKLFQEDDEIPLYLKGGVADALLYRATMILTVGGTAYAIYELAVASFPKKQE

SEQ ID NO: 7202 - RNA, 348 nt, synthetic construct
  misc_feature 1..348: note = Cytochrome_c__Homo_sapiens__CCF23109
  source 1..348: mol_type = other RNA
atgcatacgcaagactcggaggtagttccggttccggcgtggccattttcgttggtggtgttcagttgtggcggttgctggtcagtaacagccaagatgctgcggaatctgctggctcttcgtcagattgggcagaggacgataagcactgcttcccgcaggcattttaaaaataaagttccggagaagcaaaaactgttccaggaggatgatgaaattccactgtatctaaagggtggggtagctgatgccctcctgtatagagccaccatgattcttacagttggtggaacagcatatgccatatatgagctggctgtggcttcatttcccaagaagcaggagtga

SEQ ID NO: 7203 - RNA, 348 nt, synthetic construct
  misc_feature 1..348: note = derived and/or modified sequence opt1 fromCytochrome_c__Homo_sapiens__CCF23109
  source 1..348: mol_type = other RNA
atgcacacccaggacagcgaggtggtgcccgtgccggcctggcccttctccctggtggtcttcagctgcggcgggtgctggtccgtgaccgccaagatgctccgcaacctgctggcgctccggcagatcggccagcgcacgatcagcaccgcctcccggcgccacttcaagaacaaggtgcccgagaagcagaagctgttccaggaggacgacgagatccccctgtacctcaagggcggggtcgccgacgccctgctgtaccgggccaccatgatcctcaccgtcgggggcacggcgtacgccatctacgagctggccgtggccagcttcccgaagaagcaggagtga

SEQ ID NO: 7204 - RNA, 348 nt, synthetic construct
  misc_feature 1..348: note = derived and/or modified sequence opt2 fromCytochrome_c__Homo_sapiens__CCF23109
  source 1..348: mol_type = other RNA
atgcacacccaggactccgaggtcgtccccgtccccgcctggcccttctccctcgtcgtcttctcctgcggcggctgctggtccgtcaccgccaagatgctccgcaacctcctcgccctccgccagatcggccagcgcaccatctccaccgcctcccgccgccacttcaagaacaaggtccccgagaagcagaagctcttccaggaggacgacgagatccccctctacctcaagggcggcgtcgccgacgccctcctctaccgcgccaccatgatcctcaccgtcggcggcaccgcctacgccatctacgagctcgccgtcgcctccttccccaagaagcaggagtga

SEQ ID NO: 7205 - RNA, 348 nt, synthetic construct
  misc_feature 1..348: note = derived and/or modified sequence opt3 fromCytochrome_c__Homo_sapiens__CCF23109
  source 1..348: mol_type = other RNA
atgcacacccaggacagcgaggtggtccccgttcctgcctggccattctccctggtggtattttcttgcggcgggtgttggtcagtgacagctaagatgctcagaaaccttctggcattgaggcaaatcggacagcggactattagtacggccagccgccgacatttcaaaaataaggtcccggaaaaacagaagttatttcaggaggatgacgaaatacccctgtacctaaaaggtggcgtggcggatgctctcctgtatcgtgccaccatgatccttacagttgggggaactgcatacgccatttatgagctggctgtggcatccttccctaagaagcaagaatga

SEQ ID NO: 7206 - RNA, 348 nt, synthetic construct
  misc_feature 1..348: note = derived and/or modified sequence opt4 fromCytochrome_c__Homo_sapiens__CCF23109
  source 1..348: mol_type = other RNA
atgcacacccaggacagcgaggtggtgcccgtgcccgcctggcccttcagcctggtggtgttcagctgcggcggctgctggagcgtgaccgccaagatgctgagaaacctgctggccctgagacagatcggccagagaaccatcagcaccgccagcagaagacacttcaagaacaaggtgcccgagaagcagaagctgttccaggaggacgacgagatccccctgtacctgaagggcggcgtggccgacgccctgctgtacagagccaccatgatcctgaccgtgggcggcaccgcctacgccatctacgagctggccgtggccagcttccccaagaagcaggagtga

SEQ ID NO: 7207 - RNA, 348 nt, synthetic construct
  misc_feature 1..348: note = derived and/or modified sequence opt5 fromCytochrome_c__Homo_sapiens__CCF23109
  source 1..348: mol_type = other RNA
atgcacacccaggacagcgaggtggtccccgttcctgcctggccgttctccctggtggtgttttcttgcggcgggtgttggagcgtcacagctaagatgctcagaaacctgcttgccctgcggcaaatcggacagcgcacgatttccaccgcgtctagacggcatttcaaaaataaggtgcccgaaaaacagaagctctttcaggaggatgacgaaatccctctgtaccttaaaggcggggttgctgatgccctgctctatcgcgccacaatgattctgaccgtgggaggcacagcttacgccatctatgagctggctgtcgccagcttccccaagaagcaagaatga

SEQ ID NO: 7208 - RNA, 348 nt, synthetic construct
  misc_feature 1..348: note = derived and/or modified sequence opt6 fromCytochrome_c__Homo_sapiens__CCF23109
  source 1..348: mol_type = other RNA
atgcacacacaagatagcgaagtagtaccagtaccagcatggccattctcactagtagtctttagctgtggaggatgctggagtgtaacagcaaaaatgctaagaaacttattagcactaagacaaataggacaaagaacaatatcaacagcaagcagaagacatttcaaaaacaaagtaccagaaaaacaaaaactatttcaagaagacgatgaaataccattatacctaaaaggaggagtagcagatgcattactatatagagcaacaatgatattaacagtaggaggaacagcatacgcaatatatgaactagcagtagcatcattcccaaaaaaacaagaataa

SEQ ID NO: 7209 - protein, 78 aa, synthetic construct
  REGION 1..78: note = Cytochrome_c__Homo_sapiens__H6SG12
MQALRVSQALIRSFSSTARNRFQNRVREKQLFQEDNDIPLYLKGGIVDNILYRVTMTLCLGGTVYSLYSLGWASFPRN

SEQ ID NO: 7210 - RNA, 237 nt, synthetic construct
  misc_feature 1..237: note = Cytochrome_c__Homo_sapiens__CCF23103
  source 1..237: mol_type = other RNA
atgcaggcccttcgggtgtcccaggcgctgatccgctccttcagctccaccgcccggaaccgctttcagaaccgagtgcgcgagaaacagctcttccaggaggacaatgacatcccgttgtacctgaagggcggcatcgttgacaacatcctgtaccgagtgacaatgacgctgtgtctgggcggcactgtctacagcttgtactcccttggctgggcctccttccccaggaattaa

SEQ ID NO: 7211 - RNA, 237 nt, synthetic construct
  misc_feature 1..237: note = derived and/or modified sequence opt1 fromCytochrome_c__Homo_sapiens__CCF23103
  source 1..237: mol_type = other RNA
atgcaggccctgcgcgtgagccaggccctcatccggtccttcagctccaccgcgcgcaaccggttccagaaccgcgtccgggagaagcagctgttccaggaggacaacgacatccccctgtacctcaagggcgggatcgtggacaacatcctgtaccgcgtgaccatgacgctgtgcctcggcgggaccgtctacagcctgtactccctgggctgggccagcttcccgcggaactga

SEQ ID NO: 7212 - RNA, 237 nt, synthetic construct
  misc_feature 1..237: note = derived and/or modified sequence opt2 fromCytochrome_c__Homo_sapiens__CCF23103
  source 1..237: mol_type = other RNA
atgcaggccctccgcgtctcccaggccctcatccgctccttctcctccaccgcccgcaaccgcttccagaaccgcgtccgcgagaagcagctcttccaggaggacaacgacatccccctctacctcaagggcggcatcgtcgacaacatcctctaccgcgtcaccatgaccctctgcctcggcggcaccgtctactccctctactccctcggctgggcctccttcccccgcaactga

SEQ ID NO: 7213 - RNA, 237 nt, synthetic construct
  misc_feature 1..237: note = derived and/or modified sequence opt3 fromCytochrome_c__Homo_sapiens__CCF23103
  source 1..237: mol_type = other RNA
atgcaggccctgagagtgagccaagctctcatcaggtccttctcttcaaccgcacggaaccgctttcagaatcgagtccgtgagaagcagcttttccaggaagacaacgatattcccctgtacttgaaaggcgggatagttgacaatatcttatatagagtgacaatgactctgtgcctaggaggtacggtatacagtctctatagcctgggctgggcctcctttcctaggaactga

SEQ ID NO: 7214 - RNA, 237 nt, synthetic construct
  misc_feature 1..237: note = derived and/or modified sequence opt4 fromCytochrome_c__Homo_sapiens__CCF23103
  source 1..237: mol_type = other RNA
atgcaggccctgagagtgagccaggccctgatcagaagcttcagcagcaccgccagaaacagattccagaacagagtgagagagaagcagctgttccaggaggacaacgacatccccctgtacctgaagggcggcatcgtggacaacatcctgtacagagtgaccatgaccctgtgcctgggcggcaccgtgtacagcctgtacagcctgggctgggccagcttccccagaaactga

SEQ ID NO: 7215 - RNA, 237 nt, synthetic construct
  misc_feature 1..237: note = derived and/or modified sequence opt5 fromCytochrome_c__Homo_sapiens__CCF23103
  source 1..237: mol_type = other RNA
atgcaggccctgagagtgagccaagctctcatccggtccttctctagcaccgcccgcaacagatttcagaatcgggtccgcgagaagcagctgttccaggaagacaacgatattcccctttacctgaaaggcgggatcgttgacaatattctctatagagtgacaatgacgctgtgccttggaggcaccgtgtactccctgtattctctcgggtgggcgagctttcctcggaactga

SEQ ID NO: 7216 - RNA, 237 nt, synthetic construct
  misc_feature 1..237: note = derived and/or modified sequence opt6 fromCytochrome_c__Homo_sapiens__CCF23103
  source 1..237: mol_type = other RNA
atgcaagcattaagagtaagccaagcattaataagaagctttagctcaacagcaagaaatagatttcaaaatagagtaagagaaaaacaactatttcaagaagacaatgacataccattatacttaaaaggaggaatagtagataacatactatatagagtaacaatgacattatgcttaggaggaacagtatactcactatatagcttaggatgggcatcattcccaagaaattaa

SEQ ID NO: 7217 - protein, 97 aa, synthetic construct [sequence omitted]

SEQ ID NO: 7218 - RNA, 294 nt, synthetic construct
  misc_feature 1..294: note = Cytochrome_c__Homo_sapiens__CCF23106
  source 1..294: mol_type = other RNA
atggctttgcctctgaggcccctgacccggggcgtggccagcgctgccaaaggaggccacggaggagcaggagctcgtacctggcgtctgctgaccttcgtgctggcgctgcccagcgtggccctctgcaccttcaactcctatctccactcgggccaccgcccgcgccccgagttccgtccctaccaacacctccgcatccgcaccaagccctacccctggggggacggcaaccacactctgttccacaatagccacgtgaaccctctgcccacgggctacgaacacccctga

SEQ ID NO: 7219 - RNA, 294 nt, synthetic construct
  misc_feature 1..294: note = derived and/or modified sequence opt1 fromCytochrome_c__Homo_sapiens__CCF23106
  source 1..294: mol_type = other RNA
atggccctgcccctccgcccgctgacccggggcgtggccagcgcggccaagggcgggcacgggggcgccggggcccgcacctggcggctgctcacgttcgtcctggccctgccctccgtggcgctctgcaccttcaacagctacctgcactccggccaccgcccccggcccgagttccgcccgtaccagcacctccggatccgcaccaagccctacccctggggcgacgggaaccacaccctgttccacaacagccacgtgaaccccctgccgacgggctacgagcacccctga

SEQ ID NO: 7220 - RNA, 294 nt, synthetic construct
  misc_feature 1..294: note = derived and/or modified sequence opt2 fromCytochrome_c__Homo_sapiens__CCF23106
  source 1..294: mol_type = other RNA
atggccctccccctccgccccctcacccgcggcgtcgcctccgccgccaagggcggccacggcggcgccggcgcccgcacctggcgcctcctcaccttcgtcctcgccctcccctccgtcgccctctgcaccttcaactcctacctccactccggccaccgcccccgccccgagttccgcccctaccagcacctccgcatccgcaccaagccctacccctggggcgacggcaaccacaccctcttccacaactcccacgtcaaccccctccccaccggctacgagcacccctga

SEQ ID NO: 7221 - RNA, 294 nt, synthetic construct
  misc_feature 1..294: note = derived and/or modified sequence opt3 fromCytochrome_c__Homo_sapiens__CCF23106
  source 1..294: mol_type = other RNA
atggccctgcccctcagacctcttaccaggggcgtggctagcgcagccaaagggggacacggtggcgcgggggctcggacatggcgcctgttgactttcgtcttagccctgccatccgttgcactatgcacgtttaactcttacctccattcaggacaccgaccgcgtcccgagttcagaccttatcagcatctgaggatccggaccaagccatacccctggggcgacggtaatcacacactttttcataacagtcacgtgaatcctctgccaactgggtatgaacacccctga

SEQ ID NO: 7222 - RNA, 294 nt, synthetic construct
  misc_feature 1..294: note = derived and/or modified sequence opt4 fromCytochrome_c__Homo_sapiens__CCF23106
  source 1..294: mol_type = other RNA
atggccctgcccctgagacccctgaccagaggcgtggccagcgccgccaagggcggccacggcggcgccggcgccagaacctggagactgctgaccttcgtgctggccctgcccagcgtggccctgtgcaccttcaacagctacctgcacagcggccacagacccagacccgagttcagaccctaccagcacctgagaatcagaaccaagccctacccctggggcgacggcaaccacaccctgttccacaacagccacgtgaaccccctgcccaccggctacgagcacccctga

SEQ ID NO: 7223 - RNA, 294 nt, synthetic construct
  misc_feature 1..294: note = derived and/or modified sequence opt5 fromCytochrome_c__Homo_sapiens__CCF23106
  source 1..294: mol_type = other RNA
atggccctgcccctcagacctctgacccggggcgtggctagcgccgcgaaagggggacacggcggggctggagcccgcacatggagacttctgacgttcgtcctcgccctgccgtccgttgctctttgcacctttaactcttacctgcatagcggccaccggccccgccctgagttcagaccctatcagcatctccggatccgcacaaagccttacccctggggagacgggaatcacaccctgtttcataactcccacgtgaatcctctgccgacaggctatgaacacccctga

SEQ ID NO: 7224 - RNA, 294 nt, synthetic construct
  misc_feature 1..294: note = derived and/or modified sequence opt6 fromCytochrome_c__Homo_sapiens__CCF23106
  source 1..294: mol_type = other RNA
atggcactaccactaagaccattaacaagaggagtagcatcagcagcaaaaggaggacacggaggagcaggagcaagaacatggagactactaacattcgtactagcactaccatcagtagcactatgcacattcaactcatacctacactcaggacacagaccaagaccagaattcagaccataccaacacctaagaataagaacaaaaccatacccatggggagacggaaaccacacactattccacaactcacacgtaaacccactaccaacaggatacgaacacccataa

SEQ ID NO: 7225 - protein, 171 aa, synthetic construct
  REGION 1..171: note = Cytochrome_c__Homo_sapiens__H6SG14
MLPRAAWSLVLRKGGGGRRGMHSSEGTTRGGGKMSPYTNCYAQRYYPMPEEPFCTELNAEEQALKEKEKGSWTQLTHAEKVALYRLQFNETFAEMNRRSNEWKTVMGCVFFFIGFAALVIWWQRVYVFPPKPITLTDERKAQQLQRMLDMKVNPVQGLASRWDYEKKQWKK

SEQ ID NO: 7226 - RNA, 516 nt, synthetic construct
  misc_feature 1..516: note = Cytochrome_c__Homo_sapiens__CCF23107
  source 1..516: mol_type = other RNA
atgctccccagagctgcctggagcttggtgctgaggaaaggtggaggtggaagacgagggatgcacagctcagaaggcaccacccgtggtggggggaagatgtccccctacaccaactgctatgcccagcgctactaccccatgccagaagagcccttctgcacagaactcaacgctgaggagcaggccctgaaggagaaggagaagggaagctggacccagctgacccacgccgaaaaggtggccttgtaccggctccagttcaatgagacctttgcggagatgaaccgtcgctccaatgagtggaagacagtgatgggttgtgtcttcttcttcattggattcgcagctctggtgatttggtggcagcgggtctacgtatttcctccaaagccgatcaccttgacggacgagcggaaagcccagcagctgcagcgcatgctggacatgaaggtgaatcctgtgcagggcctggcctcccgctgggactatgagaagaagcagtggaagaagtga

SEQ ID NO: 7227 - RNA, 516 nt, synthetic construct
  misc_feature 1..516: note = derived and/or modified sequence opt1 fromCytochrome_c__Homo_sapiens__CCF23107
  source 1..516: mol_type = other RNA
atgctgccccgcgccgcctggagcctcgtgctgcggaagggcgggggcgggcgccggggcatgcactccagcgaggggaccacccgcggcggcgggaagatgtccccgtacacgaactgctacgcgcagcggtactaccccatgcccgaggagcccttctgcaccgagctgaacgccgaggagcaggccctcaaggagaaggagaagggcagctggacccagctgacccacgccgagaaggtcgccctgtaccgcctccagttcaacgagacgttcgcggagatgaaccggcgctccaacgagtggaagaccgtgatggggtgcgtgttcttcttcatcggcttcgccgccctggtcatctggtggcagcgggtgtacgtgttcccgcccaagcccatcaccctgaccgacgagcgcaaggcccagcagctccagcggatgctggacatgaaggtcaaccccgtgcaggggctggcgagccgctgggactacgagaagaagcagtggaagaagtga

SEQ ID NO: 7228 - RNA, 516 nt, synthetic construct
  misc_feature 1..516: note = derived and/or modified sequence opt2 fromCytochrome_c__Homo_sapiens__CCF23107
  source 1..516: mol_type = other RNA
atgctcccccgcgccgcctggtccctcgtcctccgcaagggcggcggcggccgccgcggcatgcactcctccgagggcaccacccgcggcggcggcaagatgtccccctacaccaactgctacgcccagcgctactaccccatgcccgaggagcccttctgcaccgagctcaacgccgaggagcaggccctcaaggagaaggagaagggctcctggacccagctcacccacgccgagaaggtcgccctctaccgcctccagttcaacgagaccttcgccgagatgaaccgccgctccaacgagtggaagaccgtcatgggctgcgtcttcttcttcatcggcttcgccgccctcgtcatctggtggcagcgcgtctacgtcttcccccccaagcccatcaccctcaccgacgagcgcaaggcccagcagctccagcgcatgctcgacatgaaggtcaaccccgtccagggcctcgcctcccgctgggactacgagaagaagcagtggaagaagtga

SEQ ID NO: 7229 - RNA, 516 nt, synthetic construct
  misc_feature 1..516: note = derived and/or modified sequence opt3 fromCytochrome_c__Homo_sapiens__CCF23107
  source 1..516: mol_type = other RNA
atgctgcccagagccgcttggagcctcgtgcttaggaagggcgggggaggtcggcgcggcatgcactcctctgaggggaccacacgaggaggcggtaaaatgtcaccttacactaactgctatgcacagcgttactatccaatgccggaagaacccttctgtacggaactgaatgccgaggaacaagcgttgaaggagaaagagaaggggagttggacccagttaacacatgctgaaaaagtcgccctgtacagactacagtttaacgagactttcgcagaaatgaataggcggagcaacgagtggaagaccgttatgggatgcgtgtttttctttatcggcttcgccgctctcgtaatttggtggcagcgcgtgtatgtctttcctccaaagcccataacactgaccgacgagagaaaagcacaacagcttcagaggatgctggatatgaaggtgaatcctgttcagggcttggcctcccggtgggactacgagaaaaagcaatggaaaaagtga

SEQ ID NO: 7230 - RNA, 516 nt, synthetic construct
  misc_feature 1..516: note = derived and/or modified sequence opt4 fromCytochrome_c__Homo_sapiens__CCF23107
  source 1..516: mol_type = other RNA
atgctgcccagagccgcctggagcctggtgctgagaaagggcggcggcggcagaagaggcatgcacagcagcgagggcaccaccagaggcggcggcaagatgagcccctacaccaactgctacgcccagagatactaccccatgcccgaggagcccttctgcaccgagctgaacgccgaggagcaggccctgaaggagaaggagaagggcagctggacccagctgacccacgccgagaaggtggccctgtacagactgcagttcaacgagaccttcgccgagatgaacagaagaagcaacgagtggaagaccgtgatgggctgcgtgttcttcttcatcggcttcgccgccctggtgatctggtggcagagagtgtacgtgttcccccccaagcccatcaccctgaccgacgagagaaaggcccagcagctgcagagaatgctggacatgaaggtgaaccccgtgcagggcctggccagcagatgggactacgagaagaagcagtggaagaagtga

SEQ ID NO: 7231 - RNA, 516 nt, synthetic construct
  misc_feature 1..516: note = derived and/or modified sequence opt5 fromCytochrome_c__Homo_sapiens__CCF23107
  source 1..516: mol_type = other RNA
atgctgcccagagccgcttggagcctcgtgctgcggaagggcgggggaggccgcagagggatgcactcctctgagggaaccacacggggcgggggaaaaatgagcccttacacgaactgctatgcccagcgctactatccgatgcccgaagaacctttctgtaccgaacttaatgcggaggaacaagctctgaaggagaaagagaagggctcctggacacagctcacccatgccgaaaaagtcgccctgtacagacttcagtttaacgagacattcgctgaaatgaatcggcgctctaacgagtggaagaccgttatgggctgcgtgtttttctttatcgggttcgccgctctggtgatttggtggcagagagtctatgtgtttccccctaagcccatcacactcaccgacgagcggaaagcccaacagctgcagcgcatgctggatatgaaggttaatcctgtgcagggactcgcgagcagatgggactacgagaaaaagcaatggaaaaagtga

SEQ ID NO: 7232 - RNA, 516 nt, synthetic construct
  misc_feature 1..516: note = derived and/or modified sequence opt6 fromCytochrome_c__Homo_sapiens__CCF23107
  source 1..516: mol_type = other RNA
atgctaccgagagcagcatggagcctagtattaagaaaaggaggtggaggaagaagaggaatgcactcaagcgaaggaacaacaagaggaggaggaaaaatgtcaccatatacaaattgctatgcacaaagatattacccaatgccagaagaaccattctgcacggaattaaacgcagaagaacaagcactaaaagaaaaagaaaaaggatcatggacacaattaacacatgcagaaaaagtagcattatacagactacaattcaatgaaacattcgcagaaatgaacagaagatcaaacgaatggaaaacagtaatgggatgcgtattctttttcataggttttgcagcactagtaatatggtggcaaagagtatacgtattcccaccaaaaccaataacattaacagatgaaagaaaagcacaacaactacaaagaatgttagatatgaaagtcaatccagtacaaggactagcaagcagatgggattacgaaaaaaaacaatggaaaaaataa

SEQ ID NO: 7233 - protein, 109 aa, synthetic construct
  REGION 1..109: note = Cytochrome_c__Homo_sapiens__H6SG15
MAVVGVSSVSRLLGRSRPQLGRPMSSGAHGEEGSARMWKTLTFFVALPGVAVSMLNVYLKSHHGEHERPEFIAYPHLRIRTKPFPWGDGNHTLFHNPHVNPLPTGYEDE

SEQ ID NO: 7234 - RNA, 330 nt, synthetic construct
  misc_feature 1..330: note = Cytochrome_c__Homo_sapiens__CCF23108
  source 1..330: mol_type = other RNA
atggcggtagttggtgtgtcctcggtttctcggctgctgggtcggtcccgcccacagctggggcggcctatgtcgagtggcgcccatggcgaagagggctcagctcgcatgtggaagactctcaccttcttcgtcgcgctccccggggtggcagtcagcatgctgaatgtgtacctgaagtcgcaccacggagagcacgagagacccgagttcatcgcctacccccatctccgcatcaggaccaagccgtttccctggggagatggtaaccatactctattccataaccctcatgtgaatccacttccaactggctacgaagatgaataa

SEQ ID NO: 7235 - RNA, 330 nt, synthetic construct
  misc_feature 1..330: note = derived and/or modified sequence opt1 fromCytochrome_c__Homo_sapiens__CCF23108
  source 1..330: mol_type = other RNA
atggccgtggtcggcgtgagcagcgtgagccgcctgctcgggcggtcccgcccccagctgggccggccgatgagctccggggcccacggcgaggaggggagcgcgcgcatgtggaagaccctgaccttcttcgtcgccctccccggcgtggccgtgtccatgctgaacgtctacctgaagtcccaccacggcgagcacgagcggcccgagttcatcgcctacccccacctccgcatccggacgaagccgttcccctggggcgacgggaaccacaccctgttccacaacccccacgtgaaccccctgccgaccgggtacgaggacgagtga

SEQ ID NO: 7236 - RNA, 330 nt, synthetic construct
  misc_feature 1..330: note = derived and/or modified sequence opt2 fromCytochrome_c__Homo_sapiens__CCF23108
  source 1..330: mol_type = other RNA
atggccgtcgtcggcgtctcctccgtctcccgcctcctcggccgctcccgcccccagctcggccgccccatgtcctccggcgcccacggcgaggagggctccgcccgcatgtggaagaccctcaccttcttcgtcgccctccccggcgtcgccgtctccatgctcaacgtctacctcaagtcccaccacggcgagcacgagcgccccgagttcatcgcctacccccacctccgcatccgcaccaagcccttcccctggggcgacggcaaccacaccctcttccacaacccccacgtcaaccccctccccaccggctacgaggacgagtga

SEQ ID NO: 7237 - RNA, 330 nt, synthetic construct
  misc_feature 1..330: note = derived and/or modified sequence opt3 fromCytochrome_c__Homo_sapiens__CCF23108
  source 1..330: mol_type = other RNA
atggccgtggtcggcgttagctccgtgtctagactgctcgggaggtcacggccccagcttggacgccctatgagtagcggtgctcacggcgaggaagggtccgcacgaatgtggaagaccctgacattctttgtagccttgccaggagtggcggtctctatgttaaacgtgtacctgaaatcgcatcacggcgagcatgaacgtccggagttcatcgcttatccccacctaagaattaggactaagccttttccatggggtgacgggaatcataccctcttccacaacccccacgttaatcctctgccaacgggatacgaagatgagtga

SEQ ID NO: 7238 - RNA, 330 nt, synthetic construct
  misc_feature 1..330: note = derived and/or modified sequence opt4 fromCytochrome_c__Homo_sapiens__CCF23108
  source 1..330: mol_type = other RNA
atggccgtggtgggcgtgagcagcgtgagcagactgctgggcagaagcagaccccagctgggcagacccatgagcagcggcgcccacggcgaggagggcagcgccagaatgtggaagaccctgaccttcttcgtggccctgcccggcgtggccgtgagcatgctgaacgtgtacctgaagagccaccacggcgagcacgagagacccgagttcatcgcctacccccacctgagaatcagaaccaagcccttcccctggggcgacggcaaccacaccctgttccacaacccccacgtgaaccccctgcccaccggctacgaggacgagtga

SEQ ID NO: 7239 - RNA, 330 nt, synthetic construct
  misc_feature 1..330: note = derived and/or modified sequence opt5 fromCytochrome_c__Homo_sapiens__CCF23108
  source 1..330: mol_type = other RNA
atggccgtggtcggcgttagctccgtgtctagactgctcgggcggagccgcccccagctgggaagacctatgtcctctggcgctcacggggaggaaggaagcgcccggatgtggaagacccttacattctttgtggcgctgccgggcgtcgctgtgtccatgctcaacgtttacctgaaatctcatcacggggagcatgaacgccccgagttcatcgcctatcctcaccttcggattagaacgaagccctttccttggggagacggcaatcataccctgttccacaacccccacgtgaatcctctcccgacaggctacgaagatgagtga

SEQ ID NO: 7240 - RNA, 330 nt, synthetic construct
  misc_feature 1..330: note = derived and/or modified sequence opt6 fromCytochrome_c__Homo_sapiens__CCF23108
  source 1..330: mol_type = other RNA
atggcagtagtaggagtatcatcagtatcaagactactaggaagatcaagaccacaactcggaagaccaatgtcatcaggagcacacggagaagaaggatcagcaagaatgtggaaaacactaacattcttcgtagcattaccaggagtagcagtatcaatgctaaacgtatacctaaaatcacatcacggagaacatgaaagaccagaattcatagcatacccacacctaagaataagaacaaaaccattcccatggggagacggaaatcacacactattccacaacccacacgtaaacccactaccaacaggatatgaagacgaataa

SEQ ID NO: 7241 - protein, 86 aa, synthetic construct [sequence omitted]

SEQ ID NO: 7242 - RNA, 261 nt, synthetic construct
  misc_feature 1..261: note = Cytochrome_c__Homo_sapiens__AAC98895
  source 1..261: mol_type = other RNA
atgtcgagtggcgcccacggcgaggagggttcagctcggatgtggaaggccctcacctacttcgtggcgctgcccggggtgggagtgagcatgctcaacgtgttcctcaagtcgcggcacgaagagcacgagagacccccgttcgttgcctaccctcacctgcgcatcaggaccaagcccttcccctggggagacggtaaccataccctcttccacaaccctcatgtgaacccacttccgaccggctatgaagatgagtaa

SEQ ID NO: 7243 - RNA, 261 nt, synthetic construct
  misc_feature 1..261: note = derived and/or modified sequence opt1 fromCytochrome_c__Homo_sapiens__AAC98895
  source 1..261: mol_type = other RNA
atgagcagcggcgcccacggggaggagggcagcgcccgcatgtggaaggcgctgacctacttcgtggccctccccggggtcggcgtgtccatgctgaacgtgttcctgaagtcccggcacgaggagcacgagcgcccgcccttcgtcgcctacccccacctccggatccgcaccaagcccttcccgtggggcgacgggaaccacacgctgttccacaacccccacgtgaaccccctgcccaccggctacgaggacgagtga

SEQ ID NO: 7244 - RNA, 261 nt, synthetic construct
  misc_feature 1..261: note = derived and/or modified sequence opt2 fromCytochrome_c__Homo_sapiens__AAC98895
  source 1..261: mol_type = other RNA
atgtcctccggcgcccacggcgaggagggctccgcccgcatgtggaaggccctcacctacttcgtcgccctccccggcgtcggcgtctccatgctcaacgtcttcctcaagtcccgccacgaggagcacgagcgcccccccttcgtcgcctacccccacctccgcatccgcaccaagcccttcccctggggcgacggcaaccacaccctcttccacaacccccacgtcaaccccctccccaccggctacgaggacgagtga

SEQ ID NO: 7245 - RNA, 261 nt, synthetic construct
  misc_feature 1..261: note = derived and/or modified sequence opt3 fromCytochrome_c__Homo_sapiens__AAC98895
  source 1..261: mol_type = other RNA
atgagctccggcgcccacggggaggaaggatctgctagaatgtggaaggcactgacctacttcgtggccctccccggtgtcggcgtttcaatgcttaacgtgtttctgaaaagtaggcatgaggaacacgagcggcctccattcgtagcgtatccgcatttgcgcatccgaacaaagccctttccttggggagacgggaatcacactttattccataacccacacgtgaatcccctgcctacgggctacgaagatgagtga

SEQ ID NO: 7246 - RNA, 261 nt, synthetic construct
  misc_feature 1..261: note = derived and/or modified sequence opt4 fromCytochrome_c__Homo_sapiens__AAC98895
  source 1..261: mol_type = other RNA
atgagcagcggcgcccacggcgaggagggcagcgccagaatgtggaaggccctgacctacttcgtggccctgcccggcgtgggcgtgagcatgctgaacgtgttcctgaagagcagacacgaggagcacgagagaccccccttcgtggcctacccccacctgagaatcagaaccaagcccttcccctggggcgacggcaaccacaccctgttccacaacccccacgtgaaccccctgcccaccggctacgaggacgagtga

SEQ ID NO: 7247 - RNA, 261 nt, synthetic construct
  misc_feature 1..261: note = derived and/or modified sequence opt5 fromCytochrome_c__Homo_sapiens__AAC98895
  source 1..261: mol_type = other RNA
atgagctccggcgcccacggggaggaaggatctgctagaatgtggaaggccctgacctacttcgtggcgctccccggcgtcggggttagcatgctgaacgtgtttcttaaatcccggcatgaggaacacgagcgccctccgttcgtggcttatccccatctgagaatccggacaaagccttttccctggggagacggcaatcacaccctcttccataaccctcacgtcaatcccctgcctacggggtacgaagatgagtga

SEQ ID NO: 7248 - RNA, 261 nt, synthetic construct
  misc_feature 1..261: note = derived and/or modified sequence opt6 fromCytochrome_c__Homo_sapiens__AAC98895
  source 1..261: mol_type = other RNA
atgtcatcaggagcacacggagaagaaggatcagcaagaatgtggaaagcactaacatacttcgtagcactaccaggagtaggagtatcaatgctaaacgtattcctaaaatcaagacacgaagaacacgaaagaccaccattcgtagcatacccacacctaagaataagaacaaaaccattcccatggggagacggaaaccacacactattccacaacccacacgtaaacccactaccaacaggatacgaagacgaataa

SEQ ID NO: 7249 - protein, 325 aa, synthetic construct
  REGION 1..325: note = Cytochrome_c__Homo_sapiens__P08574
MAAAAASLRGVVLGPRGAGLPGARARGLLCSARPGQLPLRTPQAVALSSKSGLSRGRKVMLSALGMLAAGGAGLAMALHSAVSASDLELHPPSYPWSHRGLLSSLDHTSIRRGFQVYKQVCASCHSMDFVAYRHLVGVCYTEDEAKELAAEVEVQDGPNEDGEMFMRPGKLFDYFPKPYPNSEAARAANNGALPPDLSYIVRARHGGEDYVFSLLTGYCEPPTGVSLREGLYFNPYFPGQAIAMAPPIYTDVLEFDDGTPATMSQIAKDVCTFLRWASEPEHDHRKRMGLKMLMMMALLVPLVYTIKRHKWSVLKSRKLAYRPPK

SEQ ID NO: 7250 - RNA, 978 nt, synthetic construct
  misc_feature 1..978: note = Cytochrome_c__Homo_sapiens__AAV38601
  source 1..978: mol_type = other RNA
atggcggcagctgcggcttcgcttcgcggggtagtgttgggcccgcggggcgcggggctcccgggcgcgcgtgcccggggtctgctgtgcagcgcgcgtcccgggcagctcccgctacggacacctcaggcagtggccttgtcgtcgaagtctggcctttcccgaggccggaaagtgatgctgtcagcgctgggcatgctggcggcagggggtgcggggctggccatggctctgcattcggctgtgagtgccagtgacctggagctgcacccccccagctatccgtggtctcaccgtggcctcctctcttccttggaccacaccagcatccggaggggtttccaggtatataagcaggtgtgcgcctcctgccacagcatggacttcgtggcctaccgccacctggtgggcgtgtgctacacggaggatgaagctaaggagctggctgcggaggtggaggttcaagacggccccaatgaagatggggagatgttcatgcggccagggaagctgttcgactatttcccaaaaccataccccaacagtgaggctgctcgagctgccaacaacggagcattgccccctgacctcagctacatcgtgcgagctaggcatggtggtgaggactacgtcttctccctgctcacgggctactgcgagccacccaccggggtgtcactgcgggaaggtctctacttcaacccctactttcctggccaggccattgccatggcccctcccatctacacagatgtcttagagtttgacgatggcaccccagctaccatgtcccagatagccaaggatgtgtgcaccttcctgcgctgggcatctgagccagagcacgaccatcgaaaacgcatggggctcaagatgttgatgatgatggctctgctggtgcccctggtctacaccataaagcggcacaagtggtcagtcctgaagagtcggaagctggcatatcggccgcccaagtag

SEQ ID NO: 7251 - RNA, 978 nt, synthetic construct
  misc_feature 1..978: note = derived and/or modified sequence opt1 fromCytochrome_c__Homo_sapiens__AAV38601
  source 1..978: mol_type = other RNA
atggccgccgcggccgccagcctgcgcggcgtggtcctcgggccccgcggcgccgggctgccgggcgcccgcgcgcgggggctgctctgctccgcccgccccggccagctgcccctgcggacgccccaggccgtggccctcagctccaagagcggcctgtcccgcgggcggaaggtgatgctgagcgcgctcggcatgctggccgccgggggcgccgggctggccatggcgctccactccgccgtcagcgcctccgacctggagctgcacccgcccagctacccctggtcccaccgcggcctcctgagctccctggaccacaccagcatccggcgcggcttccaggtgtacaagcaggtctgcgcctcctgccacagcatggacttcgtggcctaccggcacctcgtgggggtgtgctacaccgaggacgaggcgaaggagctggccgccgaggtcgaggtgcaggacggccccaacgaggacggggagatgttcatgcgcccgggcaagctgttcgactacttccccaagccctaccccaactccgaggccgcccgggcggccaacaacggcgccctcccgcccgacctgagctacatcgtgcgcgcccggcacgggggcgaggactacgtcttctccctgctcaccgggtactgcgagccgcccaccggcgtgagcctgcgcgaggggctgtacttcaacccctacttccccggccaggccatcgcgatggccccgcccatctacaccgacgtgctcgagttcgacgacggcacgcccgccaccatgagccagatcgccaaggacgtctgcaccttcctgcggtgggcgtccgagcccgagcacgaccaccgcaagcggatggggctgaagatgctcatgatgatggccctgctggtgcccctcgtgtacaccatcaagcgccacaagtggagcgtcctgaagtcccggaagctggcctaccggcccccgaagtga

SEQ ID NO: 7252 - RNA, 978 nt, synthetic construct
  misc_feature 1..978: note = derived and/or modified sequence opt2 fromCytochrome_c__Homo_sapiens__AAV38601
  source 1..978: mol_type = other RNA
atggccgccgccgccgcctccctccgcggcgtcgtcctcggcccccgcggcgccggcctccccggcgcccgcgcccgcggcctcctctgctccgcccgccccggccagctccccctccgcaccccccaggccgtcgccctctcctccaagtccggcctctcccgcggccgcaaggtcatgctctccgccctcggcatgctcgccgccggcggcgccggcctcgccatggccctccactccgccgtctccgcctccgacctcgagctccaccccccctcctacccctggtcccaccgcggcctcctctcctccctcgaccacacctccatccgccgcggcttccaggtctacaagcaggtctgcgcctcctgccactccatggacttcgtcgcctaccgccacctcgtcggcgtctgctacaccgaggacgaggccaaggagctcgccgccgaggtcgaggtccaggacggccccaacgaggacggcgagatgttcatgcgccccggcaagctcttcgactacttccccaagccctaccccaactccgaggccgcccgcgccgccaacaacggcgccctcccccccgacctctcctacatcgtccgcgcccgccacggcggcgaggactacgtcttctccctcctcaccggctactgcgagccccccaccggcgtctccctccgcgagggcctctacttcaacccctacttccccggccaggccatcgccatggccccccccatctacaccgacgtcctcgagttcgacgacggcacccccgccaccatgtcccagatcgccaaggacgtctgcaccttcctccgctgggcctccgagcccgagcacgaccaccgcaagcgcatgggcctcaagatgctcatgatgatggccctcctcgtccccctcgtctacaccatcaagcgccacaagtggtccgtcctcaagtcccgcaagctcgcctaccgcccccccaagtga

SEQ ID NO: 7253 - RNA, 978 nt, synthetic construct
  misc_feature 1..978: note = derived and/or modified sequence opt3 fromCytochrome_c__Homo_sapiens__AAV38601
  source 1..978: mol_type = other RNA
atggccgctgcagccgcgagcctgagaggcgtggtcctcgggcccaggggagctggtcttcctggcgcccgggcacgcgggctgttgtgctccgcccgaccaggacagttaccgctgcgtacaccccaagctgttgcactatcttcaaagagtggcctcagcagaggtaggaaagtgatgctgtccgcccttgggatgctggctgccggaggcgcgggcttggcaatggccctccactctgctgtatcggcctcagacctggagctgcatcctccaagctacccctggagtcaccgggggctcttatcctctctggatcataccagcatccgcagaggattccaggtgtataagcaggtctgtgcatcctgccactcaatggactttgtggcttacaggcatcttgttggtgtgtgttatactgaagatgaggccaaagaattggcggccgaggtcgaagtgcaggacggccctaacgaggatggggagatgttcatgcggccaggaaagctgtttgactacttccccaaaccttatccaaatagtgaagcagctcgcgccgctaacaatggcgccctaccgcccgatctcagctacattgtacgagcaagacacggtggggaggactatgtgttttctctgcttacgggatactgcgaacctccaaccggcgtttccctgagggagggcttgtacttcaacccctattttcctgggcaagccatagctatggcgccacccatctacacagatgtcctcgagttcgacgatggaactccggcaaccatgtcacagattgccaaggacgtgtgtacatttctgcggtgggctagcgaacctgagcacgatcatcgtaagcgcatgggtttaaaaatgctgatgatgatggccctccttgtgcccctggtctataccatcaagagacacaaatggagtgttttgaagtctaggaaactagcataccggccacctaagtga

SEQ ID NO: 7254 - RNA, 978 nt, synthetic construct
  misc_feature 1..978: note = derived and/or modified sequence opt4 fromCytochrome_c__Homo_sapiens__AAV38601
  source 1..978: mol_type = other RNA
atggccgccgccgccgccagcctgagaggcgtggtgctgggccccagaggcgccggcctgcccggcgccagagccagaggcctgctgtgcagcgccagacccggccagctgcccctgagaaccccccaggccgtggccctgagcagcaagagcggcctgagcagaggcagaaaggtgatgctgagcgccctgggcatgctggccgccggcggcgccggcctggccatggccctgcacagcgccgtgagcgccagcgacctggagctgcacccccccagctacccctggagccacagaggcctgctgagcagcctggaccacaccagcatcagaagaggcttccaggtgtacaagcaggtgtgcgccagctgccacagcatggacttcgtggcctacagacacctggtgggcgtgtgctacaccgaggacgaggccaaggagctggccgccgaggtggaggtgcaggacggccccaacgaggacggcgagatgttcatgagacccggcaagctgttcgactacttccccaagccctaccccaacagcgaggccgccagagccgccaacaacggcgccctgccccccgacctgagctacatcgtgagagccagacacggcggcgaggactacgtgttcagcctgctgaccggctactgcgagccccccaccggcgtgagcctgagagagggcctgtacttcaacccctacttccccggccaggccatcgccatggccccccccatctacaccgacgtgctggagttcgacgacggcacccccgccaccatgagccagatcgccaaggacgtgtgcaccttcctgagatgggccagcgagcccgagcacgaccacagaaagagaatgggcctgaagatgctgatgatgatggccctgctggtgcccctggtgtacaccatcaagagacacaagtggagcgtgctgaagagcagaaagctggcctacagaccccccaagtga

SEQ ID NO: 7255 - RNA, 978 nt, synthetic construct
  misc_feature 1..978: note = derived and/or modified sequence opt5 fromCytochrome_c__Homo_sapiens__AAV38601
  source 1..978: mol_type = other RNA
atggccgctgccgcggctagcctgagaggcgtggtcctcgggccccggggagccggcctgcctggggcccgcgctagaggacttctgtgctccgcccggccgggccagctccccctgcgcacccctcaagctgttgccctttctagcaagtccgggctgtctagaggacggaaagtgatgctcagcgcgctgggcatgctggccgctggcggggccggactcgctatggccctgcactccgcggtgtctgccagcgaccttgagctgcatcccccttcctacccctggagccaccgcggcctcctgtcttcccttgatcatacaagcatcagacgggggttccaggtctataaacaggtgtgtgcttcttgccactccatggactttgttgcctaccgccatctggtgggagtctgttatacggaagatgaggctaaggaactcgccgccgaggtggaagttcaggacggccctaacgaggatggggagatgttcatgagaccgggaaagctgtttgactacttccccaaaccttatcccaatagcgaagctgcgcgggccgctaacaatggcgccctgcctcccgatctctcttacattgtgcgcgccagacacggcggggaggactatgtcttttccctgcttaccggatactgcgaaccgcctacaggcgtgagcctgcgggaggggctctacttcaacccctattttcctggacaagctatcgccatggcgcctcccatttacaccgatgtgctggagttcgacgatggcacacccgctaccatgtcccagatcgccaaggacgtctgtacatttcttcgctgggcctctgaaccggagcacgatcatagaaagcggatggggctgaaaatgctcatgatgatggctctgctggttcccctcgtgtataccattaagagacacaaatggagcgtgctgaagtcccgcaaacttgcctaccggcctcccaagtga

SEQ ID NO: 7256 - RNA, 978 nt, synthetic construct
  misc_feature 1..978: note = derived and/or modified sequence opt6 fromCytochrome_c__Homo_sapiens__AAV38601
  source 1..978: mol_type = other RNA
atggcagcagcagcagcatcattacgtggagtagtactaggacctagaggagcaggattaccaggagctagagcaagaggattattatgttctgcacgaccaggacaacttccattaagaactccacaagccgttgcattatcatcaaaatctggactttcacgaggaagaaaagtaatgttatcagcactaggaatgctagccgcaggaggagcaggattagcaatggccttacattcagcagtatcagcttcagacttagaactacaccctccgtcatatccatggagtcatcgaggactactaagttcattagatcatacatcaataagaagaggatttcaagtatataaacaagtatgtgcatcatgtcattcaatggattttgtagcctacagacatttagttggagtatgttatacagaagacgaagcaaaagaattagccgcagaagttgaagtacaagatggaccaaatgaagatggagaaatgtttatgagacctggaaaattatttgactattttccaaaaccatacccaaatagcgaagcagcaagagccgcaaataatggagcactacctcctgatctttcatatattgtcagagcaagacatggtggtgaagattatgtattttcattactaacaggatattgtgaaccacctacaggagtatcattaagagaaggattatactttaacccatattttccaggacaagcaatagctatggcaccaccaatatatacagatgtattagaatttgacgatggaacacctgcaacaatgtcacaaatagcaaaagatgtatgtacatttttacgatgggcatcagaaccagaacatgatcatcgtaaaagaatgggattaaaaatgttaatgatgatggcattattagttcctttagtttatactataaaacgacataaatggagtgttttaaaatccagaaaattagcatatagacctccaaaataa

SEQ ID NO: 7257 - protein, 105 aa, synthetic construct; identical to SEQ ID NO: 7193
  REGION 1..105: note = Cytochrome_c__Homo_sapiens__P99999

SEQ ID NO: 7258 - RNA, 318 nt, synthetic construct; identical to SEQ ID NO: 7194
  misc_feature 1..318: note = Cytochrome_c__Homo_sapiens__AAA35732
  source 1..318: mol_type = other RNA

SEQ ID NO: 7259 - RNA, 318 nt, synthetic construct; identical to SEQ ID NO: 7195
  misc_feature 1..318: note = derived and/or modified sequence opt1 fromCytochrome_c__Homo_sapiens__AAA35732
  source 1..318: mol_type = other RNA

SEQ ID NO: 7260 - RNA, 318 nt, synthetic construct; identical to SEQ ID NO: 7196
  misc_feature 1..318: note = derived and/or modified sequence opt2 fromCytochrome_c__Homo_sapiens__AAA35732
  source 1..318: mol_type = other RNA

SEQ ID NO: 7261 - RNA, 318 nt, synthetic construct; identical to SEQ ID NO: 7197
  misc_feature 1..318: note = derived and/or modified sequence opt3 fromCytochrome_c__Homo_sapiens__AAA35732
  source 1..318: mol_type = other RNA

SEQ ID NO: 7262 - RNA, 318 nt, synthetic construct; identical to SEQ ID NO: 7198
  misc_feature 1..318: note = derived and/or modified sequence opt4 fromCytochrome_c__Homo_sapiens__AAA35732
  source 1..318: mol_type = other RNA

SEQ ID NO: 7263 - RNA, 318 nt, synthetic construct; identical to SEQ ID NO: 7199
  misc_feature 1..318: note = derived and/or modified sequence opt5 fromCytochrome_c__Homo_sapiens__AAA35732
  source 1..318: mol_type = other RNA

SEQ ID NO: 7264 - RNA, 318 nt, synthetic construct; identical to SEQ ID NO: 7200
  misc_feature 1..318: note = derived and/or modified sequence opt6 fromCytochrome_c__Homo_sapiens__AAA35732
  source 1..318: mol_type = other RNA

SEQ ID NO: 7265 - protein, 83 aa, synthetic construct [sequence omitted]

SEQ ID NO: 7266 - RNA, 252 nt, synthetic construct
  misc_feature 1..252: note = Cytochrome_c__Homo_sapiens__AAI00853
  source 1..252: mol_type = other RNA
atgctgtggaatctgctggctcttcgtcagattgggcagaggacgataagcactgcttcccgcaggcattttaaaaataaagttccggagaagcaaaaactgttccaggaggatgatgaaattccactgtatctaaagggtggggtagctgatgccctcctgtatagagccaccatgattcttacagttggtggaacagcatatgccatatatgagctggctgtggcttcatttcccaagaagcaggagtga

SEQ ID NO: 7267 - RNA, 252 nt, synthetic construct
  misc_feature 1..252: note = derived and/or modified sequence opt1 fromCytochrome_c__Homo_sapiens__AAI00853
  source 1..252: mol_type = other RNA
atgctgtggaacctcctggccctgcgccagatcggccagcggaccatcagcaccgcctcccgccggcacttcaagaacaaggtgcccgagaagcagaagctgttccaggaggacgacgagatcccgctctacctgaagggcggggtggcggacgccctcctgtaccgcgccacgatgatcctgaccgtcgggggcaccgcctacgccatctacgagctcgcggtggccagcttccccaagaagcaggagtga

SEQ ID NO: 7268 - RNA, 252 nt, synthetic construct
  misc_feature 1..252: note = derived and/or modified sequence opt2 fromCytochrome_c__Homo_sapiens__AAI00853
  source 1..252: mol_type = other RNA
atgctctggaacctcctcgccctccgccagatcggccagcgcaccatctccaccgcctcccgccgccacttcaagaacaaggtccccgagaagcagaagctcttccaggaggacgacgagatccccctctacctcaagggcggcgtcgccgacgccctcctctaccgcgccaccatgatcctcaccgtcggcggcaccgcctacgccatctacgagctcgccgtcgcctccttccccaagaagcaggagtga

SEQ ID NO: 7269 - RNA, 252 nt, synthetic construct
  misc_feature 1..252: note = derived and/or modified sequence opt3 fromCytochrome_c__Homo_sapiens__AAI00853
  source 1..252: mol_type = other RNA
atgctgtggaacctccttgccctgagacagatcggccaaaggaccattagcacagcttcccggcgccacttcaagaataaagtgcccgagaagcagaaattgtttcaggaagacgatgagatacctttatacctgaaagggggagtcgcagacgccctactctatcgagcgactatgatcctgacggttggtggcaccgcttacgccatttatgaacttgcagtggcctctttcccaaagaagcaggagtga

SEQ ID NO: 7270 - RNA, 252 nt, synthetic construct
  misc_feature 1..252: note = derived and/or modified sequence opt4 fromCytochrome_c__Homo_sapiens__AAI00853
  source 1..252: mol_type = other RNA
atgctgtggaacctgctggccctgagacagatcggccagagaaccatcagcaccgccagcagaagacacttcaagaacaaggtgcccgagaagcagaagctgttccaggaggacgacgagatccccctgtacctgaagggcggcgtggccgacgccctgctgtacagagccaccatgatcctgaccgtgggcggcaccgcctacgccatctacgagctggccgtggccagcttccccaagaagcaggagtga

SEQ ID NO: 7271 - RNA, 252 nt, synthetic construct
  misc_feature 1..252: note = derived and/or modified sequence opt5 fromCytochrome_c__Homo_sapiens__AAI00853
  source 1..252: mol_type = other RNA
atgctgtggaacctcctggcccttagacagatcggccaacggaccattagcacagcttcccgcagacacttcaagaataaagtgcccgagaagcagaaactgtttcaggaagacgatgagatccctctctacctgaaagggggagtcgccgacgcgcttctgtatcgggctacgatgattctcaccgttggcgggacagcctacgccatctatgaactggctgtggcctctttcccgaagaagcaggagtga

SEQ ID NO: 7272 - RNA, 252 nt, synthetic construct
  misc_feature 1..252: note = derived and/or modified sequence opt6 fromCytochrome_c__Homo_sapiens__AAI00853
  source 1..252: mol_type = other RNA
atgctatggaacctactagcactaagacaaataggacaaagaacaatatcaacagcaagcagaagacacttcaaaaacaaagtaccagaaaaacaaaaactattccaagaagacgacgaaataccactatacctaaaaggaggagtagcagacgcactactatacagagcaacaatgatactaacagtaggaggaacagcatacgcaatatacgaactagcagtagcatcattcccaaaaaaacaagaataa

SEQ ID NO: 7273 - protein, 69 aa, synthetic construct
  REGION 1..69: note = Cytochrome_c__Homo_sapiens__Q53XN1
MSVLTPLLLRGLTGSARRLPVPRAKIHSLPPEGKLGIMELAVGLTSCFVTFLLPAGWILSHLETYRRPE

SEQ ID NO: 7274 - RNA, 210 nt, synthetic construct
  misc_feature 1..210: note = Cytochrome_c__Homo_sapiens__AAP88805
  source 1..210: mol_type = other RNA
atgtccgtcctgacgccgctgctgctgcggggcttgacaggctcggcccggcggctcccagtgccgcgcgccaagatccattcgttgccgccggaggggaagcttgggatcatggaattggccgttgggcttacctcctgcttcgtgaccttcctcctgccagcgggctggatcctgtcacacctggagacctacaggaggccagagtag

SEQ ID NO: 7275 - RNA, 210 nt, synthetic construct
  misc_feature 1..210: note = derived and/or modified sequence opt1 fromCytochrome_c__Homo_sapiens__AAP88805
  source 1..210: mol_type = other RNA
atgagcgtgctgacgcccctcctgctgcgcggcctcaccgggtccgcccggcgcctgccggtcccccgggccaagatccacagcctgccgcccgagggcaagctcgggatcatggagctggcggtgggcctgacctcctgcttcgtgaccttcctcctgcccgccgggtggatcctgagccacctcgagacctaccgccggcccgagtga

SEQ ID NO: 7276 - RNA, 210 nt, synthetic construct
  misc_feature 1..210: note = derived and/or modified sequence opt2 fromCytochrome_c__Homo_sapiens__AAP88805
  source 1..210: mol_type = other RNA
atgtccgtcctcacccccctcctcctccgcggcctcaccggctccgcccgccgcctccccgtcccccgcgccaagatccactccctcccccccgagggcaagctcggcatcatggagctcgccgtcggcctcacctcctgcttcgtcaccttcctcctccccgccggctggatcctctcccacctcgagacctaccgccgccccgagtga

SEQ ID NO: 7277 - RNA, 210 nt, synthetic construct
  misc_feature 1..210: note = derived and/or modified sequence opt3 fromCytochrome_c__Homo_sapiens__AAP88805
  source 1..210: mol_type = other RNA
atgagcgtgctgacacccctccttctgagaggcttgaccgggtccgccaggcggttacctgtcccacgcgctaagatccactctctgccgcccgagggaaaactaggtattatggaactcgcagttggcctgacttcatgcttcgtgacgtttcttctgcctgccgggtggatattgagtcatctcgagacctaccgacgtccagaatga

SEQ ID NO: 7278 - RNA, 210 nt, synthetic construct
  misc_feature 1..210: note = derived and/or modified sequence opt4 fromCytochrome_c__Homo_sapiens__AAP88805
  source 1..210: mol_type = other RNA
atgagcgtgctgacccccctgctgctgagaggcctgaccggcagcgccagaagactgcccgtgcccagagccaagatccacagcctgccccccgagggcaagctgggcatcatggagctggccgtgggcctgaccagctgcttcgtgaccttcctgctgcccgccggctggatcctgagccacctggagacctacagaagacccgagtga

SEQ ID NO: 7279 - RNA, 210 nt, synthetic construct
  misc_feature 1..210: note = derived and/or modified sequence opt5 fromCytochrome_c__Homo_sapiens__AAP88805
  source 1..210: mol_type = other RNA
atgagcgtgctgacacccctcctgcttagaggcctgaccgggtccgcccggcgcctccctgtcccgagagctaagatccactctctgccccctgagggaaaacttggcattatggaactggccgttgggctcacgagctgcttcgtgacctttctgctgcccgcgggatggatcctctcccatctggagacataccggcgccctgaatga

SEQ ID NO: 7280 - RNA, 210 nt, synthetic construct
  misc_feature 1..210: note = derived and/or modified sequence opt6 fromCytochrome_c__Homo_sapiens__AAP88805
  source 1..210: mol_type = other RNA
atgtcagtactaacaccactactactaagaggactaacaggatcagcaagaagactaccagtaccaagagcaaaaatacactcactaccaccagaaggaaaattaggcataatggaactagcagtaggactaacatcatgtttcgtaacattcctactaccagcaggatggatactatcacacctagaaacatacagaagaccagaataa

SEQ ID NO: 7281 - protein, 114 aa, synthetic construct
  REGION 1..114: note = Cytochrome_c__Homo_sapiens__Q6FGA0
MYYKFSGFTQKLAGAWASEAYSPQGLKPVVSTEAPPIIFATPTKLTSDSTVYDYAGKNKVPELQKFFQKADGVPVYLKRGLPDQMLYRTTMALTVGGTIYCLIALYMASQPKNK

SEQ ID NO: 7282 - RNA, 345 nt, synthetic construct
  misc_feature 1..345: note = Cytochrome_c__Homo_sapiens__AAY15087
  source 1..345: mol_type = other RNA
atgtactacaagtttagtggcttcacgcagaagttggcaggagcatgggcttcggaggcctatagcccgcagggattaaagcctgtggtttccacagaagcaccacctatcatatttgccacaccaactaaactgacctccgattccacagtgtatgattatgctgggaaaaacaaagttccagagctacaaaagtttttccagaaagctgatggtgtgcccgtctacctgaaacgaggcctgcctgaccaaatgctttaccggaccaccatggcgctgactgtgggagggaccatctactgcctgatcgccctctacatggcttcgcagcccaaaaacaaatga

SEQ ID NO: 7283 - RNA, 345 nt, synthetic construct
  misc_feature 1..345: note = derived and/or modified sequence opt1 fromCytochrome_c__Homo_sapiens__AAY15087
  source 1..345: mol_type = other RNA
atgtactacaagttcagcggcttcacccagaagctggccggggcctgggcgtccgaggcctacagcccccagggcctcaagccggtggtctccaccgaggccccgcccatcatcttcgccacgcccaccaagctgaccagcgactccaccgtgtacgactacgccgggaagaacaaggtgcccgagctgcagaagttcttccagaaggcggacggcgtccccgtgtacctcaagcgcgggctgcccgaccagatgctgtaccggacgaccatggccctcaccgtgggcggcaccatctactgcctgatcgccctgtacatggccagccagcccaagaacaagtga

SEQ ID NO: 7284 - RNA, 345 nt, synthetic construct
  misc_feature 1..345: note = derived and/or modified sequence opt2 fromCytochrome_c__Homo_sapiens__AAY15087
  source 1..345: mol_type = other RNA
atgtactacaagttctccggcttcacccagaagctcgccggcgcctgggcctccgaggcctactccccccagggcctcaagcccgtcgtctccaccgaggccccccccatcatcttcgccacccccaccaagctcacctccgactccaccgtctacgactacgccggcaagaacaaggtccccgagctccagaagttcttccagaaggccgacggcgtccccgtctacctcaagcgcggcctccccgaccagatgctctaccgcaccaccatggccctcaccgtcggcggcaccatctactgcctcatcgccctctacatggcctcccagcccaagaacaagtga

SEQ ID NO: 7285 - RNA, 345 nt, synthetic construct
  misc_feature 1..345: note = derived and/or modified sequence opt3 fromCytochrome_c__Homo_sapiens__AAY15087
  source 1..345: mol_type = other RNA
atgtactataagttcagcggctttacccagaaactggccggggcttgggcatccgaggcctactctccccaaggactcaagcctgtggtctcaacagaagcgccaccgatcattttcgctactcccacgaaacttaccagtgacagcacagtttatgattacgccggtaagaacaaagtgcctgagctgcagaagtttttccagaaggcagacggcgtaccagtgtatttgaaaagagggttacccgatcagatgctgtacaggactaccatggccctaacagtcggaggcaccatatattgcctcatcgctctgtacatggcatcccaacctaagaataaatga

SEQ ID NO: 7286 - RNA, 345 nt, synthetic construct
  misc_feature 1..345: note = derived and/or modified sequence opt4 fromCytochrome_c__Homo_sapiens__AAY15087
  source 1..345: mol_type = other RNA
atgtactacaagttcagcggcttcacccagaagctggccggcgcctgggccagcgaggcctacagcccccagggcctgaagcccgtggtgagcaccgaggccccccccatcatcttcgccacccccaccaagctgaccagcgacagcaccgtgtacgactacgccggcaagaacaaggtgcccgagctgcagaagttcttccagaaggccgacggcgtgcccgtgtacctgaagagaggcctgcccgaccagatgctgtacagaaccaccatggccctgaccgtgggcggcaccatctactgcctgatcgccctgtacatggccagccagcccaagaacaagtga

SEQ ID NO: 7287 - RNA, 345 nt, synthetic construct
  misc_feature 1..345: note = derived and/or modified sequence opt5 fromCytochrome_c__Homo_sapiens__AAY15087
  source 1..345: mol_type = other RNA
atgtactataagttcagcggctttacccagaaactggccggggcttgggcctccgaggcgtactctccccaaggactcaagcctgtggtcagcacagaagctccgcccatcattttcgccacgcctaccaaactgacatccgactctaccgtttatgattacgccggcaagaacaaagtgcccgagcttcagaagtttttccagaaggctgacggggtgcctgtctatctgaaaagaggactccccgatcagatgctgtaccggacaaccatggcccttacagtgggcgggaccatctattgcctgattgctctctacatggccagccaacctaagaataaatga

SEQ ID NO: 7288 - RNA, 345 nt, synthetic construct
  misc_feature 1..345: note = derived and/or modified sequence opt6 fromCytochrome_c__Homo_sapiens__AAY15087
  source 1..345: mol_type = other RNA
atgtactacaaattctcaggattcacacaaaaactagcaggagcatgggcatcagaagcatactcaccacaaggactaaaaccagtagtatcaacagaagcaccaccaataatattcgcaacaccaacaaaactaacatcagactcaacagtatacgactacgcaggaaaaaacaaagtaccagaactacaaaaattcttccaaaaagcagacggagtaccagtatacttaaaaagaggactaccagaccaaatgctatacagaacaacaatggcactaacagtaggaggaacaatatactgcctaatagcactatacatggcatcacaaccaaaaaacaaataa

SEQ ID NO: 7289 - protein, 79 aa, synthetic construct
  REGION 1..79: note = Cytochrome_c__Homo_sapiens__Q6FGI7
MQALRVSQALIRSFSSTARNRFQNRVREKQKLFQEDNDIPLYLKGGIVDNILYRVTMTLCLGGTVYSLYSLGWASFPRN

SEQ ID NO: 7290 - RNA, 240 nt, synthetic construct
  misc_feature 1..240: note = Cytochrome_c__Homo_sapiens__AAP35570
  source 1..240: mol_type = other RNA
atgcaggcccttcgggtgtcccaggcgctgatccgctccttcagctccaccgcccggaaccgctttcagaaccgagtgcgcgagaaacagaagctcttccaggaggacaatgacatcccgttgtacctgaagggcggcatcgttgacaacatcctgtaccgagtgacaatgacgctgtgtctgggcggcactgtctacagcttgtactcccttggctgggcctccttccccaggaattag

SEQ ID NO: 7291 - RNA, 240 nt, synthetic construct
  misc_feature 1..240: note = derived and/or modified sequence opt1 fromCytochrome_c__Homo_sapiens__AAP35570
  source 1..240: mol_type = other RNA
atgcaggccctgcgcgtgagccaggccctcatccggtccttcagctccaccgcgcgcaaccggttccagaaccgcgtccgggagaagcagaagctgttccaggaggacaacgacatccccctgtacctcaagggcgggatcgtggacaacatcctgtaccgcgtgaccatgacgctgtgcctcggcgggaccgtctacagcctgtactccctgggctgggccagcttcccgcggaactga

SEQ ID NO: 7292 - RNA, 240 nt, synthetic construct
  misc_feature 1..240: note = derived and/or modified sequence opt2 fromCytochrome_c__Homo_sapiens__AAP35570
  source 1..240: mol_type = other RNA
atgcaggccctccgcgtctcccaggccctcatccgctccttctcctccaccgcccgcaaccgcttccagaaccgcgtccgcgagaagcagaagctcttccaggaggacaacgacatccccctctacctcaagggcggcatcgtcgacaacatcctctaccgcgtcaccatgaccctctgcctcggcggcaccgtctactccctctactccctcggctgggcctccttcccccgcaactga

SEQ ID NO: 7293 - RNA, 240 nt, synthetic construct
  misc_feature 1..240: note = derived and/or modified sequence opt3 fromCytochrome_c__Homo_sapiens__AAP35570
  source 1..240: mol_type = other RNA
atgcaggccctgagagtgagccaagctctcatcaggtccttctcttcaaccgcacggaaccgctttcagaatcgagtccgtgagaagcagaaacttttccaggaagacaacgatattcccctgtacttgaagggcgggatagttgacaatatcttatatagagtgacaatgactctgtgcctaggaggtacggtatacagtctctatagcctgggctgggcctcctttcctaggaactga

SEQ ID NO: 7294 - RNA, 240 nt, synthetic construct
  misc_feature 1..240: note = derived and/or modified sequence opt4 fromCytochrome_c__Homo_sapiens__AAP35570
  source 1..240: mol_type = other RNA
atgcaggccctgagagtgagccaggccctgatcagaagcttcagcagcaccgccagaaacagattccagaacagagtgagagagaagcagaagctgttccaggaggacaacgacatccccctgtacctgaagggcggcatcgtggacaacatcctgtacagagtgaccatgaccctgtgcctgggcggcaccgtgtacagcctgtacagcctgggctgggccagcttccccagaaactga

SEQ ID NO: 7295 - RNA, 240 nt, synthetic construct
  misc_feature 1..240: note = derived and/or modified sequence opt5 fromCytochrome_c__Homo_sapiens__AAP35570
  source 1..240: mol_type = other RNA
atgcaggccctgagagtgagccaagctctcatccggtccttctctagcaccgcccgcaacagatttcagaatcgggtccgcgagaagcagaaactgttccaggaagacaacgatattcccctttacctgaagggcgggatcgttgacaatattctctatagagtgacaatgacgctgtgccttggaggcaccgtgtactccctgtattctctcgggtgggcgagctttcctcggaactga

SEQ ID NO: 7296 - RNA, 240 nt, synthetic construct
  misc_feature 1..240: note = derived and/or modified sequence opt6 fromCytochrome_c__Homo_sapiens__AAP35570
  source 1..240: mol_type = other RNA
atgcaagcactaagagtatcacaagcactaataagatcattctcatcaacagcaagaaacagattccaaaacagagtaagagaaaaacaaaaactattccaagaagacaacgacataccactatacctaaaaggaggaatagtagacaacatactatacagagtaacaatgacactatgcctaggaggaacagtatactcactatactcactaggatgggcatcattcccaagaaactaa

SEQ ID NO: 7297 - protein, 63 aa, synthetic construct
  REGION 1..63: note = Cytochrome_c__Homo_sapiens__Q71U45
MLGQSIRRFTTSVVRRSHYEEGPGKNLPFSVENKWRLLAMMTVYFGSGFAAPFFIVRHQLLKK

SEQ ID NO: 7298 - RNA, 192 nt, synthetic construct
  misc_feature 1..192: note = Cytochrome_c__Homo_sapiens__AAP97260
  source 1..192: mol_type = other RNA
atgttgggccagagtatccggaggttcacgacctccgtggtccgtcgcagccactatgaggagggtccggggaagaatttgccattttcagtggaaaacaagtggcggttgctggctatgatgaccgtgtactttggatctgggtttgccgcacctttctttatagtaagacaccagctacttaaaaaataa

SEQ ID NO: 7299 - RNA, 192 nt, synthetic construct
  misc_feature 1..192: note = derived and/or modified sequence opt1 fromCytochrome_c__Homo_sapiens__AAP97260
  source 1..192: mol_type = other RNA
atgctgggccagagcatccgccggttcaccacctccgtggtccgccggagccactacgaggaggggcccggcaagaacctcccgttctccgtggagaacaagtggcgcctgctggccatgatgacggtgtacttcgggagcggcttcgccgcgcccttcttcatcgtccggcaccagctcctgaagaagtga

SEQ ID NO: 7300 - RNA, 192 nt, synthetic construct
  misc_feature 1..192: note = derived and/or modified sequence opt2 fromCytochrome_c__Homo_sapiens__AAP97260
  source 1..192: mol_type = other RNA
atgctcggccagtccatccgccgcttcaccacctccgtcgtccgccgctcccactacgaggagggccccggcaagaacctccccttctccgtcgagaacaagtggcgcctcctcgccatgatgaccgtctacttcggctccggcttcgccgcccccttcttcatcgtccgccaccagctcctcaagaagtga

SEQ ID NO: 7301 - RNA, 192 nt, synthetic construct
  misc_feature 1..192: note = derived and/or modified sequence opt3 fromCytochrome_c__Homo_sapiens__AAP97260
  source 1..192: mol_type = other RNA
atgctgggccagagcatcagaaggttcaccacatccgtggtccggcgctctcactacgaggaagggcccggaaagaacctccctttttcagttgagaataaatggcgacttctggccatgatgactgtgtatttcggtagtggctttgctgcaccattctttattgtacgtcatcaattgttaaagaaatga

SEQ ID NO: 7302 - RNA, 192 nt, synthetic construct
  misc_feature 1..192: note = derived and/or modified sequence opt4 fromCytochrome_c__Homo_sapiens__AAP97260
  source 1..192: mol_type = other RNA
atgctgggccagagcatcagaagattcaccaccagcgtggtgagaagaagccactacgaggagggccccggcaagaacctgcccttcagcgtggagaacaagtggagactgctggccatgatgaccgtgtacttcggcagcggcttcgccgcccccttcttcatcgtgagacaccagctgctgaagaagtga

SEQ ID NO: 7303 - RNA, 192 nt, synthetic construct
  misc_feature 1..192: note = derived and/or modified sequence opt5 fromCytochrome_c__Homo_sapiens__AAP97260
  source 1..192: mol_type = other RNA
atgctgggccagagcatcagacggttcaccacatccgtggtccgcagatctcactacgaggaagggcccggaaagaacctcccttttagcgttgagaataaatggcggctgcttgccatgatgacggtgtatttcggctccgggtttgctgccccgttctttattgtgcgccatcaactgctcaagaaatga

SEQ ID NO: 7304 - RNA, 192 nt, synthetic construct
  misc_feature 1..192: note = derived and/or modified sequence opt6 fromCytochrome_c__Homo_sapiens__AAP97260
  source 1..192: mol_type = other RNA
atgctaggacaatcaataagaagattcacaacatcagtagtaagaagatcacactacgaagaaggaccaggaaaaaacctaccattctcagtagaaaacaaatggagactactagcaatgatgacagtatacttcggatcaggattcgcagcaccattcttcatagtaagacaccaactactaaaaaaataa

SEQ ID NO: 7305 - protein, 83 aa, synthetic construct
  REGION 1..83: note = Cytochrome_c__Homo_sapiens__Q86WV2
MLATRVFSLVGKRAISTSVCVRAHESVVKSEDFSLPAYMDRRDHPLPEVAHVKHLSASQKALKEKEKASWSSLSMDEKVECGY

SEQ ID NO: 7306 - RNA, 252 nt, synthetic construct
  misc_feature 1..252: note = Cytochrome_c__Homo_sapiens__AAH47869
  source 1..252: mol_type = other RNA
atgttggctaccagggtatttagcctagttggcaagcgagcaatttccacctctgtgtgtgtacgagctcatgaaagtgttgtgaagagcgaagacttttcgctcccagcttatatggatcggcgtgaccaccccttgccggaggtggcccatgtcaagcacctgtctgccagccagaaggcactgaaggagaaggagaaggcctcctggagcagcctctccatggatgagaaagtcgagtgtgggtattga

SEQ ID NO: 7307 - RNA, 252 nt, synthetic construct
  misc_feature 1..252: note = derived and/or modified sequence opt1 fromCytochrome_c__Homo_sapiens__AAH47869
  source 1..252: mol_type = other RNA
atgctggccacccgcgtgttcagcctcgtcggcaagcgggccatctccaccagcgtgtgcgtgcgcgcgcacgagtccgtcgtcaagagcgaggacttctccctgcccgcctacatggaccggcgcgaccacccgctgcccgaggtggcccacgtgaagcacctcagcgcctcccagaaggccctgaaggagaaggagaaggcgagctggtccagcctgtccatggacgagaaggtggagtgcgggtactga

SEQ ID NO: 7308 - RNA, 252 nt, synthetic construct
  misc_feature 1..252: note = derived and/or modified sequence opt2 fromCytochrome_c__Homo_sapiens__AAH47869
  source 1..252: mol_type = other RNA
atgctcgccacccgcgtcttctccctcgtcggcaagcgcgccatctccacctccgtctgcgtccgcgcccacgagtccgtcgtcaagtccgaggacttctccctccccgcctacatggaccgccgcgaccaccccctccccgaggtcgcccacgtcaagcacctctccgcctcccagaaggccctcaaggagaaggagaaggcctcctggtcctccctctccatggacgagaaggtcgagtgcggctactga

SEQ ID NO: 7309 - RNA, 252 nt, synthetic construct
  misc_feature 1..252: note = derived and/or modified sequence opt3 fromCytochrome_c__Homo_sapiens__AAH47869
  source 1..252: mol_type = other RNA
atgctggccaccagagtgttcagcctcgtcggcaagagggctatctccacatctgtttgcgtgcgggcacacgagtcagtagtgaaaagtgaagactttagccttcccgcctacatggatcgccgagaccatcctctgccagaggtcgcgcacgtgaagcatttgtccgcttctcagaaagccttaaaggaaaaagagaaggcatcgtggtcaagcctgagtatggatgaaaaggttgagtgtgggtattga

SEQ ID NO: 7310 - RNA, 252 nt, synthetic construct
  misc_feature 1..252: note = derived and/or modified sequence opt4 fromCytochrome_c__Homo_sapiens__AAH47869
  source 1..252: mol_type = other RNA
atgctggccaccagagtgttcagcctggtgggcaagagagccatcagcaccagcgtgtgcgtgagagcccacgagagcgtggtgaagagcgaggacttcagcctgcccgcctacatggacagaagagaccaccccctgcccgaggtggcccacgtgaagcacctgagcgccagccagaaggccctgaaggagaaggagaaggccagctggagcagcctgagcatggacgagaaggtggagtgcggctactga

SEQ ID NO: 7311 - RNA, 252 nt, synthetic construct
  misc_feature 1..252: note = derived and/or modified sequence opt5 fromCytochrome_c__Homo_sapiens__AAH47869
  source 1..252: mol_type = other RNA
atgctggccaccagagtgttcagcctcgtcggcaagcgggctatctccacatctgtttgcgtgcgcgcccacgagagcgtggtcaaatccgaagacttttctctgcccgcgtacatggatagacgggaccatcctcttccggaggtggctcacgttaagcatctgagcgcctcccagaaagccctcaaggaaaaagagaaggcttcttggagctccctgagcatggatgaaaaggtggagtgtgggtattga

SEQ ID NO: 7312 - RNA, 252 nt, synthetic construct
  misc_feature 1..252: note = derived and/or modified sequence opt6 fromCytochrome_c__Homo_sapiens__AAH47869
  source 1..252: mol_type = other RNA
atgctagcaacaagagtatttagcctagtaggaaaaagagcaataagcacaagcgtatgcgtaagagcacacgaaagcgtagtaaaaagcgaagactttagcttaccagcatacatggacagaagagatcacccactaccagaagtagcacatgtaaaacacttaagcgcaagccaaaaagcactaaaagaaaaagaaaaagcatcatggtcaagcttaagcatggacgaaaaagtagaatgtggatattaa

SEQ ID NO: 7313 - protein, 86 aa, synthetic construct
  REGION 1..86: note = Cytochrome_c__Homo_sapiens__Q9UEG9
MSSGAHGEEGSARMWKTLTFFVALPGVAVSMLNVYLKSHHGEHERPEFIAYPHLRIRTKPFPWGDGNHTLFHNPHVNPLPTGYEDE

SEQ ID NO: 7314 - RNA, 261 nt, synthetic construct
  misc_feature 1..261: note = Cytochrome_c__Homo_sapiens__AAD00554
  source 1..261: mol_type = other RNA
atgtcgagtggcgcccatggcgaagagggctcagctcgcatgtggaagactctcaccttcttcgtcgcgctccccggggtggcagtcagcatgctgaatgtgtacctgaagtcgcaccacggagagcacgagagacccgagttcatcgcctacccccatctccgcatcaggaccaagccgtttccctggggagatggtaaccatactctattccataaccctcatgtgaatccacttccaactggctacgaagatgaataa

SEQ ID NO: 7315 - RNA, 261 nt, synthetic construct
  misc_feature 1..261: note = derived and/or modified sequence opt1 fromCytochrome_c__Homo_sapiens__AAD00554
  source 1..261: mol_type = other RNA
atgagcagcggcgcccacggggaggagggcagcgcccgcatgtggaagaccctgaccttcttcgtggcgctccccggggtcgccgtgtccatgctgaacgtgtacctgaagtcccaccacggcgagcacgagcggccggagttcatcgcctacccccacctccgcatccggacgaagcccttcccctggggcgacgggaaccacaccctgttccacaacccgcacgtcaaccccctgcccaccggctacgaggacgagtga

SEQ ID NO: 7316 - RNA, 261 nt, synthetic construct
  misc_feature 1..261: note = derived and/or modified sequence opt2 fromCytochrome_c__Homo_sapiens__AAD00554
  source 1..261: mol_type = other RNA
atgtcctccggcgcccacggcgaggagggctccgcccgcatgtggaagaccctcaccttcttcgtcgccctccccggcgtcgccgtctccatgctcaacgtctacctcaagtcccaccacggcgagcacgagcgccccgagttcatcgcctacccccacctccgcatccgcaccaagcccttcccctggggcgacggcaaccacaccctcttccacaacccccacgtcaaccccctccccaccggctacgaggacgagtga

SEQ ID NO: 7317 - RNA, 261 nt, synthetic construct
  misc_feature 1..261: note = derived and/or modified sequence opt3 fromCytochrome_c__Homo_sapiens__AAD00554
  source 1..261: mol_type = other RNA
atgagctccggcgcccacggggaggaaggatctgctagaatgtggaagaccctgacattctttgtggcactccccggtgtcgccgtttcaatgcttaacgtgtacctgaaaagtcatcacggcgagcatgaaaggcctgagttcatcgcgtatccacacttgcggattcgcactaagccgtttccctggggagacgggaatcatacgttattccacaaccctcacgtaaatccactgcccaccggctacgaagatgagtga

SEQ ID NO: 7318 - RNA, 261 nt, synthetic construct
  misc_feature 1..261: note = derived and/or modified sequence opt4 fromCytochrome_c__Homo_sapiens__AAD00554
  source 1..261: mol_type = other RNA
atgagcagcggcgcccacggcgaggagggcagcgccagaatgtggaagaccctgaccttcttcgtggccctgcccggcgtggccgtgagcatgctgaacgtgtacctgaagagccaccacggcgagcacgagagacccgagttcatcgcctacccccacctgagaatcagaaccaagcccttcccctggggcgacggcaaccacaccctgttccacaacccccacgtgaaccccctgcccaccggctacgaggacgagtga

SEQ ID NO: 7319 - RNA, 261 nt, synthetic construct
  misc_feature 1..261: note = derived and/or modified sequence opt5 fromCytochrome_c__Homo_sapiens__AAD00554
  source 1..261: mol_type = other RNA
atgagctccggcgcccacggggaggaaggatctgctagaatgtggaagaccctgacattctttgtggccctccccggcgtcgcggttagcatgctgaacgtgtaccttaaatcccatcacggggagcatgaacggcctgagttcatcgcttatccgcatctgcgcattagaacgaagccctttccttggggagacggcaatcacaccctcttccacaacccccacgtgaatcctctgcccacagggtacgaagatgagtga

SEQ ID NO: 7320 - RNA, 261 nt, synthetic construct
  misc_feature 1..261: note = derived and/or modified sequence opt6 fromCytochrome_c__Homo_sapiens__AAD00554
  source 1..261: mol_type = other RNA
atgtcatcaggagcacacggagaagaaggatcagcaagaatgtggaaaacactaacattcttcgtagcactaccaggagtagcagtatcaatgctaaacgtatacctaaaatcacaccacggagaacacgaaagaccagaattcatagcatacccacacctaagaataagaacaaaaccattcccatggggagacggaaaccacacactattccacaacccacacgtaaacccactaccaacaggatacgaagacgaataa

SEQ ID NO: 7321 - protein, 281 aa, synthetic construct
  REGION 1..281: note = FasL__Homo_sapiens__P48023
MQQPFNYPYPQIYWVDSSASSPWAPPGTVLPCPTSVPRRPGQRRPPPPPPPPPLPPPPPPPPLPPLPLPPLKKRGNHSTGLCLLVMFFMVLVALVGLGLGMFQLFHLQKELAELRESTSQMHTASSLEKQIGHPSPPPEKKELRKVAHLTGKSNSRSMPLEWEDTYGIVLLSGVKYKKGGLVINETGLYFVYSKVYFRGQSCNNLPLSHKVYMRNSKYPQDLVMMEGKMMSYCTTGQMWARSSYLGAVFNLTSADHLYVNVSELSLVNFEESQTFFGLYKL

SEQ ID NO: 7322 - RNA, 846 nt, synthetic construct
  misc_feature 1..846: note = FasL__Homo_sapiens__AAC50071
  source 1..846: mol_type = other RNA
atgcagcagcccttcaattacccatatccccagatctactgggtggacagcagtgccagctctccctgggcccctccaggcacagttcttccctgtccaacctctgtgcccagaaggcctggtcaaaggaggccaccaccaccaccgccaccgccaccactaccacctccgccgccgccgccaccactgcctccactaccgctgccacccctgaagaagagagggaaccacagcacaggcctgtgtctccttgtgatgtttttcatggttctggttgccttggtaggattgggcctggggatgtttcagctcttccacctacagaaggagctggcagaactccgagagtctaccagccagatgcacacagcatcatctttggagaagcaaataggccaccccagtccaccccctgaaaaaaaggagctgaggaaagtggcccatttaacaggcaagtccaactcaaggtccatgcctctggaatgggaagacacctatggaattgtcctgctttctggagtgaagtataagaagggtggccttgtgatcaatgaaactgggctgtactttgtatattccaaagtatacttccggggtcaatcttgcaacaacctgcccctgagccacaaggtctacatgaggaactctaagtatccccaggatctggtgatgatggaggggaagatgatgagctactgcactactgggcagatgtgggcccgcagcagctacctgggggcagtgttcaatcttaccagtgctgatcatttatatgtcaacgtatctgagctctctctggtcaattttgaggaatctcagacgtttttcggcttatataagctctaa

SEQ ID NO: 7323 - RNA, 846 nt, synthetic construct
  misc_feature 1..846: note = derived and/or modified sequence opt1 fromFasL__Homo_sapiens__AAC50071
  source 1..846: mol_type = other RNA
atgcagcagcccttcaactacccgtacccccagatctactgggtggacagctccgccagctccccctgggcccccccgggcaccgtcctgccctgccccaccagcgtgccccgccggccggggcagcgccggcccccccccccgcccccccccccgcccctcccccccccgcccccccccccgcccctgccccccctgccgctcccccccctgaagaagcgcggcaaccactccacggggctgtgcctcctggtgatgttcttcatggtcctggtggcgctcgtgggcctggggctgggcatgttccagctcttccacctgcagaaggagctggccgagctccgggagagcacctcccagatgcacaccgccagctccctggagaagcagatcggccacccgagccccccccccgagaagaaggagctgcgcaaggtcgcccacctcaccgggaagtccaacagccggtccatgccgctggagtgggaggacacgtacggcatcgtgctgctcagcggggtgaagtacaagaagggcgggctggtcatcaacgagaccggcctgtacttcgtgtactccaaggtgtacttccgcggccagagctgcaacaacctccccctgtcccacaaggtctacatgcggaacagcaagtacccccaggacctggtgatgatggaggggaagatgatgtcctactgcaccaccggccagatgtgggcccgcagcagctacctcggggcggtgttcaacctgacgtccgccgaccacctgtacgtcaacgtgagcgagctctccctggtgaacttcgaggagagccagaccttcttcggcctgtacaagctctga

SEQ ID NO: 7324 - RNA, 846 nt, synthetic construct
  misc_feature 1..846: note = derived and/or modified sequence opt2 fromFasL__Homo_sapiens__AAC50071
  source 1..846: mol_type = other RNA
atgcagcagcccttcaactacccctacccccagatctactgggtcgactcctccgcctcctccccctgggccccccccggcaccgtcctcccctgccccacctccgtcccccgccgccccggccagcgccgccccccccccccccccccccccccccccctcccccccccccccccccccccccccctcccccccctccccctcccccccctcaagaagcgcggcaaccactccaccggcctctgcctcctcgtcatgttcttcatggtcctcgtcgccctcgtcggcctcggcctcggcatgttccagctcttccacctccagaaggagctcgccgagctccgcgagtccacctcccagatgcacaccgcctcctccctcgagaagcagatcggccacccctcccccccccccgagaagaaggagctccgcaaggtcgcccacctcaccggcaagtccaactcccgctccatgcccctcgagtgggaggacacctacggcatcgtcctcctctccggcgtcaagtacaagaagggcggcctcgtcatcaacgagaccggcctctacttcgtctactccaaggtctacttccgcggccagtcctgcaacaacctccccctctcccacaaggtctacatgcgcaactccaagtacccccaggacctcgtcatgatggagggcaagatgatgtcctactgcaccaccggccagatgtgggcccgctcctcctacctcggcgccgtcttcaacctcacctccgccgaccacctctacgtcaacgtctccgagctctccctcgtcaacttcgaggagtcccagaccttcttcggcctctacaagctctga

SEQ ID NO: 7325 - RNA, 846 nt, synthetic construct
  misc_feature 1..846: note = derived and/or modified sequence opt3 fromFasL__Homo_sapiens__AAC50071
  source 1..846: mol_type = other RNA
atgcagcaacccttcaactacccttatccacagatctactgggtggacagctccgcctcttcaccgtgggctccccctggcaccgtcctgccatgccccacaagtgttcctagaaggccagggcagcggcgaccccctccaccgccccctccaccccctctcccacccccgcctcccccacctccccttccacccctgcctttgccaccgttaaagaaacgcggaaatcacagcactggtctgtgtctactcgtgatgtttttcatggtactggtggcacttgtcggcctggggttgggaatgtttcaactcttccatctgcagaaggagctggccgaactccgtgagtccacgtctcagatgcacaccgcgtcgtcattagaaaaacagattggccatcccagccctccacccgagaagaaagaactgagaaaggtggctcaccttacaggtaagagtaactccaggtctatgcctttggagtgggaggatacttatgggatagttctgctaagcggagtgaaatacaagaaaggcggcctcgtcatcaatgaaaccgggctgtattttgtgtactccaaggtatatttccggggacagtcatgcaacaatcttccactgagtcataaagtttacatgcgcaacagcaagtacccccaagacttggtgatgatggagggtaagatgatgtcttattgtacaaccggccagatgtgggccagatcctcatacctcggggcagtctttaatctgactagcgccgatcacttatatgtgaacgtgagtgaactgtctctcgtcaatttcgaggagtcccagacatttttcggactttacaaactgtga

SEQ ID NO: 7326 - RNA, 846 nt, synthetic construct
  misc_feature 1..846: note = derived and/or modified sequence opt4 fromFasL__Homo_sapiens__AAC50071
  source 1..846: mol_type = other RNA
atgcagcagcccttcaactacccctacccccagatctactgggtggacagcagcgccagcagcccctgggccccccccggcaccgtgctgccctgccccaccagcgtgcccagaagacccggccagagaagacccccccccccccccccccccccccccctgccccccccccccccccccccccccctgccccccctgcccctgccccccctgaagaagagaggcaaccacagcaccggcctgtgcctgctggtgatgttcttcatggtgctggtggccctggtgggcctgggcctgggcatgttccagctgttccacctgcagaaggagctggccgagctgagagagagcaccagccagatgcacaccgccagcagcctggagaagcagatcggccaccccagccccccccccgagaagaaggagctgagaaaggtggcccacctgaccggcaagagcaacagcagaagcatgcccctggagtgggaggacacctacggcatcgtgctgctgagcggcgtgaagtacaagaagggcggcctggtgatcaacgagaccggcctgtacttcgtgtacagcaaggtgtacttcagaggccagagctgcaacaacctgcccctgagccacaaggtgtacatgagaaacagcaagtacccccaggacctggtgatgatggagggcaagatgatgagctactgcaccaccggccagatgtgggccagaagcagctacctgggcgccgtgttcaacctgaccagcgccgaccacctgtacgtgaacgtgagcgagctgagcctggtgaacttcgaggagagccagaccttcttcggcctgtacaagctgtga

SEQ ID NO: 7327 - RNA, 846 nt, synthetic construct
  misc_feature 1..846: note = derived and/or modified sequence opt5 fromFasL__Homo_sapiens__AAC50071
  source 1..846: mol_type = other RNA
atgcagcaacccttcaactacccttatccgcagatctactgggtggacagctccgcctctagcccctgggctcctcccggcaccgtcctgccttgccccacatccgttcctagacggccggggcagcgcagaccccctccccctcccccgcctccccctctgccccctcccccgccccctccccctctgcccccgcttcctctgccccctctcaagaaacggggaaatcactctacgggcctgtgtcttctggtgatgtttttcatggtgctcgtcgccctggtggggctcggactcggcatgtttcagctgttccatcttcaaaaggagctggcggaactccgcgagagcacctcccagatgcacacagcttctagcctggaaaaacagattgggcatccctcccctcccccggagaagaaagaacttagaaaggttgcccacctgaccggaaagagcaactctcggtccatgcctctcgagtgggaggatacatatggcatcgtgctgctgagcggcgtcaaatacaagaaagggggactcgtgattaatgaaaccggcctgtattttgtttactctaaggtgtatttccgcgggcagtcctgcaacaatcttcccctgagccataaagtctacatgagaaactctaagtacccccaagacctcgtgatgatggagggaaagatgatgtcctattgtacaaccggccagatgtgggcccggagctcctacctgggggctgtgtttaatcttacgtctgccgatcacctgtatgtcaacgttagcgaactctccctggtgaatttcgaggagagccagacctttttcggactgtacaaactctga

SEQ ID NO: 7328 - RNA, 846 nt, synthetic construct
  misc_feature 1..846: note = derived and/or modified sequence opt6 fromFasL__Homo_sapiens__AAC50071
  source 1..846: mol_type = other RNA
atgcaacaaccattcaactacccatatccacaaatatactgggtagactcttcagcatcatcaccatgggcaccaccaggaacagtactcccttgcccaacatctgtaccaagaagaccaggacaaagaagacccccacccccaccaccaccaccacctcttccaccccccccaccaccaccacccttaccaccactacccctaccaccattaaaaaaaagaggtaaccactccacaggcctatgcttactagtaatgttcttcatggtactagtcgcccttgtaggactaggactcggaatgtttcaattattccacttacaaaaagaactagcagaactaagagaatctacatcacaaatgcacaccgcctcatcactagaaaaacaaattggacacccatcaccaccaccagaaaaaaaagaactcagaaaagtcgcacacttaacaggaaaatcaaactccagatcaatgccactagaatgggaagacacatacggaatagtactactttcaggagtaaaatacaaaaaaggaggactagtaataaacgaaacaggattatacttcgtatactcaaaagtatactttcgaggacaatcatgcaacaacctaccactatcacacaaagtatacatgagaaactcaaaatacccacaagacctagtaatgatggaaggaaaaatgatgtcatattgcacaacaggacaaatgtgggcaagatcatcttacctaggagcagtcttcaacttaacatcagctgaccacctatacgtaaacgtatccgaactatcattagtaaacttcgaagaatcacaaactttcttcggactctacaaactataa

SEQ ID NO: 7329 - protein, 235 aa, synthetic construct
  REGION 1..235: note = Granzyme_B__Homo_sapiens__J3KQ52
MQTFPSGEIIGGHEAKPHSRPYMAYLMIWDQKSLKRCGGFLIRDDFVLTAAHCWGSSINVTLGAHNIKEQEPTQQFIPVKRPIPHPAYNPKNFSNDIMLLQLERKAKRTRAVQPLRLPSNKAQVKPGQTCSVAGWGQTAPLGKHSHTLQEVKMTVQEDRKCESDLRHYYDSTIELCVGDPEIKKTSFKGDSGGPLVCNKVAQGIVSYGRNNGMPPRACTKVSSFVHWIKKTMKRY

SEQ ID NO: 7330 - RNA, 708 nt, synthetic construct
  misc_feature 1..708: note = Granzyme_B__Homo_sapiens__EAW66003
  source 1..708: mol_type = other RNA
atgcagacttttccttcaggggagatcatcgggggacatgaggccaagccccactcccgcccctacatggcttatcttatgatctgggatcagaagtctctgaagaggtgcggtggcttcctgatacgagacgacttcgtgctgacagctgctcactgttggggaagctccataaatgtcaccttgggggcccacaatatcaaagaacaggagccgacccagcagtttatccctgtgaaaagacccatcccccatccagcctataatcctaagaacttctccaacgacatcatgctactgcagctggagagaaaggccaagcggaccagagctgtgcagcccctcaggctacctagcaacaaggcccaggtgaagccagggcagacatgcagtgtggccggctgggggcagacggcccccctgggaaaacactcacacacactacaagaggtgaagatgacagtgcaggaagatcgaaagtgcgaatctgacttacgccattattacgacagtaccattgagttgtgcgtgggggacccagagattaaaaagacttcctttaagggggactctggaggccctcttgtgtgtaacaaggtggcccagggcattgtctcctatggacgaaacaatggcatgcctccacgagcctgcaccaaagtctcaagctttgtacactggataaagaaaaccatgaaacgctactaa

SEQ ID NO: 7331 - RNA, 708 nt, synthetic construct
  misc_feature 1..708: note = derived and/or modified sequence opt1 fromGranzyme_B__Homo_sapiens__EAW66003
  source 1..708: mol_type = other RNA
atgcagaccttccccagcggcgagatcatcgggggccacgaggccaagccccactcccgcccctacatggcctacctgatgatctgggaccagaagtccctcaagcggtgcgggggcttcctgatccgcgacgacttcgtgctgaccgcggcccactgctgggggagcagcatcaacgtcacgctcggcgcccacaacatcaaggagcaggagcccacccagcagttcatccccgtgaagcggccgatcccccaccccgcctacaaccccaagaacttctccaacgacatcatgctgctgcagctcgagcgcaaggccaagcggacccgcgcggtgcagccgctgcggctgcccagcaacaaggcccaggtcaagcccggccagacctgctccgtggccgggtggggccagacggcgcccctcgggaagcacagccacaccctgcaggaggtgaagatgaccgtccaggaggaccgcaagtgcgagtccgacctgcggcactactacgacagcaccatcgagctctgcgtgggcgacccggagatcaagaagacgtccttcaagggggacagcggcggccccctggtgtgcaacaaggtcgcccaggggatcgtgtcctacggccgcaacaacgggatgccgccccgggcctgcaccaaggtgagctccttcgtccactggatcaagaagaccatgaagcgctactga

SEQ ID NO: 7332 - RNA, 708 nt, synthetic construct
  misc_feature 1..708: note = derived and/or modified sequence opt2 fromGranzyme_B__Homo_sapiens__EAW66003
  source 1..708: mol_type = other RNA
atgcagaccttcccctccggcgagatcatcggcggccacgaggccaagccccactcccgcccctacatggcctacctcatgatctgggaccagaagtccctcaagcgctgcggcggcttcctcatccgcgacgacttcgtcctcaccgccgcccactgctggggctcctccatcaacgtcaccctcggcgcccacaacatcaaggagcaggagcccacccagcagttcatccccgtcaagcgccccatcccccaccccgcctacaaccccaagaacttctccaacgacatcatgctcctccagctcgagcgcaaggccaagcgcacccgcgccgtccagcccctccgcctcccctccaacaaggcccaggtcaagcccggccagacctgctccgtcgccggctggggccagaccgcccccctcggcaagcactcccacaccctccaggaggtcaagatgaccgtccaggaggaccgcaagtgcgagtccgacctccgccactactacgactccaccatcgagctctgcgtcggcgaccccgagatcaagaagacctccttcaagggcgactccggcggccccctcgtctgcaacaaggtcgcccagggcatcgtctcctacggccgcaacaacggcatgcccccccgcgcctgcaccaaggtctcctccttcgtccactggatcaagaagaccatgaagcgctactga

SEQ ID NO: 7333 - RNA, 708 nt, synthetic construct
  misc_feature 1..708: note = derived and/or modified sequence opt3 fromGranzyme_B__Homo_sapiens__EAW66003
  source 1..708: mol_type = other RNA
atgcagaccttccccagcggcgagatcattgggggacacgaagccaagcctcattccagaccatacatggcttatctgatgatatgggaccaaaaatctctcaagaggtgcggtggctttcttatccgggatgacttcgtgctgacagcagcccactgttgggggtcaagtattaacgtcactttgggagcgcataatatcaaagagcaggaaccgacgcagcagtttattcccgttaagcgccctatcccacaccccgcttacaaccctaaaaatttcagcaacgatataatgttactgcaactagagcgaaaggccaagcgtaccagagcagtgcagccactcaggctgccctccaataaagcccaggtaaagcctggccagacatgctctgtggctggttgggggcaaactgcaccacttggaaaacattcgcacaccctgcaggaagtcaagatgacagtgcaggaggaccggaaatgtgagtcagatttgcgccactattacgacagcaccatcgaactctgcgttggcgatccggagattaagaagacaagttttaaaggcgactccgggggacccctggtgtgtaacaaggtcgcccagggtatcgtgtcttatggcagaaataacgggatgcctccaagggcttgcactaaagtaagctccttcgttcattggattaagaaaaccatgaagcggtactga

SEQ ID NO: 7334 - RNA, 708 nt, synthetic construct
  misc_feature 1..708: note = derived and/or modified sequence opt4 fromGranzyme_B__Homo_sapiens__EAW66003
  source 1..708: mol_type = other RNA
atgcagaccttccccagcggcgagatcatcggcggccacgaggccaagccccacagcagaccctacatggcctacctgatgatctgggaccagaagagcctgaagagatgcggcggcttcctgatcagagacgacttcgtgctgaccgccgcccactgctggggcagcagcatcaacgtgaccctgggcgcccacaacatcaaggagcaggagcccacccagcagttcatccccgtgaagagacccatcccccaccccgcctacaaccccaagaacttcagcaacgacatcatgctgctgcagctggagagaaaggccaagagaaccagagccgtgcagcccctgagactgcccagcaacaaggcccaggtgaagcccggccagacctgcagcgtggccggctggggccagaccgcccccctgggcaagcacagccacaccctgcaggaggtgaagatgaccgtgcaggaggacagaaagtgcgagagcgacctgagacactactacgacagcaccatcgagctgtgcgtgggcgaccccgagatcaagaagaccagcttcaagggcgacagcggcggccccctggtgtgcaacaaggtggcccagggcatcgtgagctacggcagaaacaacggcatgccccccagagcctgcaccaaggtgagcagcttcgtgcactggatcaagaagaccatgaagagatactga

SEQ ID NO: 7335 - RNA, 708 nt, synthetic construct
  misc_feature 1..708: note = derived and/or modified sequence opt5 fromGranzyme_B__Homo_sapiens__EAW66003
  source 1..708: mol_type = other RNA
atgcagaccttccccagcggcgagatcattgggggacacgaagccaagcctcattccagaccgtacatggcttatctgatgatctgggaccaaaaatctctcaagcggtgcggcgggtttctgattcgcgatgacttcgtgcttacagccgcgcactgttggggaagctccatcaacgtcacgctgggcgctcataatattaaagagcaggaacccacccagcagtttatccctgttaagagacccatccctcaccccgcctacaaccctaaaaatttctctaacgatattatgctcctgcaacttgagcggaaggccaagcgcacaagagctgtgcagccgctgcggctccccagcaataaagcccaggtgaagcctgggcagacctgctccgtcgctggatggggccaaacagcgcccctgggcaaacattctcacaccctgcaggaagtgaagatgacagttcaggaggaccgcaaatgtgagagcgatctcagacactattacgactccaccatcgaactgtgcgtgggggatcctgagattaagaagacgagctttaaaggagactctggcgggccccttgtctgtaacaaggtggcccagggaatcgtttcctatggccggaataacgggatgccgcctcgcgcctgcaccaaagtgagctctttcgtccattggattaagaaaacaatgaagagatactga

SEQ ID NO: 7336 - RNA, 708 nt, synthetic construct
  misc_feature 1..708: note = derived and/or modified sequence opt6 fromGranzyme_B__Homo_sapiens__EAW66003
  source 1..708: mol_type = other RNA
atgcaaacattcccaagtggagaaataataggaggacacgaagcaaaaccacactcacgaccatacatggcatacctaatgatctgggaccaaaaatcactaaaacgctgcggaggattcctaataagagacgacttcgtactaacagcagcacactgctggggatcatcaataaacgtcacattaggcgcccacaacataaaagaacaagaaccaacacaacaattcataccagtaaaaagaccaataccacacccagcatacaacccaaaaaacttcagcaacgacatcatgttactacaactagaaagaaaagcaaaaagaacaagagcagtacaaccactaagactaccatcaaacaaagcacaagtaaaaccaggacaaacatgttcagtagcaggatggggacaaacagcaccattaggaaaacactcacacacactacaagaagtaaaaatgacagtacaagaagacagaaaatgcgaatcagatctaagacactactacgactcaacaatagaactatgcgtaggagacccagaaataaaaaaaacaagcttcaaaggcgactcaggcggaccattagtatgtaacaaagtagcacaaggaatagtaagctacggaagaaacaacggaatgccaccaagagcatgcacaaaagtatcatcattcgtccactggataaaaaaaacaatgaaaagatactaa

SEQ ID NO: 7337 - protein, 281 aa, synthetic construct
  REGION 1..281: note = Granzyme_B__Homo_sapiens__Q67BC3
MKSLSLLHLFPLPRAKREQGGNNSSSNQGSLPEKMQPILLLLAFLLLPRADAGEIIGGHEAKPHSRPYMAYLMIWDQKSLKRCGGFLIQDDFVLTAAHCWGSSINVTLGAHNIKEQEPTQQFIPVKRPIPHPAYNPKNFSNDIMLLQLERKAKRTRAVQPLRLPSNKAQVKPGQTCSVAGWGQTAPLGKHSHTLQEVKMTVQEDRKCESDLRHYYDSTIELCVGDPEIKKTSFKGDSGGPLVCNKVAQGIVSYGRNNGMPPRACTKVSSFVHWIKKTMKRY

SEQ ID NO: 7338 - RNA, 846 nt, synthetic construct
  misc_feature 1..846: note = Granzyme_B__Homo_sapiens__AAR23323
  source 1..846: mol_type = other RNA
atgaagtcactgagcctgctccacctctttcctctcccaagagctaaaagagagcaaggaggaaacaacagcagctccaaccagggcagccttcctgagaagatgcaaccaatcctgcttctgctggccttcctcctgctgcccagggcagatgcaggggagatcatcgggggacatgaggccaagccccactcccgcccctacatggcttatcttatgatctgggatcagaagtctctgaagaggtgcggtggcttcctgatacaagacgacttcgtgctgacagctgctcactgttggggaagctccataaatgtcaccttgggggcccacaatatcaaagaacaggagccgacccagcagtttatccctgtgaaaagacccatcccccatccagcctataatcctaagaacttctccaacgacatcatgctactgcagctggagagaaaggccaagcggaccagagctgtgcagcccctcaggctacctagcaacaaggcccaggtgaagccagggcagacatgcagtgtggccggctgggggcagacggcccccctgggaaaacactcacacacactacaagaggtgaagatgacagtgcaggaagatcgaaagtgcgaatctgacttacgccattattacgacagtaccattgagttgtgcgtgggggacccagagattaaaaagacttcctttaagggggactctggaggccctcttgtgtgtaacaaggtggcccagggcattgtctcctatggacgaaacaatggcatgcctccacgagcctgcaccaaagtctcaagctttgtacactggataaagaaaaccatgaaacgctactaa

SEQ ID NO: 7339 - RNA, 846 nt, synthetic construct
  misc_feature 1..846: note = derived and/or modified sequence opt1 fromGranzyme_B__Homo_sapiens__AAR23323
  source 1..846: mol_type = other RNA
atgaagtccctgagcctcctgcacctgttccccctcccccgcgccaagcgggagcagggcgggaacaacagctccagcaaccagggctccctgcccgagaagatgcagcccatcctgctcctgctggccttcctcctgctgccccgcgcggacgccggggagatcatcggcgggcacgaggccaagccgcacagccggccctacatggcctacctcatgatctgggaccagaagtccctgaagcgctgcggcggcttcctgatccaggacgacttcgtgctcaccgccgcgcactgctgggggagctccatcaacgtcaccctgggcgcccacaacatcaaggagcaggagcccacgcagcagttcatccccgtgaagcggccgatcccccaccccgcctacaaccccaagaacttcagcaacgacatcatgctgctccagctggagcgcaaggccaagcggacccgcgcggtgcagccgctgcggctcccctccaacaaggcccaggtcaagcccgggcagacctgcagcgtggccggctgggggcagaccgcgcccctgggcaagcactcccacacgctgcaggaggtgaagatgaccgtccaggaggaccgcaagtgcgagagcgacctccggcactactacgactccaccatcgagctgtgcgtgggcgacccggagatcaagaagaccagcttcaagggggactccggcgggcccctggtgtgcaacaaggtcgcccagggcatcgtgagctacggccgcaacaacgggatgccgccccgggcctgcacgaaggtgtccagcttcgtccactggatcaagaagaccatgaagcgctactga

SEQ ID NO: 7340 - RNA, 846 nt, synthetic construct
  misc_feature 1..846: note = derived and/or modified sequence opt2 fromGranzyme_B__Homo_sapiens__AAR23323
  source 1..846: mol_type = other RNA
atgaagtccctctccctcctccacctcttccccctcccccgcgccaagcgcgagcagggcggcaacaactcctcctccaaccagggctccctccccgagaagatgcagcccatcctcctcctcctcgccttcctcctcctcccccgcgccgacgccggcgagatcatcggcggccacgaggccaagccccactcccgcccctacatggcctacctcatgatctgggaccagaagtccctcaagcgctgcggcggcttcctcatccaggacgacttcgtcctcaccgccgcccactgctggggctcctccatcaacgtcaccctcggcgcccacaacatcaaggagcaggagcccacccagcagttcatccccgtcaagcgccccatcccccaccccgcctacaaccccaagaacttctccaacgacatcatgctcctccagctcgagcgcaaggccaagcgcacccgcgccgtccagcccctccgcctcccctccaacaaggcccaggtcaagcccggccagacctgctccgtcgccggctggggccagaccgcccccctcggcaagcactcccacaccctccaggaggtcaagatgaccgtccaggaggaccgcaagtgcgagtccgacctccgccactactacgactccaccatcgagctctgcgtcggcgaccccgagatcaagaagacctccttcaagggcgactccggcggccccctcgtctgcaacaaggtcgcccagggcatcgtctcctacggccgcaacaacggcatgcccccccgcgcctgcaccaaggtctcctccttcgtccactggatcaagaagaccatgaagcgctactga

SEQ ID NO: 7341 - RNA, 846 nt, synthetic construct
  misc_feature 1..846: note = derived and/or modified sequence opt3 fromGranzyme_B__Homo_sapiens__AAR23323
  source 1..846: mol_type = other RNA
atgaaaagcctgtccctccttcacctgttccccttgcctagagccaaaagggagcagggcgggaacaattcttcaagtaaccaaggtagcttaccagaaaagatgcagccgatcctgctactcctggcttttcttctgttgccccgggcagacgccggagagattataggcgggcatgaagcgaaacctcactcccgcccatacatggcttatctcatgatctgggatcagaagtctctgaaacgatgcggaggcttcctgattcaggacgattttgtgctcaccgccgcacattgttggggttcgtcaatcaatgtcacattaggggcccacaacattaaggagcaagaacccactcagcagttcatccctgttaagcgtccaataccccatcctgcttacaatccaaagaactttagcaatgacatcatgctgcttcagttggagagaaaggcaaaaaggacgcgggccgtgcaaccgctgcgcctacccagtaacaaggctcaggtaaaacctggacagacctgctccgtggccggctggggccagacagcgccactcgggaagcactctcacactctgcaagaggtcaagatgaccgtgcaggaagatagaaaatgtgagagcgaccttaggcattattacgattccacaattgaactgtgcgttggagaccccgagatcaagaaaacctcattcaagggtgatagtggcgggcctttggtgtgtaataaagtcgcacagggaattgtgagctatggccggaacaatggtatgccaccccgcgcctgcactaaggtatcttcctttgttcactggatcaaaaagacaatgaagcgatactga

SEQ ID NO: 7342 - RNA, 846 nt, synthetic construct
  misc_feature 1..846: note = derived and/or modified sequence opt4 fromGranzyme_B__Homo_sapiens__AAR23323
  source 1..846: mol_type = other RNA
atgaagagcctgagcctgctgcacctgttccccctgcccagagccaagagagagcagggcggcaacaacagcagcagcaaccagggcagcctgcccgagaagatgcagcccatcctgctgctgctggccttcctgctgctgcccagagccgacgccggcgagatcatcggcggccacgaggccaagccccacagcagaccctacatggcctacctgatgatctgggaccagaagagcctgaagagatgcggcggcttcctgatccaggacgacttcgtgctgaccgccgcccactgctggggcagcagcatcaacgtgaccctgggcgcccacaacatcaaggagcaggagcccacccagcagttcatccccgtgaagagacccatcccccaccccgcctacaaccccaagaacttcagcaacgacatcatgctgctgcagctggagagaaaggccaagagaaccagagccgtgcagcccctgagactgcccagcaacaaggcccaggtgaagcccggccagacctgcagcgtggccggctggggccagaccgcccccctgggcaagcacagccacaccctgcaggaggtgaagatgaccgtgcaggaggacagaaagtgcgagagcgacctgagacactactacgacagcaccatcgagctgtgcgtgggcgaccccgagatcaagaagaccagcttcaagggcgacagcggcggccccctggtgtgcaacaaggtggcccagggcatcgtgagctacggcagaaacaacggcatgccccccagagcctgcaccaaggtgagcagcttcgtgcactggatcaagaagaccatgaagagatactga

SEQ ID NO: 7343 - RNA, 846 nt, synthetic construct
  misc_feature 1..846: note = derived and/or modified sequence opt5 fromGranzyme_B__Homo_sapiens__AAR23323
  source 1..846: mol_type = other RNA
atgaaaagcctgtccctcctgcaccttttccccctgcccagagccaagcgggagcagggcgggaacaattctagctccaaccaaggatctctcccggaaaagatgcagcccatcctgcttctgctcgcttttctgctgctccctcgcgccgacgcgggcgagattatcgggggacatgaagctaaaccccacagcagaccttacatggcctatctgatgatttgggatcagaagtcccttaaacggtgcggcgggttcctgatccaggacgattttgtgctcaccgccgctcattgttggggatctagcattaatgtcacactgggcgcccacaacatcaaggagcaagaacccacgcagcagttcatccctgttaagcgcccgattccccatcctgcttacaatcccaaaaacttttccaatgacatcatgcttctgcagctcgagagaaaggccaaacggacccgcgcggtgcaacctctgagactgcccagcaacaaggcccaggtgaaaccgggccagacatgctctgtcgctgggtggggacagaccgcccctctcggcaagcactcccacacactgcaagaggtgaagatgaccgttcaggaagatcggaaatgtgagagcgaccttcgccattattacgattctacaattgaactgtgcgtgggggaccccgagatcaagaaaacctccttcaagggagatagcggcgggcctctcgtctgtaataaagtggctcagggaattgtttcttatggcagaaacaatggcatgcctccccgggcctgcacgaaggtgtccagctttgtccactggatcaaaaagaccatgaagcgctactga

SEQ ID NO: 7344 - RNA, 846 nt, synthetic construct
  misc_feature 1..846: note = derived and/or modified sequence opt6 fromGranzyme_B__Homo_sapiens__AAR23323
  source 1..846: mol_type = other RNA
atgaaatcactaagcctactccacttattcccactaccacgagcaaaaagagaacaaggaggaaacaactcatcttctaaccaaggatcattaccagaaaaaatgcaaccaatactattactactcgcattcttactactaccaagagcagacgccggagaaataataggaggacacgaagcaaaaccacactcaagaccatacatggcatacttaatgatatgggaccaaaaatcactaaaaagatgtggtggttttctgatacaagacgacttcgtactaacagcagcacactgctggggtagctcaataaacgtaacactaggagcacacaacataaaagaacaagaaccaacacaacaattcataccagtaaaaagaccaataccacacccagcatataacccaaaaaatttctcaaacgacataatgttactacaactagaacgaaaagcaaaaagaacacgagcagtacaaccactaagactaccatcaaacaaagcacaagtaaaaccaggacaaacatgctcagtagcaggatggggacaaactgcaccactaggaaaacactcacacacactacaagaagtaaaaatgacagtacaagaagacagaaaatgcgaatcagacctaagacactattacgactcaacaatagaactctgtgtcggagaccccgaaataaaaaaaacatcattcaaaggagactcaggaggaccactagtctgcaacaaagtagcacaaggaatagtaagttacggaagaaacaacggaatgccaccaagagcatgcacaaaagtatcatcatttgtacactggataaaaaaaacaatgaaaagatactaa

SEQ ID NO: 7345 - protein, 152 aa, synthetic construct
  REGION 1..152: note = Granzyme_B__Homo_sapiens__Q6XGZ2
MQPILLLLAFLLLPRADQLERKAKRTRAVQPLRLPSNKAQVKPGQTCSVAGWGQTAPLGKHSHTLQEVKMTVQEDRKCESDLRHYYDSTIELCVGDPEIKKTSFKGDSGGPLVCNKVAQGIVSYGRNNGMPPRACTKVSSFVHWIKKTMKRY

SEQ ID NO: 7346 - RNA, 459 nt, synthetic construct
  misc_feature 1..459: note = Granzyme_B__Homo_sapiens__AAP70246
  source 1..459: mol_type = other RNA
atgcaaccaatcctgcttctgctggccttcctcctgctgcccagggcagatcagctggagagaaaggccaagcggaccagagctgtgcagcccctcaggctacctagcaacaaggcccaggtgaagccagggcagacatgcagtgtggccggctgggggcagacggcccccctgggaaaacactcacacacactacaagaggtgaagatgacagtgcaggaagatcgaaagtgcgaatctgacttacgccattattacgacagtaccattgagttgtgcgtgggggacccagagattaaaaagacttcctttaagggggactctggaggccctcttgtgtgtaacaaggtggcccagggcattgtctcctatggacgaaacaatggcatgcctccacgagcctgcaccaaagtctcaagctttgtacactggataaagaaaaccatgaaacgctactaa

SEQ ID NO: 7347 - RNA, 459 nt, synthetic construct
  misc_feature 1..459: note = derived and/or modified sequence opt1 fromGranzyme_B__Homo_sapiens__AAP70246
  source 1..459: mol_type = other RNA
atgcagcccatcctgctcctgctggccttcctcctgctgccgcgcgccgaccagctcgagcggaaggcgaagcgcacccgggccgtgcagcccctgcgcctgcccagcaacaaggcccaggtcaagcccggccagacctgctccgtggccgggtggggccagacggccccgctcgggaagcacagccacaccctgcaggaggtgaagatgaccgtccaggaggaccggaagtgcgagtccgacctgcgccactactacgacagcaccatcgagctctgcgtgggcgaccccgagatcaagaagacgtccttcaagggggacagcggcggccccctggtgtgcaacaaggtcgcgcaggggatcgtgtcctacggccggaacaacgggatgcccccgcgcgcctgcaccaaggtgagctccttcgtccactggatcaagaagaccatgaagcggtactga

SEQ ID NO: 7348 - RNA, 459 nt, synthetic construct
  misc_feature 1..459: note = derived and/or modified sequence opt2 fromGranzyme_B__Homo_sapiens__AAP70246
  source 1..459: mol_type = other RNA
atgcagcccatcctcctcctcctcgccttcctcctcctcccccgcgccgaccagctcgagcgcaaggccaagcgcacccgcgccgtccagcccctccgcctcccctccaacaaggcccaggtcaagcccggccagacctgctccgtcgccggctggggccagaccgcccccctcggcaagcactcccacaccctccaggaggtcaagatgaccgtccaggaggaccgcaagtgcgagtccgacctccgccactactacgactccaccatcgagctctgcgtcggcgaccccgagatcaagaagacctccttcaagggcgactccggcggccccctcgtctgcaacaaggtcgcccagggcatcgtctcctacggccgcaacaacggcatgcccccccgcgcctgcaccaaggtctcctccttcgtccactggatcaagaagaccatgaagcgctactga

SEQ ID NO: 7349 - RNA, 459 nt, synthetic construct
  misc_feature 1..459: note = derived and/or modified sequence opt3 fromGranzyme_B__Homo_sapiens__AAP70246
  source 1..459: mol_type = other RNA
atgcagcccatcctgctccttctggccttcttgttactgcctagagctgaccaactagagaggaaggcaaaacggacccgcgccgtgcagccactccgactgccgagcaacaaggcgcaggtcaaacccggccagacatgctccgttgctgggtggggacaaactgcccctcttggtaagcactctcatacgctgcaggaagtgaaaatgaccgtacaggaggatcgtaagtgtgaatcagacttgagacactactatgatagtacaattgagctctgcgtgggcgacccagaaataaagaaaactagctttaagggggattccggaggccccctggtctgtaataaagtggcacagggtatcgtttcttacgggaggaacaatggaatgcctccacgggcctgcaccaaggtgtcgtcattcgtccattggattaaaaagacaatgaagcgctattga

SEQ ID NO: 7350 - RNA, 459 nt, synthetic construct
  misc_feature 1..459: note = derived and/or modified sequence opt4 fromGranzyme_B__Homo_sapiens__AAP70246
  source 1..459: mol_type = other RNA
atgcagcccatcctgctgctgctggccttcctgctgctgcccagagccgaccagctggagagaaaggccaagagaaccagagccgtgcagcccctgagactgcccagcaacaaggcccaggtgaagcccggccagacctgcagcgtggccggctggggccagaccgcccccctgggcaagcacagccacaccctgcaggaggtgaagatgaccgtgcaggaggacagaaagtgcgagagcgacctgagacactactacgacagcaccatcgagctgtgcgtgggcgaccccgagatcaagaagaccagcttcaagggcgacagcggcggccccctggtgtgcaacaaggtggcccagggcatcgtgagctacggcagaaacaacggcatgccccccagagcctgcaccaaggtgagcagcttcgtgcactggatcaagaagaccatgaagagatactga

SEQ ID NO: 7351 - RNA, 459 nt, synthetic construct
  misc_feature 1..459: note = derived and/or modified sequence opt5 fromGranzyme_B__Homo_sapiens__AAP70246
  source 1..459: mol_type = other RNA
atgcagcccatcctgctcctgcttgccttcctgctcctgcctagagctgaccaacttgagcggaaggccaaacgcaccagagcggtgcagccgctgcggctccccagcaacaaggctcaggtcaaacctggccagacatgctccgttgccgggtggggacaaacggctcccctgggcaagcactctcataccctgcaggaagtgaaaatgacagtgcaggaggatcgcaagtgtgaaagcgacctcagacactactatgattccaccattgagctgtgcgtcggggaccctgaaatcaagaaaacatcttttaagggagatagcggcgggccccttgtgtgtaataaagttgcccagggaattgtgtcctacggccggaacaatggcatgcctccgcgcgcctgcaccaaggtctctagcttcgtgcattggatcaaaaagacaatgaagagatattga

SEQ ID NO: 7352 - RNA, 459 nt, synthetic construct
  misc_feature 1..459: note = derived and/or modified sequence opt6 fromGranzyme_B__Homo_sapiens__AAP70246
  source 1..459: mol_type = other RNA
atgcaaccaatactactactactagcattcctactattaccaagagcagaccaactagaacgaaaagcaaaaagaacaagagcagtacaaccactaagactaccatcaaacaaagcacaagtaaaaccaggacaaacatgctcagtagcaggatggggacaaacagcaccactaggaaaacactcacacacattacaagaagtaaaaatgacagtacaagaagacagaaaatgcgaatcagacctaagacactactacgactcaacaatagaactatgcgtaggagacccagaaataaaaaaaacaagcttcaaaggagactcaggaggaccattagtatgcaacaaagtagcacaaggaatagtaagctacggaagaaacaacggaatgccaccaagagcatgcacaaaagtaagctcattcgtacactggataaaaaaaacaatgaaaagatactaa

SEQ ID NO: 7353 - protein, 202 aa, synthetic construct
  REGION 1..202: note = Granzyme_B__Homo_sapiens__Q6XGZ3
MQPILLLLAFLLLPRADAGEIIGGHEAKPHSRPYMAYLMIWDQKSLKRCGGFLIRDDFVLTAAHCWGSLERKAKRTRAVQPLRLPSNKAQVKPGQTCSVAGWGQTAPLGKHSHTLQEVKMTVQEDRKCESDLRHYYDSTIELCVGDPEIKKTSFKGDSGGPLVCNKVAQGIVSYGRNNGMPPRACTKVSSFVHWIKKTMKRY

SEQ ID NO: 7354 - RNA, 609 nt, synthetic construct
  misc_feature 1..609: note = Granzyme_B__Homo_sapiens__AAP70245
  source 1..609: mol_type = other RNA
atgcaaccaatcctgcttctgctggccttcctcctgctgcccagggcagatgcaggggagatcatcgggggacatgaggccaagccccactcccgcccctacatggcttatcttatgatctgggatcagaagtctctgaagaggtgcggtggcttcctgatacgagacgacttcgtgctgacagctgctcactgttggggaagcctggagagaaaggccaagcggaccagagctgtgcagcccctcaggctacctagcaacaaggcccaggtgaagccagggcagacatgcagtgtggccggctgggggcagacggcccccctgggaaaacactcacacacactacaagaggtgaagatgacagtgcaggaagatcgaaagtgcgaatctgacttacgccattattacgacagtaccattgagttgtgcgtgggggacccagagattaaaaagacttcctttaagggggactctggaggccctcttgtgtgtaacaaggtggcccagggcattgtctcctatggacgaaacaatggcatgcctccacgagcctgcaccaaagtctcaagctttgtacactggataaagaaaaccatgaaacgctactaa

SEQ ID NO: 7355 - RNA, 609 nt, synthetic construct
  misc_feature 1..609: note = derived and/or modified sequence opt1 fromGranzyme_B__Homo_sapiens__AAP70245
  source 1..609: mol_type = other RNA
atgcagcccatcctgctcctgctggccttcctcctgctgccccgcgccgacgcgggcgagatcatcgggggccacgaggccaagccccacagccggccctacatggcctacctcatgatctgggaccagaagtccctgaagcgctgcgggggcttcctgatccgggacgacttcgtgctcaccgccgcccactgctgggggagcctggagcgcaaggcgaagcggacccgcgccgtccagcccctgcggctcccgtccaacaaggcccaggtgaagcccggccagacgtgcagcgtggccggctgggggcagaccgcgcccctgggcaagcactcccacaccctgcaggaggtcaagatgaccgtgcaggaggaccgcaagtgcgagagcgacctccggcactactacgactccacgatcgagctgtgcgtgggggaccccgagatcaagaagaccagcttcaagggcgactccgggggcccgctggtctgcaacaaggtggcccagggcatcgtgagctacgggcgcaacaacggcatgccgccccgggcctgcaccaaggtctccagcttcgtgcactggatcaagaagaccatgaagcgctactga

SEQ ID NO: 7356 - RNA, 609 nt, synthetic construct
  misc_feature 1..609: note = derived and/or modified sequence opt2 fromGranzyme_B__Homo_sapiens__AAP70245
  source 1..609: mol_type = other RNA
atgcagcccatcctcctcctcctcgccttcctcctcctcccccgcgccgacgccggcgagatcatcggcggccacgaggccaagccccactcccgcccctacatggcctacctcatgatctgggaccagaagtccctcaagcgctgcggcggcttcctcatccgcgacgacttcgtcctcaccgccgcccactgctggggctccctcgagcgcaaggccaagcgcacccgcgccgtccagcccctccgcctcccctccaacaaggcccaggtcaagcccggccagacctgctccgtcgccggctggggccagaccgcccccctcggcaagcactcccacaccctccaggaggtcaagatgaccgtccaggaggaccgcaagtgcgagtccgacctccgccactactacgactccaccatcgagctctgcgtcggcgaccccgagatcaagaagacctccttcaagggcgactccggcggccccctcgtctgcaacaaggtcgcccagggcatcgtctcctacggccgcaacaacggcatgcccccccgcgcctgcaccaaggtctcctccttcgtccactggatcaagaagaccatgaagcgctactga

SEQ ID NO: 7357 - RNA, 609 nt, synthetic construct
  misc_feature 1..609: note = derived and/or modified sequence opt3 fromGranzyme_B__Homo_sapiens__AAP70245
  source 1..609: mol_type = other RNA
atgcagcccatactgctccttctggccttcttgttactgcctagagctgacgcaggcgagattatagggggacacgaagccaagccacatagcaggccgtacatggcgtatctaatgatctgggatcaaaaatccctcaagcggtgcggtggctttctgattcgcgacgatttcgtgcttaccgctgcccactgttgggggtctctggagcgaaaagcaaagcgtacaagagccgtccagcccttgaggctcccttcaaacaaagctcaggttaagccaggacagacttgcagtgtggcaggctggggtcaaacggctcccctggggaagcatagccacaccctgcaggaagtaaaaatgacagtgcaggaggaccggaagtgtgaatccgatctccgccattactatgactctactatcgagttatgcgtcggagatcctgagattaaaaagacctcgtttaaaggcgactcaggcgggccactggtgtgtaataaggttgcccagggaatcgtgagctacggtagaaacaatggcatgccccctagggcctgcacaaaggtcagttccttcgtgcactggatcaaaaagaccatgaaacggtattga

SEQ ID NO: 7358 - RNA, 609 nt, synthetic construct
  misc_feature 1..609: note = derived and/or modified sequence opt4 fromGranzyme_B__Homo_sapiens__AAP70245
  source 1..609: mol_type = other RNA
atgcagcccatcctgctgctgctggccttcctgctgctgcccagagccgacgccggcgagatcatcggcggccacgaggccaagccccacagcagaccctacatggcctacctgatgatctgggaccagaagagcctgaagagatgcggcggcttcctgatcagagacgacttcgtgctgaccgccgcccactgctggggcagcctggagagaaaggccaagagaaccagagccgtgcagcccctgagactgcccagcaacaaggcccaggtgaagcccggccagacctgcagcgtggccggctggggccagaccgcccccctgggcaagcacagccacaccctgcaggaggtgaagatgaccgtgcaggaggacagaaagtgcgagagcgacctgagacactactacgacagcaccatcgagctgtgcgtgggcgaccccgagatcaagaagaccagcttcaagggcgacagcggcggccccctggtgtgcaacaaggtggcccagggcatcgtgagctacggcagaaacaacggcatgccccccagagcctgcaccaaggtgagcagcttcgtgcactggatcaagaagaccatgaagagatactga

SEQ ID NO: 7359 - RNA, 609 nt, synthetic construct
  misc_feature 1..609: note = derived and/or modified sequence opt5 fromGranzyme_B__Homo_sapiens__AAP70245
  source 1..609: mol_type = other RNA
atgcagcccatcctgctcctgcttgccttcctgctcctgcctagagctgacgccggcgagattatcgggggacacgaagcgaagccgcatagccggccctacatggcttatcttatgatttgggatcaaaaatccctgaagcgctgcggcgggtttctcatcagagacgatttcgtgctgaccgccgcccactgttggggatctctggagcggaaagctaagcgcacaagagccgtccagcctctccggctgcccagcaacaaagctcaggttaagcctggccagacgtgctccgtggccgggtggggacaaaccgcgccccttggcaagcattctcacacactgcaggaagtgaaaatgaccgtccaggaggaccgcaagtgtgaaagcgatctcagacattactatgactccacaattgagctgtgcgtgggcgatcctgagatcaaaaagacctcttttaaaggggacagcggaggcccgcttgtttgtaataaggtggcccaggggatcgtctcctacggacggaacaatggcatgccccctcgcgcttgcacaaaggtgagctctttcgttcactggattaaaaagaccatgaaaagatattga

SEQ ID NO: 7360 - RNA, 609 nt, synthetic construct
  misc_feature 1..609: note = derived and/or modified sequence opt6 fromGranzyme_B__Homo_sapiens__AAP70245
  source 1..609: mol_type = other RNA
atgcaaccaatattattactactagcattcctattactaccaagagcagacgcaggagaaataataggcggacacgaagcaaaaccccatagcagaccatatatggcatacttaatgatatgggaccaaaaaagcctaaaaagatgcggaggatttttaataagagatgactttgtattaacagcagcacactgttggggatcactcgaaagaaaagcaaaaagaacaagagcagtccaaccactaagattaccatcaaacaaagcacaagtaaaaccaggacaaacatgctcagtagcaggatggggacaaacagcgccattaggaaaacactcacacacactacaagaagtaaaaatgacagtacaagaagacagaaaatgtgaatcagacttaagacattactatgactcaacaatagaattatgcgtaggagacccagaaataaaaaaaacaagctttaaaggagactcaggaggaccattagtatgtaacaaagtagcacaaggaatagtaagctacggaagaaacaatggaatgccaccaagagcatgcacaaaagtaagctcattcgtacactggataaaaaaaacaatgaaaagatattaa

SEQ ID NO: 7361 - protein, 235 aa, synthetic construct [sequence omitted]

SEQ ID NO: 7362 - RNA, 708 nt, synthetic construct
  misc_feature 1..708: note = Granzyme_B__Homo_sapiens__AAP70244
  source 1..708: mol_type = other RNA
atgcagacttttccttcaggggagatcatcgggggacatgaggccaagccccactcccgcccctacatggcttatcttatgatctgggatcagaagtctctgaagaggtgcggtggcttcctgatacaagacgacttcgtgctgacagctgctcactgttggggaagctccataaatgtcaccttgggggcccacaatatcaaagaacaggagccgacccagcagtttatccctgtgaaaagacccatcccccatccagcctataatcctaagaacttctccaacgacatcatgctactgcagctggagagaaaggccaagcggaccagagctgtgcagcccctcaggctacctagcaacaaggcccaggtgaagccagggcagacatgcagtgtggccggctgggggcagacggcccccctgggaaaacactcacacacactacaagaggtgaagatgacagtgcaggaagatcgaaagtgcgaatctgacttacgccattattacgacagtaccattgagttgtgcgtgggggacccagagattaaaaagacttcctttaagggggactctggaggccctcttgtgtgtaacaaggtggcccagggcattgtctcctatggacgaaacaatggcatgcctccacgagcctgcaccaaagtctcaagctttgtacactggataaagaaaaccatgaaacgctactaa

SEQ ID NO: 7363 - RNA, 708 nt, synthetic construct
  misc_feature 1..708: note = derived and/or modified sequence opt1 fromGranzyme_B__Homo_sapiens__AAP70244
  source 1..708: mol_type = other RNA
atgcagaccttccccagcggcgagatcatcgggggccacgaggccaagccccactcccgcccctacatggcctacctgatgatctgggaccagaagtccctcaagcggtgcgggggcttcctgatccaggacgacttcgtgctgaccgcggcccactgctgggggagcagcatcaacgtcacgctcggcgcccacaacatcaaggagcaggagcccacccagcagttcatccccgtgaagcgcccgatcccccaccccgcctacaaccccaagaacttctccaacgacatcatgctgctgcagctcgagcggaaggccaagcgcacccgggcggtgcagccgctgcgcctgcccagcaacaaggcccaggtcaagcccggccagacctgctccgtggccgggtggggccagacggcgcccctcgggaagcacagccacaccctgcaggaggtgaagatgaccgtccaggaggaccggaagtgcgagtccgacctgcgccactactacgacagcaccatcgagctctgcgtgggcgacccggagatcaagaagacgtccttcaagggggacagcggcggccccctggtgtgcaacaaggtcgcccaggggatcgtgtcctacggccggaacaacgggatgccgccccgcgcctgcaccaaggtgagctccttcgtccactggatcaagaagaccatgaagcggtactga

SEQ ID NO: 7364 - RNA, 708 nt, synthetic construct
  misc_feature 1..708: note = derived and/or modified sequence opt2 fromGranzyme_B__Homo_sapiens__AAP70244
  source 1..708: mol_type = other RNA
atgcagaccttcccctccggcgagatcatcggcggccacgaggccaagccccactcccgcccctacatggcctacctcatgatctgggaccagaagtccctcaagcgctgcggcggcttcctcatccaggacgacttcgtcctcaccgccgcccactgctggggctcctccatcaacgtcaccctcggcgcccacaacatcaaggagcaggagcccacccagcagttcatccccgtcaagcgccccatcccccaccccgcctacaaccccaagaacttctccaacgacatcatgctcctccagctcgagcgcaaggccaagcgcacccgcgccgtccagcccctccgcctcccctccaacaaggcccaggtcaagcccggccagacctgctccgtcgccggctggggccagaccgcccccctcggcaagcactcccacaccctccaggaggtcaagatgaccgtccaggaggaccgcaagtgcgagtccgacctccgccactactacgactccaccatcgagctctgcgtcggcgaccccgagatcaagaagacctccttcaagggcgactccggcggccccctcgtctgcaacaaggtcgcccagggcatcgtctcctacggccgcaacaacggcatgcccccccgcgcctgcaccaaggtctcctccttcgtccactggatcaagaagaccatgaagcgctactga

SEQ ID NO: 7365 - RNA, 708 nt, synthetic construct
  misc_feature 1..708: note = derived and/or modified sequence opt3 fromGranzyme_B__Homo_sapiens__AAP70244
  source 1..708: mol_type = other RNA
atgcagaccttccccagcggcgagatcattgggggacacgaagccaagcctcattccagaccatacatggcttatctgatgatatgggaccaaaaatctctcaagaggtgcggtggctttcttatccaggatgacttcgtgctgacagcagcccactgttgggggtcaagtattaacgtcactttgggagcgcataatatcaaagagcaggaaccgacgcagcaatttattcccgttaagcggcctatcccacaccccgcttacaaccctaaaaatttcagcaacgatataatgttactgcagctagagcgcaaggccaagcgaacccgtgcagtgcagccactcagactgccctccaataaagcccaggtaaagcctggccaaacatgctctgtggctggttgggggcagactgcaccacttggaaaacattcgcacaccctgcaggaagtcaagatgacagtgcaggaggacaggaaatgtgagtcagatttgcggcactattacgacagcaccatcgaactctgcgttggcgatccggagattaagaagacaagttttaaaggcgactccgggggacccctggtgtgtaacaaggtcgcccaaggtatcgtgtcttatggccgcaataacgggatgcctccaagagcttgcactaaagtaagctccttcgttcattggattaagaaaaccatgaagaggtactga

SEQ ID NO: 7366 - RNA, 708 nt, synthetic construct
  misc_feature 1..708: note = derived and/or modified sequence opt4 fromGranzyme_B__Homo_sapiens__AAP70244
  source 1..708: mol_type = other RNA
atgcagaccttccccagcggcgagatcatcggcggccacgaggccaagccccacagcagaccctacatggcctacctgatgatctgggaccagaagagcctgaagagatgcggcggcttcctgatccaggacgacttcgtgctgaccgccgcccactgctggggcagcagcatcaacgtgaccctgggcgcccacaacatcaaggagcaggagcccacccagcagttcatccccgtgaagagacccatcccccaccccgcctacaaccccaagaacttcagcaacgacatcatgctgctgcagctggagagaaaggccaagagaaccagagccgtgcagcccctgagactgcccagcaacaaggcccaggtgaagcccggccagacctgcagcgtggccggctggggccagaccgcccccctgggcaagcacagccacaccctgcaggaggtgaagatgaccgtgcaggaggacagaaagtgcgagagcgacctgagacactactacgacagcaccatcgagctgtgcgtgggcgaccccgagatcaagaagaccagcttcaagggcgacagcggcggccccctggtgtgcaacaaggtggcccagggcatcgtgagctacggcagaaacaacggcatgccccccagagcctgcaccaaggtgagcagcttcgtgcactggatcaagaagaccatgaagagatactga

SEQ ID NO: 7367 - RNA, 708 nt, synthetic construct
  misc_feature 1..708: note = derived and/or modified sequence opt5 fromGranzyme_B__Homo_sapiens__AAP70244
  source 1..708: mol_type = other RNA
atgcagaccttccccagcggcgagatcattgggggacacgaagccaagcctcattccagaccgtacatggcttatctgatgatctgggaccaaaaatctctcaagcggtgcggcgggtttctgattcaggatgacttcgtgcttacagccgcgcactgttggggaagctccatcaacgtcacgctgggcgctcataatattaaagagcaggaacccacccagcaatttatccctgttaagcgccccatccctcaccccgcctacaaccctaaaaatttctctaacgatattatgctcctgcagcttgagagaaaggccaagcggacacgcgctgtgcagccgctgagactccccagcaataaagcccaggtgaagcctgggcaaacctgctccgtcgctggatggggccagacagcgcccctgggcaaacattctcacaccctgcaggaagtgaagatgacagttcaggaggaccggaaatgtgagagcgatctccgccactattacgactccaccatcgaactgtgcgtgggggatcctgagattaagaagacgagctttaaaggagactctggcgggccccttgtctgtaacaaggtggcccaaggaatcgtttcctatggcagaaataacgggatgccgcctcgggcctgcaccaaagtgagctctttcgtccattggattaagaaaacaatgaagcgctactga

SEQ ID NO: 7368 - RNA, 708 nt, synthetic construct
  misc_feature 1..708: note = derived and/or modified sequence opt6 fromGranzyme_B__Homo_sapiens__AAP70244
  source 1..708: mol_type = other RNA
atgcaaacattcccatcaggagaaataataggaggacatgaagcaaaaccacactcaagaccgtacatggcatacttaatgatatgggatcaaaaatcactaaaaagatgcggaggatttctaatccaagacgacttcgtactaacagcagctcactgctggggatcatcaataaacgtaacactaggagcacacaacataaaagaacaagaacccacacaacaatttataccagtaaaaagaccaatcccacacccagcatacaacccaaaaaacttctcaaacgacataatgttattacaattagaaagaaaagcaaaaagaacaagagcagtacaaccattaagactaccatcaaacaaagcacaagtcaaaccaggacaaacatgctcagtagctggatggggacaaacagcaccactaggaaaacacagtcacacactacaagaagtaaaaatgaccgtacaagaagacagaaaatgcgaatcagacctaagacactactacgactcaacaatagaactatgcgtaggagacccagaaataaaaaaaacaagcttcaaaggagacagcggaggtccattagtatgcaacaaagtagctcaaggaatagtaagttacggaagaaacaacggaatgccacccagagcatgcacaaaagtctcatcattcgtacactggataaaaaaaacaatgaaaagatactaa

SEQ ID NO: 7369 - protein, 233 aa, synthetic construct
  REGION 1..233: note = TNF__Homo_sapiens__P01375
MSTESMIRDVELAEEALPKKTGGPQGSRRCLFLSLFSFLIVAGATTLFCLLHFGVIGPQREEFPRDLSLISPLAQAVRSSSRTPSDKPVAHVVANPQAEGQLQWLNRRANALLANGVELRDNQLVVPSEGLYLIYSQVLFKGQGCPSTHVLLTHTISRIAVSYQTKVNLLSAIKSPCQRETPEGAEAKPWYEPIYLGGVFQLEKGDRLSAEINRPDYLDFAESGQVYFGIIAL

SEQ ID NO: 7370 - RNA, 702 nt, synthetic construct
  misc_feature 1..702: note = TNF__Homo_sapiens__AAA36758
  source 1..702: mol_type = other RNA
atgagcactgaaagcatgatccgggacgtggagctggccgaggaggcgctccccaagaagacaggggggccccagggctccaggcggtgcttgttcctcagcctcttctccttcctgatcgtggcaggcgccaccacgctcttctgcctgctgcactttggagtgatcggcccccagagggaagagttccccagggacctctctctaatcagccctctggcccaggcagtcagatcatcttctcgaaccccgagtgacaagcctgtagcccatgttgtagcaaaccctcaagctgaggggcagctccagtggctgaaccgccgggccaatgccctcctggccaatggcgtggagctgagagataaccagctggtggtgccatcagagggcctgtacctcatctactcccaggtcctcttcaagggccaaggctgcccctccacccatgtgctcctcacccacaccatcagccgcatcgccgtctcctaccagaccaaggtcaacctcctctctgccatcaagagcccctgccagagggagaccccagagggggctgaggccaagccctggtatgagcccatctatctgggaggggtcttccagctggagaagggtgaccgactcagcgctgagatcaatcggcccgactatctcgactttgccgagtctgggcaggtctactttgggatcattgccctgtga

SEQ ID NO: 7371 - RNA, 702 nt, synthetic construct
  misc_feature 1..702: note = derived and/or modified sequence opt1 fromTNF__Homo_sapiens__AAA36758
  source 1..702: mol_type = other RNA
atgagcaccgagtccatgatccgcgacgtggagctggccgaggaggccctccccaagaagaccggcgggccgcagggcagccggcgctgcctgttcctgtccctcttcagcttcctgatcgtcgcgggggccacgaccctgttctgcctcctgcacttcggcgtgatcgggccccagcgggaggagttcccccgcgacctgtccctcatcagccccctggcccaggccgtgcggtccagctcccgcaccccgagcgacaagcccgtcgcccacgtggtggcgaacccccaggccgagggccagctgcagtggctcaaccggcgcgccaacgccctgctggcgaacggcgtcgagctccgggacaaccagctggtggtgccctccgaggggctgtacctcatctacagccaggtcctgttcaagggccaggggtgcccgtccacccacgtgctgctcacgcacaccatcagccgcatcgccgtgtcctaccagaccaaggtcaacctgctgagcgccatcaagtccccctgccagcgggagacccccgagggcgccgaggccaagccctggtacgagccgatctacctcgggggcgtgttccagctggagaagggcgaccgcctgagcgcggagatcaaccggcccgactacctcgacttcgccgagtccggccaggtgtacttcgggatcatcgccctgtga

SEQ ID NO: 7372 - RNA, 702 nt, synthetic construct
  misc_feature 1..702: note = derived and/or modified sequence opt2 fromTNF__Homo_sapiens__AAA36758
  source 1..702: mol_type = other RNA
atgtccaccgagtccatgatccgcgacgtcgagctcgccgaggaggccctccccaagaagaccggcggcccccagggctcccgccgctgcctcttcctctccctcttctccttcctcatcgtcgccggcgccaccaccctcttctgcctcctccacttcggcgtcatcggcccccagcgcgaggagttcccccgcgacctctccctcatctcccccctcgcccaggccgtccgctcctcctcccgcaccccctccgacaagcccgtcgcccacgtcgtcgccaacccccaggccgagggccagctccagtggctcaaccgccgcgccaacgccctcctcgccaacggcgtcgagctccgcgacaaccagctcgtcgtcccctccgagggcctctacctcatctactcccaggtcctcttcaagggccagggctgcccctccacccacgtcctcctcacccacaccatctcccgcatcgccgtctcctaccagaccaaggtcaacctcctctccgccatcaagtccccctgccagcgcgagacccccgagggcgccgaggccaagccctggtacgagcccatctacctcggcggcgtcttccagctcgagaagggcgaccgcctctccgccgagatcaaccgccccgactacctcgacttcgccgagtccggccaggtctacttcggcatcatcgccctctga

SEQ ID NO: 7373 - RNA, 702 nt, synthetic construct
  misc_feature 1..702: note = derived and/or modified sequence opt3 fromTNF__Homo_sapiens__AAA36758
  source 1..702: mol_type = other RNA
atgagcaccgagtccatgatcagagacgtggaactggccgaggaagctctccccaagaaaacaggcgggcctcagggatctaggcggtgccttttcctgtcattgtttagtttcttaattgtcgccggtgcaactacgctgttttgtctactccacttcggcgttatagggccacaacgcgaggaatttccgcgagatctgagccttatctctcccctggcgcaggctgtgcgttcctcgtcaagaacccctagcgacaagccagtagcccatgtggtcgcaaacccccaggccgagggacagttgcaatggctcaataggcgggctaacgcactgctggccaatggcgtggagctccgcgataaccagttagttgtgcctagtgaaggtctgtaccttatttattcccaggtcttgttcaaagggcagggatgcccatctacacacgtgctgctaactcataccatcagcagaattgctgtatcctaccaaacaaaggttaatctcctgtcagccatcaaaagtccctgtcagagggagacccctgaaggcgcggaggcaaagccatggtatgagccgatataccttggcggggtgtttcagctggaaaagggagaccggttgagcgccgagatcaaccgccccgattatctcgacttcgctgaatctggtcaggtctactttggcattatcgccctgtga

SEQ ID NO: 7374 - RNA, 702 nt, synthetic construct
  misc_feature 1..702: note = derived and/or modified sequence opt4 fromTNF__Homo_sapiens__AAA36758
  source 1..702: mol_type = other RNA
atgagcaccgagagcatgatcagagacgtggagctggccgaggaggccctgcccaagaagaccggcggcccccagggcagcagaagatgcctgttcctgagcctgttcagcttcctgatcgtggccggcgccaccaccctgttctgcctgctgcacttcggcgtgatcggcccccagagagaggagttccccagagacctgagcctgatcagccccctggcccaggccgtgagaagcagcagcagaacccccagcgacaagcccgtggcccacgtggtggccaacccccaggccgagggccagctgcagtggctgaacagaagagccaacgccctgctggccaacggcgtggagctgagagacaaccagctggtggtgcccagcgagggcctgtacctgatctacagccaggtgctgttcaagggccagggctgccccagcacccacgtgctgctgacccacaccatcagcagaatcgccgtgagctaccagaccaaggtgaacctgctgagcgccatcaagagcccctgccagagagagacccccgagggcgccgaggccaagccctggtacgagcccatctacctgggcggcgtgttccagctggagaagggcgacagactgagcgccgagatcaacagacccgactacctggacttcgccgagagcggccaggtgtacttcggcatcatcgccctgtga

SEQ ID NO: 7375 - RNA, 702 nt, synthetic construct
  misc_feature 1..702: note = derived and/or modified sequence opt5 fromTNF__Homo_sapiens__AAA36758
  source 1..702: mol_type = other RNA
atgagcaccgagtccatgatcagagacgtggaactggccgaggaagctctccccaagaaaacaggcgggcctcagggatctcggcgctgcctgttccttagcctgttttccttcctcattgtcgccggcgcgacgaccctgttttgtcttctgcacttcggggttatcggaccgcaaagagaggaatttccccgggatctctctctgattagccctctggctcaggccgtgcgctcctctagcagaacaccctccgacaagcctgtggcccatgtcgtggctaacccccaggccgagggccagctccaatggctgaatcggcgcgctaacgcccttctggcgaatggggttgagctcagagataaccagctggtggtccctagcgaaggactttacctgatctattctcaggttctcttcaaaggccagggctgcccgtccacccacgtgctgctgacacataccattagccggatcgccgtgtcttaccaaacaaaggtcaatctcctgtccgctatcaaaagcccctgtcagcgcgagacccctgaaggggccgaggctaagccctggtatgagcctatttaccttggaggcgtgtttcagctggaaaagggggacagactctctgccgagatcaaccggcccgattatctggacttcgcggaatccggacaggtgtactttggcattatcgccctttga

SEQ ID NO: 7376 - RNA, 702 nt, synthetic construct
  misc_feature 1..702: note = derived and/or modified sequence opt6 fromTNF__Homo_sapiens__AAA36758
  source 1..702: mol_type = other RNA
atgtcaacagaatctatgataagagacgtcgaactagcagaagaagcattaccaaaaaaaaccggaggaccacaaggctcaagaagatgcctattcctatcattattctcattcctaatagtagcaggcgcaacaacactattttgcctattacatttcggagtaatcggaccacaaagagaagaattcccacgcgacctatcattaatatctccactagcacaagccgttagatcatcatcaagaacaccatcagacaaaccagtagcccacgtcgtagcaaacccccaagccgaaggacaactacaatggctaaaccgcagagcaaacgcactattagccaacggagtagaattaagagacaaccaactagtagtaccatcagaaggactatacctaatatactcacaagtactattcaaaggacaaggctgcccatcaacccacgtactactaacacacacaatatcaagaatagcagtatcataccaaacaaaagtaaacctactatcagcaataaaatcaccatgccaaagagaaacacccgaaggagcagaagccaaaccatggtacgaacctatatacctaggaggagtattccaattagaaaaaggagacagactatcagcagaaataaacagaccagattacctagatttcgcagaatccggacaagtatacttcggaataatagcactataa

SEQ ID NO: 7377 - protein, 233 aa, synthetic construct; identical to SEQ ID NO: 7369
  REGION 1..233: note = TNF__Homo_sapiens__Q5STB3

SEQ ID NO: 7378 - RNA, 702 nt, synthetic construct
  misc_feature 1..702: note = TNF__Homo_sapiens__ADV31546
  source 1..702: mol_type = other RNA
atgagcactgaaagcatgatccgggacgtggagctggccgaggaggcgctccccaagaagacaggggggccccagggctccaggcggtgcttgttcctcagcctcttctccttcctgatcgtggcaggcgccaccacgctcttctgcctgctgcactttggggtgatcggcccccagagggaagagttccccagggacctctctctaatcagccctctggcccaggcagtcagatcatcttctcgaaccccgagtgacaagcctgtagcccatgttgtagcaaaccctcaagctgaggggcagctccagtggctgaaccgccgggccaatgccctcctggccaatggcgtggagctgagagataaccagttggtggtgccatcagagggcctgtacctcatctactcccaggtcctcttcaagggccaaggctgcccctccacccatgtgctcctcacccacaccatcagccgcatcgccgtctcctaccagaccaaggtcaacctcctctctgccatcaagagcccctgccagagggagaccccagagggggctgaggccaagccctggtatgagcccatctatctgggaggggtcttccagctggagaagggtgaccgactcagcgctgagatcaatcggcccgactatctcgactttgccgagtctgggcaggtctactttgggatcattgccctgtga

SEQ ID NO: 7379 - RNA, 702 nt, synthetic construct; identical to SEQ ID NO: 7371
  misc_feature 1..702: note = derived and/or modified sequence opt1 fromTNF__Homo_sapiens__ADV31546
  source 1..702: mol_type = other RNA

SEQ ID NO: 7380 - RNA, 702 nt, synthetic construct; identical to SEQ ID NO: 7372
  misc_feature 1..702: note = derived and/or modified sequence opt2 fromTNF__Homo_sapiens__ADV31546
  source 1..702: mol_type = other RNA

SEQ ID NO: 7381 - RNA, 702 nt, synthetic construct; identical to SEQ ID NO: 7373
  misc_feature 1..702: note = derived and/or modified sequence opt3 fromTNF__Homo_sapiens__ADV31546
  source 1..702: mol_type = other RNA

SEQ ID NO: 7382 - RNA, 702 nt, synthetic construct; identical to SEQ ID NO: 7374
  misc_feature 1..702: note = derived and/or modified sequence opt4 fromTNF__Homo_sapiens__ADV31546
  source 1..702: mol_type = other RNA

SEQ ID NO: 7383 - RNA, 702 nt, synthetic construct; identical to SEQ ID NO: 7375
  misc_feature 1..702: note = derived and/or modified sequence opt5 fromTNF__Homo_sapiens__ADV31546
  source 1..702: mol_type = other RNA

SEQ ID NO: 7384 - RNA, 702 nt, synthetic construct
  misc_feature 1..702: note = derived and/or modified sequence opt6 fromTNF__Homo_sapiens__ADV31546
  source 1..702: mol_type = other RNA
atgtcaacagaatcaatgataagagacgtagaactagcagaagaagcattaccaaaaaaaacaggaggaccacaaggaagcagacgatgcttattcctatcactattctcatttttaatagtagcaggagcaacaacactattctgcctattacatttcggagtcataggaccacaaagagaagaattccctagagacctatcactaatatcaccactagcacaagcagtaagatcatcaagcagaacaccatcagacaaaccagtagcccacgtagtagcaaacccacaagcagaaggacaactccaatggctaaaccgaagagccaacgcattactcgcaaacggagtagaattaagagacaaccaattagtagtaccatcagaaggcctctatctaatatactcacaagtattattcaaaggacaaggatgtccatcaacccacgtactactaacacacacaatatcaagaatagcagtatcataccaaacaaaagtaaacctactaagcgcaataaaatcaccctgccaaagagaaacacctgaaggagccgaagcaaaaccatggtatgaaccaatatacctaggaggagtattccaattagaaaaaggagaccgactatccgcagaaataaatagaccagactacctagacttcgcagaatcaggacaagtatacttcggaataatagcactataa

SEQ ID NO: 7385 - protein, 496 aa, synthetic construct [sequence omitted]

SEQ ID NO: 7386 - RNA, 1491 nt, synthetic construct
  misc_feature 1..1491: note = Angiopoietin-2__Homo_sapiens__BAG35440
  source 1..1491: mol_type = other RNA
atgtggcagattgttttctttactctgagctgtgatcttgtcttggccgcagcctataacaactttcggaagagcatggacagcataggaaagaagcaatatcaggtccagcatgggtcctgcagctacactttcctcctgccagagatggacaactgccgctcttcctccagcccctacgtgtccaatgctgtgcagagggacgcgccgctcgaatacgatgactcggtgcagaggctgcaagtgctggagaacatcatggaaaacaacactcagtggctaatgaagcttgagaattatatccaggacaacatgaagaaagaaatggtagagatacagcagaatgcagtacagaaccagacggctgtgatgatagaaatagggacaaacctgttgaaccaaacagcggagcaaacgcggaagttaactgatgtggaagcccaagtattaaatcagaccacgagacttgaacttcagctcttggaacactccctctcgacaaacaaattgggaaaacagattttggaccagaccagtgaaataaacaaatttcaagataagaacagtttcctagaaaagaaggtgctagctatggaagacaagcacatcatccaactacagtcaataaaagaagagaaagatcagctacaggtgttagtatccaagcaaaattccatcattgaagaactagaaaaaaaaatagtgactgccactgtgaataattcagttcttcagaagcagcaacatgatctcatggagacagttaataacttactgactatgatgtccacatcaaactcagctaaggaccccactgttgctaaagaagaacaaatcagcttcagagactgtgctgaagtattcaaatcaggacacaccacgaatggcatctacacgttaacattccctaattctacagaagagatcaaggcctactgtgacatggaagctggaggaggcgggtggacaattattcagcgacgtgaggatggcagcgttgattttcagaggacttggaaagaatataaagtgggatttggtaacccttcaggagaatattggctgggaaatgagtttgtttcgcaactgactaatcagcaacgctatgtgcttaaaatacaccttaaagactgggaagggaatgaggcttactcattgtatgaacatttctatctctcaagtgaagaactcaattataggattcaccttaaaggacttacagggacagccggcaaaataagcagcatcagccaaccaggaaatgattttagcacaaaggatggagacaacgacaaatgtatttgcaaatgttcacaaatgctaacaggaggctggtggtttgatgcatgtggtccttccaacttgaacggaatgtactatccacagaggcagaacacaaataagttcaacggcattaaatggtactactggaaaggctcaggctattcgctcaaggccacaaccatgatgatccgaccagcagatttctaa

SEQ ID NO: 7387 - RNA, 1491 nt, synthetic construct
  misc_feature 1..1491: note = derived and/or modified sequence opt1 fromAngiopoietin-2__Homo_sapiens__BAG35440
  source 1..1491: mol_type = other RNA
atgtggcagatcgtgttcttcaccctgagctgcgacctcgtcctggccgccgcgtacaacaacttccgcaagtccatggacagcatcggcaagaagcagtaccaggtgcagcacgggtcctgcagctacaccttcctgctccccgagatggacaactgccggtccagctccagcccgtacgtgtccaacgccgtccagcgcgacgcgcccctggagtacgacgacagcgtgcagcggctccaggtgctggagaacatcatggagaacaacacgcagtggctgatgaagctggagaactacatccaggacaacatgaagaaggagatggtcgagatccagcagaacgccgtgcagaaccagaccgccgtgatgatcgagatcggcaccaacctcctgaaccagaccgccgagcagacgcgcaagctgaccgacgtcgaggcccaggtgctcaaccagaccacccggctggagctgcagctcctggagcactccctgagcacgaacaagctcgggaagcagatcctggaccagacctccgagatcaacaagttccaggacaagaacagcttcctggagaagaaggtgctcgccatggaggacaagcacatcatccagctgcagtccatcaaggaggagaaggaccagctgcaggtcctcgtgagcaagcagaactccatcatcgaggagctggagaagaagatcgtgaccgccaccgtcaacaacagcgtgctgcagaagcagcagcacgacctcatggagacggtgaacaacctgctgaccatgatgtccaccagcaacagcgcgaaggaccccaccgtcgccaaggaggagcagatctccttccgcgactgcgccgaggtgttcaagagcggccacacgaccaacgggatctacaccctcaccttccccaactccacggaggagatcaaggcctactgcgacatggaggccggcggcgggggctggaccatcatccagcggcgcgaggacgggagcgtggacttccagcggacctggaaggagtacaaggtcggcttcgggaacccgtccggcgagtactggctgggcaacgagttcgtgagccagctgaccaaccagcagcgctacgtgctcaagatccacctgaaggactgggaggggaacgaggcgtactccctgtacgagcacttctacctcagctccgaggagctgaactaccggatccacctgaagggcctcacggggaccgccggcaagatcagctccatcagccagcccggcaacgacttctccaccaaggacggggacaacgacaagtgcatctgcaagtgcagccagatgctgaccggcgggtggtggttcgacgcctgcggcccctccaacctgaacgggatgtactacccccagcgccagaacacgaacaagttcaacggcatcaagtggtactactggaagggcagcgggtactccctcaaggccaccaccatgatgatccggccggccgacttctga

SEQ ID NO: 7388 - RNA, 1491 nt, synthetic construct
  misc_feature 1..1491: note = derived and/or modified sequence opt2 fromAngiopoietin-2__Homo_sapiens__BAG35440
  source 1..1491: mol_type = other RNA
atgtggcagatcgtcttcttcaccctctcctgcgacctcgtcctcgccgccgcctacaacaacttccgcaagtccatggactccatcggcaagaagcagtaccaggtccagcacggctcctgctcctacaccttcctcctccccgagatggacaactgccgctcctcctcctccccctacgtctccaacgccgtccagcgcgacgcccccctcgagtacgacgactccgtccagcgcctccaggtcctcgagaacatcatggagaacaacacccagtggctcatgaagctcgagaactacatccaggacaacatgaagaaggagatggtcgagatccagcagaacgccgtccagaaccagaccgccgtcatgatcgagatcggcaccaacctcctcaaccagaccgccgagcagacccgcaagctcaccgacgtcgaggcccaggtcctcaaccagaccacccgcctcgagctccagctcctcgagcactccctctccaccaacaagctcggcaagcagatcctcgaccagacctccgagatcaacaagttccaggacaagaactccttcctcgagaagaaggtcctcgccatggaggacaagcacatcatccagctccagtccatcaaggaggagaaggaccagctccaggtcctcgtctccaagcagaactccatcatcgaggagctcgagaagaagatcgtcaccgccaccgtcaacaactccgtcctccagaagcagcagcacgacctcatggagaccgtcaacaacctcctcaccatgatgtccacctccaactccgccaaggaccccaccgtcgccaaggaggagcagatctccttccgcgactgcgccgaggtcttcaagtccggccacaccaccaacggcatctacaccctcaccttccccaactccaccgaggagatcaaggcctactgcgacatggaggccggcggcggcggctggaccatcatccagcgccgcgaggacggctccgtcgacttccagcgcacctggaaggagtacaaggtcggcttcggcaacccctccggcgagtactggctcggcaacgagttcgtctcccagctcaccaaccagcagcgctacgtcctcaagatccacctcaaggactgggagggcaacgaggcctactccctctacgagcacttctacctctcctccgaggagctcaactaccgcatccacctcaagggcctcaccggcaccgccggcaagatctcctccatctcccagcccggcaacgacttctccaccaaggacggcgacaacgacaagtgcatctgcaagtgctcccagatgctcaccggcggctggtggttcgacgcctgcggcccctccaacctcaacggcatgtactacccccagcgccagaacaccaacaagttcaacggcatcaagtggtactactggaagggctccggctactccctcaaggccaccaccatgatgatccgccccgccgacttctga

SEQ ID NO: 7389 - RNA, 1491 nt, synthetic construct
  misc_feature 1..1491: note = derived and/or modified sequence opt3 fromAngiopoietin-2__Homo_sapiens__BAG35440
  source 1..1491: mol_type = other RNA
atgtggcagatcgtgttctttaccctgagctgcgacctcgtccttgccgctgcatacaacaatttcagaaagtccatggattctattggcaaaaagcaatatcaggttcagcacgggtcatgtagttacacatttctgttgcccgagatggacaactgcaggagctcctcttcgccttatgtgtcaaatgccgtacagcgggatgcgccattagaatacgacgatagcgtgcaacgcctgcaggtcctagagaacataatggaaaataacactcagtggctcatgaaactggagaattatatccaggacaacatgaagaaagaaatggtggagattcaacagaatgctgttcagaaccagacggccgtgatgatcgagattggaaccaatcttctgaaccaaacagcagaacagactcgaaagttgaccgatgtcgaggcccaggtgctcaatcaaacaacccgtctggaactgcagctcttagagcatagtctgtccactaacaaacttggtaagcagatcttggaccagacatctgagataaataagttccaagataaaaacagctttctggaaaagaaagtactagctatggaggacaagcacatcattcagctccagtccatcaaggaagagaaagatcagctgcaagttcttgtgtcaaagcagaacagtattatcgaagaactggagaaaaagatagtcaccgcaacggtgaataacagcgtgttgcagaaacagcaacatgacctcatggaaactgtcaataacctgttaaccatgatgtctacatccaattcagccaaggatccgactgttgctaaagaggaacagattagcttcagagactgtgccgaggtgtttaagagtggccacaccacaaacgggatctacaccctgacgttccccaattctactgaagagattaaggcgtattgcgacatggaggcaggaggcggtgggtggacaatcatccagaggcgggaagatggatccgtagactttcagcgcacctggaaagagtacaaggtgggcttcggcaaccctagcggggaatactggctcggaaatgagtttgtctcgcaacttactaaccagcagagatatgtgctgaaaattcatttgaaggattgggaaggtaatgaggcctactctctatatgagcacttctacctgtcctcagaggagctcaactataggatacacctgaaaggccttacagggaccgctggaaagatcagtagcatttcccaaccaggcaatgacttttctacgaaggatggtgacaacgataaatgtatctgcaagtgtagccagatgctgaccgggggatggtggttcgacgcctgcggcccctcaaatttgaacggcatgtactatcctcagcggcagaacacaaataaattcaacgggataaagtggtactactggaaaggaagtggttattccctcaaggcaactaccatgatgattcgcccagctgatttttga

SEQ ID NO: 7390 - RNA, 1491 nt, synthetic construct
  misc_feature 1..1491: note = derived and/or modified sequence opt4 fromAngiopoietin-2__Homo_sapiens__BAG35440
  source 1..1491: mol_type = other RNA
atgtggcagatcgtgttcttcaccctgagctgcgacctggtgctggccgccgcctacaacaacttcagaaagagcatggacagcatcggcaagaagcagtaccaggtgcagcacggcagctgcagctacaccttcctgctgcccgagatggacaactgcagaagcagcagcagcccctacgtgagcaacgccgtgcagagagacgcccccctggagtacgacgacagcgtgcagagactgcaggtgctggagaacatcatggagaacaacacccagtggctgatgaagctggagaactacatccaggacaacatgaagaaggagatggtggagatccagcagaacgccgtgcagaaccagaccgccgtgatgatcgagatcggcaccaacctgctgaaccagaccgccgagcagaccagaaagctgaccgacgtggaggcccaggtgctgaaccagaccaccagactggagctgcagctgctggagcacagcctgagcaccaacaagctgggcaagcagatcctggaccagaccagcgagatcaacaagttccaggacaagaacagcttcctggagaagaaggtgctggccatggaggacaagcacatcatccagctgcagagcatcaaggaggagaaggaccagctgcaggtgctggtgagcaagcagaacagcatcatcgaggagctggagaagaagatcgtgaccgccaccgtgaacaacagcgtgctgcagaagcagcagcacgacctgatggagaccgtgaacaacctgctgaccatgatgagcaccagcaacagcgccaaggaccccaccgtggccaaggaggagcagatcagcttcagagactgcgccgaggtgttcaagagcggccacaccaccaacggcatctacaccctgaccttccccaacagcaccgaggagatcaaggcctactgcgacatggaggccggcggcggcggctggaccatcatccagagaagagaggacggcagcgtggacttccagagaacctggaaggagtacaaggtgggcttcggcaaccccagcggcgagtactggctgggcaacgagttcgtgagccagctgaccaaccagcagagatacgtgctgaagatccacctgaaggactgggagggcaacgaggcctacagcctgtacgagcacttctacctgagcagcgaggagctgaactacagaatccacctgaagggcctgaccggcaccgccggcaagatcagcagcatcagccagcccggcaacgacttcagcaccaaggacggcgacaacgacaagtgcatctgcaagtgcagccagatgctgaccggcggctggtggttcgacgcctgcggccccagcaacctgaacggcatgtactacccccagagacagaacaccaacaagttcaacggcatcaagtggtactactggaagggcagcggctacagcctgaaggccaccaccatgatgatcagacccgccgacttctga

SEQ ID NO: 7391 - RNA, 1491 nt, synthetic construct
  misc_feature 1..1491: note = derived and/or modified sequence opt5 fromAngiopoietin-2__Homo_sapiens__BAG35440
  source 1..1491: mol_type = other RNA
atgtggcagatcgtgttctttaccctgagctgcgacctcgtcctggccgctgcctacaacaatttcagaaagtccatggattctattggcaaaaagcaatatcaggttcagcacgggagctgttcctacacatttcttctgcccgagatggacaactgccggtctagctcctctccttatgtgagcaatgcggtgcagcgcgatgctccgctcgaatacgacgattccgtccaaagacttcaggtgctggagaacatcatggaaaataacacgcagtggctgatgaaactcgagaattatattcaggacaacatgaagaaagaaatggttgagatccaacagaatgccgtgcagaaccagaccgccgtcatgattgagatcggaacaaatctgctgaaccaaaccgctgaacagacacggaagctcaccgatgtggaggcccaggttctgaatcaaacaacccgccttgaactgcagctcctggagcatagcctttctacgaacaagctgggcaaacagatcctcgaccagacctccgagattaataagttccaagataaaaacagctttctggaaaagaaagtgctggctatggaggacaagcacatcattcagctccagtctatcaaggaagagaaagatcagctgcaagtccttgtgtccaagcagaacagcattatcgaagaactggagaaaaagattgtgacagccaccgtcaataactctgttctccagaaacagcaacatgacctgatggaaacagtgaataaccttctgaccatgatgtccacgagcaattccgcgaaggatcccacagtggccaaagaggaacagatctctttcagagactgtgctgaggtctttaagagcgggcacaccacaaacggaatctacaccctcaccttccctaattccacagaagagattaaggcctattgcgacatggaggctggcgggggaggctggacgatcattcagcggcgcgaagatggcagcgtggactttcagagaacctggaaagagtacaaggttgggttcggaaacccctctggcgaatactggctggggaatgagtttgtgtcccaactgacaaaccagcagcggtatgtcctcaaaatccatctgaaggattgggaaggaaatgaggcctacagcctttatgagcacttctacctgtctagcgaggagctcaactatcgcattcacctgaaaggccttaccgggacagcgggaaagatctcctctatcagccaacctggcaatgacttttccaccaaggatggcgacaacgataaatgtatttgcaagtgtagccagatgctgacagggggatggtggttcgacgcctgcggcccctctaatctcaacgggatgtactatcctcagagacagaacacgaataaattcaacggaatcaagtggtactactggaaaggctccgggtatagcctgaaggctaccaccatgatgattcggccggccgatttttga

SEQ ID NO: 7392 - RNA, 1491 nt, synthetic construct
  misc_feature 1..1491: note = derived and/or modified sequence opt6 fromAngiopoietin-2__Homo_sapiens__BAG35440
  source 1..1491: mol_type = other RNA
atgtggcaaatagtattctttaccttatcttgcgatttagtattagccgccgcatataacaactttagaaaaagcatggactcaatcggaaaaaaacaatatcaagtgcaacacggatcatgcagctatacatttctactcccagaaatggacaactgcagatcaagcagctcaccatatgtctcaaacgccgtccaaagagacgcaccactagaatatgacgactcagtacaaagattacaagtattagagaatataatggaaaacaatacacaatggctaatgaaactagaaaattacatacaagacaatatgaaaaaagaaatggtagaaatacaacaaaacgcagtccaaaaccaaacagcagtaatgatcgaaataggaaccaacttacttaaccaaacagcagaacaaacaagaaaactaacagacgtagaagcacaagtcctaaatcaaactacaagacttgaattacaacttctagaacattcattatcaacaaacaaactcggaaaacaaatactcgaccaaacatcagaaataaataaatttcaagacaaaaattcattcctcgaaaaaaaagtattagccatggaagacaaacacataatacaacttcaaagcataaaggaagaaaaagaccaactacaagtcctagtatcaaaacaaaattcaataatagaagaattagaaaaaaaaatagtaacagcaacagtaaacaactcagtattacagaaacaacaacacgacctaatggaaacagtcaacaacttattaacaatgatgtccacatcaaactcagcaaaagatcccacagtagcaaaagaagaacaaatctcatttagagactgtgcagaagttttcaaatccggacacacaacaaacggcatatataccttaactttcccaaattcaactgaagaaataaaagcatactgtgatatggaagcaggaggaggcggatggacaataatacaacgaagagaagacggttctgtagatttccaaagaacatggaaagaatacaaagtaggtttcggaaatccaagcggagaatactggctaggtaatgaattcgtatcacaactaacaaaccaacaaagatacgtactaaaaatacacttaaaagactgggaaggcaatgaagcatactcactatacgaacacttttacttatcatcagaagagctaaattatagaattcacctgaaaggcctcacaggcaccgcaggaaaaatatcctcaatctcacaaccaggtaacgacttctcaacaaaagacggagacaacgacaaatgcatatgcaaatgctctcaaatgctaacaggcggttggtggttcgacgcatgcggaccgagcaatctaaacggaatgtactatccccaaagacaaaatacaaacaaattcaacggaatcaaatggtattactggaaaggctccggatatagcctaaaagcaacaacaatgatgataagacctgcagacttttaa

SEQ ID NO: 7393 - protein, 496 aa, synthetic construct
  REGION 1..496: note = Angiopoietin-2__Homo_sapiens__O15123
MWQIVFFTLSCDLVLAAAYNNFRKSMDSIGKKQYQVQHGSCSYTFLLPEMDNCRSSSSPYVSNAVQRDAPLEYDDSVQRLQVLENIMENNTQWLMKLENYIQDNMKKEMVEIQQNAVQNQTAVMIEIGTNLLNQTAEQTRKLTDVEAQVLNQTTRLELQLLEHSLSTNKLEKQILDQTSEINKLQDKNSFLEKKVLAMEDKHIIQLQSIKEEKDQLQVLVSKQNSIIEELEKKIVTATVNNSVLQKQQHDLMETVNNLLTMMSTSNSAKDPTVAKEEQISFRDCAEVFKSGHTTNGIYTLTFPNSTEEIKAYCDMEAGGGGWTIIQRREDGSVDFQRTWKEYKVGFGNPSGEYWLGNEFVSQLTNQQRYVLKIHLKDWEGNEAYSLYEHFYLSSEELNYRIHLKGLTGTAGKISSISQPGNDFSTKDGDNDKCICKCSQMLTGGWWFDACGPSNLNGMYYPQRQNTNKFNGIKWYYWKGSGYSLKATTMMIRPADF

SEQ ID NO: 7394 - RNA, 1491 nt, synthetic construct
  misc_feature 1..1491: note = Angiopoietin-2__Homo_sapiens__AAB63190
  source 1..1491: mol_type = other RNA
atgtggcagattgttttctttactctgagctgtgatcttgtcttggccgcagcctataacaactttcggaagagcatggacagcataggaaagaagcaatatcaggtccagcatgggtcctgcagctacactttcctcctgccagagatggacaactgccgctcttcctccagcccctacgtgtccaatgctgtgcagagggacgcgccgctcgaatacgatgactcggtgcagaggctgcaagtgctggagaacatcatggaaaacaacactcagtggctaatgaagcttgagaattatatccaggacaacatgaagaaagaaatggtagagatacagcagaatgcagtacagaaccagacggctgtgatgatagaaatagggacaaacctgttgaaccaaacagctgagcaaacgcggaagttaactgatgtggaagcccaagtattaaatcagaccacgagacttgaacttcagctcttggaacactccctctcgacaaacaaattggaaaaacagattttggaccagaccagtgaaataaacaaattgcaagataagaacagtttcctagaaaagaaggtgctagctatggaagacaagcacatcatccaactacagtcaataaaagaagagaaagatcagctacaggtgttagtatccaagcaaaattccatcattgaagaactagaaaaaaaaatagtgactgccacggtgaataattcagttcttcaaaagcagcaacatgatctcatggagacagttaataacttactgactatgatgtccacatcaaactcagctaaggaccccactgttgctaaagaagaacaaatcagcttcagagactgtgctgaagtattcaaatcaggacacaccacaaatggcatctacacgttaacattccctaattctacagaagagatcaaggcctactgtgacatggaagctggaggaggcgggtggacaattattcagcgacgtgaggatggcagcgttgattttcagaggacttggaaagaatataaagtgggatttggtaacccttcaggagaatattggctgggaaatgagtttgtttcgcaactgactaatcagcaacgctatgtgcttaaaatacaccttaaagactgggaagggaatgaggcttactcattgtatgaacatttctatctctcaagtgaagaactcaattataggattcaccttaaaggacttacagggacagccggcaaaataagcagcatcagccaaccaggaaatgattttagcacaaaggatggagacaacgacaaatgtatttgcaaatgttcacaaatgctaacaggaggctggtggtttgatgcatgtggtccttccaacttgaacggaatgtactatccacagaggcagaacacaaataagttcaacggcattaaatggtactactggaaaggctcaggctattcgctcaaggccacaaccatgatgatccgaccagcagatttctaa

SEQ ID NO: 7395 - RNA, 1491 nt, synthetic construct
  misc_feature 1..1491: note = derived and/or modified sequence opt1 fromAngiopoietin-2__Homo_sapiens__AAB63190
  source 1..1491: mol_type = other RNA
atgtggcagatcgtgttcttcaccctgagctgcgacctcgtcctggccgccgcgtacaacaacttccgcaagtccatggacagcatcggcaagaagcagtaccaggtgcagcacgggtcctgcagctacaccttcctgctccccgagatggacaactgccggtccagctccagcccgtacgtgtccaacgccgtccagcgcgacgcgcccctggagtacgacgacagcgtgcagcggctccaggtgctggagaacatcatggagaacaacacgcagtggctgatgaagctggagaactacatccaggacaacatgaagaaggagatggtcgagatccagcagaacgccgtgcagaaccagaccgccgtgatgatcgagatcggcaccaacctcctgaaccagaccgccgagcagacgcgcaagctgaccgacgtcgaggcccaggtgctcaaccagaccacccggctggagctgcagctcctggagcactccctgagcacgaacaagctcgagaagcagatcctggaccagacctccgagatcaacaagctgcaggacaagaacagcttcctcgagaagaaggtgctggccatggaggacaagcacatcatccagctgcagtccatcaaggaggagaaggaccagctccaggtcctggtgagcaagcagaactccatcatcgaggagctggagaagaagatcgtgaccgccaccgtcaacaacagcgtgctccagaagcagcagcacgacctgatggagacggtgaacaacctgctcaccatgatgtccaccagcaacagcgcgaaggaccccaccgtcgccaaggaggagcagatctccttccgcgactgcgccgaggtgttcaagagcgggcacacgaccaacggcatctacaccctgaccttccccaactccacggaggagatcaaggcctactgcgacatggaggccgggggcggcgggtggaccatcatccagcggcgcgaggacggcagcgtggacttccagcggacctggaaggagtacaaggtcgggttcggcaacccgtccggggagtactggctgggcaacgagttcgtgagccagctcaccaaccagcagcgctacgtgctgaagatccacctgaaggactgggagggcaacgaggcgtactccctctacgagcacttctacctgagctccgaggagctgaactaccggatccacctcaaggggctgacgggcaccgccgggaagatcagctccatcagccagcccggcaacgacttctccaccaaggacggcgacaacgacaagtgcatctgcaagtgcagccagatgctgaccgggggctggtggttcgacgcctgcgggccctccaacctcaacggcatgtactacccccagcgccagaacacgaacaagttcaacgggatcaagtggtactactggaagggcagcggctactccctgaaggccaccaccatgatgatccggccggccgacttctga

SEQ ID NO: 7396 - RNA, 1491 nt, synthetic construct
  misc_feature 1..1491: note = derived and/or modified sequence opt2 fromAngiopoietin-2__Homo_sapiens__AAB63190
  source 1..1491: mol_type = other RNA
atgtggcagatcgtcttcttcaccctctcctgcgacctcgtcctcgccgccgcctacaacaacttccgcaagtccatggactccatcggcaagaagcagtaccaggtccagcacggctcctgctcctacaccttcctcctccccgagatggacaactgccgctcctcctcctccccctacgtctccaacgccgtccagcgcgacgcccccctcgagtacgacgactccgtccagcgcctccaggtcctcgagaacatcatggagaacaacacccagtggctcatgaagctcgagaactacatccaggacaacatgaagaaggagatggtcgagatccagcagaacgccgtccagaaccagaccgccgtcatgatcgagatcggcaccaacctcctcaaccagaccgccgagcagacccgcaagctcaccgacgtcgaggcccaggtcctcaaccagaccacccgcctcgagctccagctcctcgagcactccctctccaccaacaagctcgagaagcagatcctcgaccagacctccgagatcaacaagctccaggacaagaactccttcctcgagaagaaggtcctcgccatggaggacaagcacatcatccagctccagtccatcaaggaggagaaggaccagctccaggtcctcgtctccaagcagaactccatcatcgaggagctcgagaagaagatcgtcaccgccaccgtcaacaactccgtcctccagaagcagcagcacgacctcatggagaccgtcaacaacctcctcaccatgatgtccacctccaactccgccaaggaccccaccgtcgccaaggaggagcagatctccttccgcgactgcgccgaggtcttcaagtccggccacaccaccaacggcatctacaccctcaccttccccaactccaccgaggagatcaaggcctactgcgacatggaggccggcggcggcggctggaccatcatccagcgccgcgaggacggctccgtcgacttccagcgcacctggaaggagtacaaggtcggcttcggcaacccctccggcgagtactggctcggcaacgagttcgtctcccagctcaccaaccagcagcgctacgtcctcaagatccacctcaaggactgggagggcaacgaggcctactccctctacgagcacttctacctctcctccgaggagctcaactaccgcatccacctcaagggcctcaccggcaccgccggcaagatctcctccatctcccagcccggcaacgacttctccaccaaggacggcgacaacgacaagtgcatctgcaagtgctcccagatgctcaccggcggctggtggttcgacgcctgcggcccctccaacctcaacggcatgtactacccccagcgccagaacaccaacaagttcaacggcatcaagtggtactactggaagggctccggctactccctcaaggccaccaccatgatgatccgccccgccgacttctga

SEQ ID NO: 7397 - RNA, 1491 nt, synthetic construct
  misc_feature 1..1491: note = derived and/or modified sequence opt3 fromAngiopoietin-2__Homo_sapiens__AAB63190
  source 1..1491: mol_type = other RNA
atgtggcagatcgtgttctttaccctgagctgcgacctcgtccttgccgctgcatacaacaatttcagaaagtccatggattctattggcaaaaagcaatatcaggttcagcacgggtcatgtagttacacatttctgttgcccgagatggacaactgcaggagctcctcttcgccttatgtgtcaaatgccgtacagcgggatgcgccattagaatacgacgatagcgtgcaacgcctgcaggtcctagagaacataatggaaaataacactcagtggctcatgaaactggagaattatatccaggacaacatgaagaaagaaatggtggagattcaacagaatgctgttcagaaccagacggccgtgatgatcgagattggaaccaatcttctgaaccaaacagcagaacagactcgaaagttgaccgatgtcgaggcccaggtgctcaatcaaacaacccgtctggaactgcagctcttagagcatagtctgtccactaacaaacttgagaaacagatcttggaccagacatctgaaataaataagctgcaagataaaaacagcttcctagagaagaaagtactcgctatggaagacaagcacatcattcagctgcagtccatcaaggaggaaaaagatcagcttcaagttctggtgtcaaagcagaacagtattatcgaggagttggaaaagaagatagtcaccgcaacggtgaataacagcgtgctccagaaacagcaacatgacctgatggagactgtcaataacttactgaccatgatgtctacatccaattcagccaaggatccgactgttgctaaagaagaacagattagctttagagactgtgccgaagtgttcaagagtggtcacaccacaaacggcatctacaccctcacgtttcccaattctactgaggagattaaggcgtattgcgacatggaagcagggggaggcggttggacaatcatccagaggcgggaggatgggtccgtagacttccagcgcacctggaaagaatacaaggtgggatttggcaaccctagcggcgagtactggcttgggaatgagttcgtctcgcaactgactaaccagcagagatatgtgttgaaaattcatctaaaggattgggagggaaatgaggcctactctctgtatgaacacttttacctctcctcagaggaactgaactataggatacaccttaaaggtctgacaggcaccgctgggaagatcagtagcatttcccaaccaggaaatgacttctctacgaaggatggcgacaacgataaatgtatctgcaagtgtagccagatgttgaccggtgggtggtggtttgacgcctgcggaccctcaaatctcaacggcatgtactatcctcagcggcagaacacaaataaattcaacggcataaagtggtactactggaaagggagtggatattccctgaaggcaactaccatgatgattcgcccagctgatttctga

SEQ ID NO: 7398 - RNA, 1491 nt, synthetic construct
  misc_feature 1..1491: note = derived and/or modified sequence opt4 fromAngiopoietin-2__Homo_sapiens__AAB63190
  source 1..1491: mol_type = other RNA
atgtggcagatcgtgttcttcaccctgagctgcgacctggtgctggccgccgcctacaacaacttcagaaagagcatggacagcatcggcaagaagcagtaccaggtgcagcacggcagctgcagctacaccttcctgctgcccgagatggacaactgcagaagcagcagcagcccctacgtgagcaacgccgtgcagagagacgcccccctggagtacgacgacagcgtgcagagactgcaggtgctggagaacatcatggagaacaacacccagtggctgatgaagctggagaactacatccaggacaacatgaagaaggagatggtggagatccagcagaacgccgtgcagaaccagaccgccgtgatgatcgagatcggcaccaacctgctgaaccagaccgccgagcagaccagaaagctgaccgacgtggaggcccaggtgctgaaccagaccaccagactggagctgcagctgctggagcacagcctgagcaccaacaagctggagaagcagatcctggaccagaccagcgagatcaacaagctgcaggacaagaacagcttcctggagaagaaggtgctggccatggaggacaagcacatcatccagctgcagagcatcaaggaggagaaggaccagctgcaggtgctggtgagcaagcagaacagcatcatcgaggagctggagaagaagatcgtgaccgccaccgtgaacaacagcgtgctgcagaagcagcagcacgacctgatggagaccgtgaacaacctgctgaccatgatgagcaccagcaacagcgccaaggaccccaccgtggccaaggaggagcagatcagcttcagagactgcgccgaggtgttcaagagcggccacaccaccaacggcatctacaccctgaccttccccaacagcaccgaggagatcaaggcctactgcgacatggaggccggcggcggcggctggaccatcatccagagaagagaggacggcagcgtggacttccagagaacctggaaggagtacaaggtgggcttcggcaaccccagcggcgagtactggctgggcaacgagttcgtgagccagctgaccaaccagcagagatacgtgctgaagatccacctgaaggactgggagggcaacgaggcctacagcctgtacgagcacttctacctgagcagcgaggagctgaactacagaatccacctgaagggcctgaccggcaccgccggcaagatcagcagcatcagccagcccggcaacgacttcagcaccaaggacggcgacaacgacaagtgcatctgcaagtgcagccagatgctgaccggcggctggtggttcgacgcctgcggccccagcaacctgaacggcatgtactacccccagagacagaacaccaacaagttcaacggcatcaagtggtactactggaagggcagcggctacagcctgaaggccaccaccatgatgatcagacccgccgacttctga

SEQ ID NO: 7399 - RNA, 1491 nt, synthetic construct
  misc_feature 1..1491: note = derived and/or modified sequence opt5 fromAngiopoietin-2__Homo_sapiens__AAB63190
  source 1..1491: mol_type = other RNA
atgtggcagatcgtgttctttaccctgagctgcgacctcgtcctggccgctgcctacaacaatttcagaaagtccatggattctattggcaaaaagcaatatcaggttcagcacgggagctgttcctacacatttcttctgcccgagatggacaactgccggtctagctcctctccttatgtgagcaatgcggtgcagcgcgatgctccgctcgaatacgacgattccgtccaaagacttcaggtgctggagaacatcatggaaaataacacgcagtggctgatgaaactcgagaattatattcaggacaacatgaagaaagaaatggttgagatccaacagaatgccgtgcagaaccagaccgccgtcatgattgagatcggaacaaatctgctgaaccaaaccgctgaacagacacggaagctcaccgatgtggaggcccaggttctgaatcaaacaacccgccttgaactgcagctcctggagcatagcctttctacgaacaagctggagaaacagatcctcgaccagacctccgaaattaataagctgcaagataaaaacagcttcctggagaagaaagtgctcgctatggaagacaagcacatcattcagctgcagtctatcaaggaggaaaaagatcagcttcaagtcctggtgtccaagcagaacagcattatcgaggagctcgagaaaaagattgtgacagccaccgtcaataactctgttctgcagaaacagcaacatgaccttatggagacagtgaataacctgctcaccatgatgtccacgagcaattccgcgaaggatcccacagtggccaaagaagaacagatctcttttagagactgtgctgaagtcttcaagagcggccacaccacaaacgggatctacaccctgacctttcctaattccacagaggagattaaggcctattgcgacatggaagctggaggcgggggatggacgatcattcagcggcgcgaggatggcagcgtggacttccagagaacctggaaagaatacaaggttggctttgggaacccctctggagagtactggctgggcaatgagttcgtgtcccaactcacaaaccagcagcggtatgtcctgaaaatccatcttaaggattgggaagggaatgaggcctacagcctgtatgaacacttttacctctctagcgaggaactgaactatcgcattcaccttaaaggactgaccggcacagcggggaagatctcctctatcagccaacctggaaatgacttctccaccaaggatggcgacaacgataaatgtatttgcaagtgtagccagatgctcacgggcgggtggtggtttgacgcctgcggaccctctaatctgaacggcatgtactatcctcagagacagaacacaaataaattcaacgggatcaagtggtactactggaaaggatccggctatagcctgaaggctaccaccatgatgattcggccggccgatttctga

SEQ ID NO: 7400 - RNA, 1491 nt, synthetic construct
  misc_feature 1..1491: note = derived and/or modified sequence opt6 fromAngiopoietin-2__Homo_sapiens__AAB63190
  source 1..1491: mol_type = other RNA
atgtggcaaatagtctttttcactctatcatgtgacctagtactagcagcagcatataacaattttagaaaatcaatggacagtataggaaaaaaacaataccaagtacaacacggttcctgctcctatacattcttactaccagaaatggacaattgcagaagctcaagttcaccatacgtatctaacgcagtacaaagagacgcaccattagaatacgacgactcagtacaacgactacaagtactagaaaacataatggaaaacaatacacaatggctaatgaaattagaaaattatatccaagacaacatgaaaaaagaaatggtagaaatacaacaaaacgcagtccaaaaccaaacagcagtaatgatagaaatcggaacaaacctactaaaccaaacagcagaacaaacaagaaaacttacagacgtagaagctcaagtattaaaccaaacaacaagactagaactacaactactagaacactcactaagtacaaataaactcgaaaaacaaatattagatcaaacaagcgaaataaataaattacaggataaaaactcattcctcgagaaaaaagtattagcaatggaagataaacacataatacaactacaatcaataaaagaagaaaaagaccaactccaagtattagtaagtaaacaaaatagcataatagaagaattagaaaaaaaaatagtaactgcaacagtaaacaactcagtactacaaaaacaacaacacgacctaatggaaacagtaaacaacttactaacaatgatgagcacatcaaactcagcaaaagacccaaccgtagcaaaagaagaacaaatctcattccgtgattgcgccgaagtattcaaatcaggccacacaacaaacggcatctatacattaacattcccaaactcaactgaagaaataaaagcatactgcgatatggaagccggaggaggcggatggaccataatacaaagaagagaagacggaagcgtagattttcaaaggacatggaaagaatacaaagtaggattcggtaacccaagtggagaatactggttaggaaacgaattcgtaagccaactaacaaaccaacaaaggtacgtactcaaaatacaccttaaagattgggaaggaaacgaagcatattccctatacgaacacttctacttaagctccgaagaactaaattatcgaatacatttaaaagggctaacaggcacagccggaaaaatatcaagtataagtcaaccaggaaacgacttctcaacaaaagacggagacaacgacaaatgcatatgcaaatgctcacaaatgctaaccggaggatggtggttcgacgcatgcggaccatcaaacctcaacggaatgtactatccccagagacaaaacacaaacaaatttaacggaataaaatggtattactggaaaggatcaggatacagtctcaaagctacaacaatgatgattagaccagcagatttctaa

SEQ ID NO: 7401 - protein, 809 aa, synthetic construct [sequence omitted]

SEQ ID NO: 7402 - RNA, 2430 nt, synthetic construct
  misc_feature 1..2430: note = Angiostatin__Homo_sapiens__AKG50977
  source 1..2430: mol_type = other RNA
atggaccataaagaggtagttcttctccttcttttatttctgaaatcaggtctcggggactctctggatgactacgtcaatactcagggagctttcctgttcagtttgtctcggaagcaggtggcagccaggagcgtggaagaatgtgcagccaagtgtgaggcggaaacaaacttcatttgcagggctttccagtatcacagtaaagatcagcagtgtgtggtgatggctgagaacagcaagacctcccccatcgctaggatgagagacgtggttctattcgagaagagaatctatctctccgagtgcaagactggaaatgggaagaactacagagggaccacgtccaaaacgaaaagtggtgtcatctgtcaaaaatggagtgtcagctctccgcacatacccaagtattcacctgaaaagtttcctttagcgggactggaggagaactactgcaggaacccagacaacgatgaaaagggaccctggtgttacaccactgacccagagacccgattcgactactgcgacatccctgagtgtgaagatgaatgcatgcactgcagtggagaacattatgagggcaaaatttccaagaccatgtcggggattgaatgccagtcttggggctctcagagcccacatgctcacggataccttccttccaaatttccaaacaagaatctgaagatgaattactgccgtaacccggatggggagccccgcccatggtgcttcaccacggatcccaacaaacgctgggaattctgtgacatcccgagatgcaccacacccccaccaacttccgggccaacgtatcagtgtctgaagggaagaggtgaaaactaccgagggacagtgtctgtcactgcatctgggcacacctgtcaacgctggagtgcgcagagcccccacaagcacaacaggacccccgaaaactttccctgcaaaaatctggaggagaactactgccgtaaccctgatggagaaacggctccgtggtgctacacaaccgacagcgaggtgaggtgggattactgcaagataccgtcctgtgggtcctccacgacatccacggagcatctggatgcccccgtgccacccgagcaaacccctgtcgcccaggactgctacagaggcaatggggagagttaccgaggcacgtcttccacaaccatcacgggaagaaaatgtcagtcctgggtatccatgacgccacatcggcatgagaagaccccaggaaacttcccaaatgctggcttgacaatgaactactgcaggaacccagacgctgataaaagcccttggtgctacaccactgatccaagagtgagatgggagtactgcaacctgaagaaatgctcagagacagaacagcaggtcacaaactttccagctattgcgcaggttcccagtgtagaggatctttcggaagactgcatgttcgggaatgggaaaaggtaccggggcaagagggccaccacggtggccggcgtcccctgccaggagtgggctgcccaggagccccacagacacagcatcttcactccagagacaaatccacgggcaggtctggagaaaaattactgccgtaatcctgacggcgacgacaacggtccctggtgctacacgacaaacccacaaaagctctttgactactgcgacgtccctcagtgtgtaacctcttcatttgattgcgggaagcccaaggtggagccaaagaagtgtcctgcgagggtggtaggtgggtgtgtgtccatcccacactcctggccctggcaaattagccttcgatacaggtacagagggcacttctgcggaggcactttaatatccccggagtgggtgctgactgctaagcactgcctggaaaagtcctcaagtccttcatcatacaaggtcattttgggtgcacacgaagagtaccaccttggagaaggagttcaggagatagacgtgtccaagctgttcaaggagccctctggggcggacatagccttgctcaagctgagcagccctgccgtcatcactgacaaggtaatcccggcttgtctgccaaccccgaactatgtggtcgccgaccggacagcgtgttacatcactggctggggagaaaccaaaggcacgtacggcgctggcttacttaaggaagcccggctgcccgtgattgagaacaaagtgtgtaatcgctacgagtatctgggcgggaaggtcagccccaacgagctgtgtgcggggcatctggctggaggcatcgacagctgccagggtgacagcggagggcctctggtgtgctttgagaaggacaaatacattttacaaggagtcacttcttggggtcttggctgtgcgctccccaataagcctggtgtgtatgtccgtgtttcaaggtttgttacttggattgaggaaataatgagaagaaattaa

SEQ ID NO: 7403 - RNA, 2430 nt, synthetic construct
  misc_feature 1..2430: note = derived and/or modified sequence opt1 fromAngiostatin__Homo_sapiens__AKG50977
  source 1..2430: mol_type = other RNA
atggaccacaaggaggtggtcctgctcctgctcctgttcctcaagagcggcctgggggactccctggacgactacgtgaacacccagggcgccttcctgttcagcctgtcccgcaagcaggtcgccgcgcggagcgtggaggagtgcgccgccaagtgcgaggccgagaccaacttcatctgccgcgccttccagtaccactccaaggaccagcagtgcgtggtgatggcggagaacagcaagacgtcccccatcgcccggatgcgcgacgtcgtcctcttcgagaagcggatctacctgagcgagtgcaagaccgggaacggcaagaactaccgcgggaccacctccaagaccaagagcggcgtgatctgccagaagtggtccgtgagctccccgcacatccccaagtacagccccgagaagttccccctggccggcctcgaggagaactactgccggaacccggacaacgacgagaaggggccctggtgctacaccaccgaccccgagacccgcttcgactactgcgacatccccgagtgcgaggacgagtgcatgcactgctccggcgagcactacgaggggaagatcagcaagacgatgtccggcatcgagtgccagagctgggggtcccagagcccgcacgcccacggctacctgcccagcaagttccccaacaagaacctgaagatgaactactgccggaaccccgacggcgagccgcgcccctggtgcttcaccaccgaccccaacaagcggtgggagttctgcgacatcccccgctgcaccacgccgccgcccacctccgggcccacctaccagtgcctcaagggccgcggggagaactaccggggcaccgtgagcgtgacggcgtccggccacacgtgccagcggtggagcgcccagagcccccacaagcacaaccgcacccccgagaacttcccctgcaagaacctggaggagaactactgccggaaccccgacggggagaccgccccgtggtgctacacgaccgactccgaggtccgctgggactactgcaagatcccctcctgcggcagctccaccaccagcacggagcacctggacgcccccgtgcccccggagcagacccccgtggcccaggactgctaccgggggaacggcgagtcctaccgcgggaccagctccaccacgatcaccggccggaagtgccagagctgggtctccatgacgccccaccgccacgagaagaccccgggcaacttccccaacgcggggctcaccatgaactactgccgcaaccccgacgccgacaagagcccctggtgctacaccaccgacccgcgggtgcgctgggagtactgcaacctgaagaagtgctccgagaccgagcagcaggtcacgaacttccccgccatcgcccaggtgcccagcgtggaggacctgtccgaggactgcatgttcggcaacgggaagcggtaccgcggcaagcgggccaccaccgtggcgggggtcccctgccaggagtgggccgcccaggagccgcaccgccacagcatcttcacccccgagaccaacccccgggccggcctcgagaagaactactgccgcaaccccgacggcgacgacaacgggccgtggtgctacacgaccaacccccagaagctgttcgactactgcgacgtgccccagtgcgtgaccagctccttcgactgcggcaagcccaaggtcgagccgaagaagtgccccgcccgggtggtcgggggctgcgtgagcatcccccactcctggccctggcagatcagcctgcgctaccggtaccgcgggcacttctgcggcggcaccctcatctccccggagtgggtgctgacggcgaagcactgcctggagaagtccagcagcccctccagctacaaggtcatcctcggggcccacgaggagtaccacctgggcgagggggtgcaggagatcgacgtgtccaagctgttcaaggagcccagcggcgccgacatcgccctcctgaagctgtccagccccgccgtcatcaccgacaaggtgatcccggcgtgcctccccacccccaactacgtggtcgccgaccggaccgcctgctacatcacgggctggggcgagaccaaggggacctacggggccggcctgctgaaggaggcgcgcctcccggtgatcgagaacaaggtgtgcaaccggtacgagtacctcgggggcaaggtctcccccaacgagctgtgcgccggccacctggccgggggcatcgacagctgccagggggactccggcgggcccctggtgtgcttcgagaaggacaagtacatcctgcagggcgtgaccagctggggcctcgggtgcgccctgcccaacaagccgggcgtctacgtgcgcgtgagccggttcgtcacgtggatcgaggagatcatgcgccggaactga

SEQ ID NO: 7404 - RNA, 2430 nt, synthetic construct
  misc_feature 1..2430: note = derived and/or modified sequence opt2 fromAngiostatin__Homo_sapiens__AKG50977
  source 1..2430: mol_type = other RNA
atggaccacaaggaggtcgtcctcctcctcctcctcttcctcaagtccggcctcggcgactccctcgacgactacgtcaacacccagggcgccttcctcttctccctctcccgcaagcaggtcgccgcccgctccgtcgaggagtgcgccgccaagtgcgaggccgagaccaacttcatctgccgcgccttccagtaccactccaaggaccagcagtgcgtcgtcatggccgagaactccaagacctcccccatcgcccgcatgcgcgacgtcgtcctcttcgagaagcgcatctacctctccgagtgcaagaccggcaacggcaagaactaccgcggcaccacctccaagaccaagtccggcgtcatctgccagaagtggtccgtctcctccccccacatccccaagtactcccccgagaagttccccctcgccggcctcgaggagaactactgccgcaaccccgacaacgacgagaagggcccctggtgctacaccaccgaccccgagacccgcttcgactactgcgacatccccgagtgcgaggacgagtgcatgcactgctccggcgagcactacgagggcaagatctccaagaccatgtccggcatcgagtgccagtcctggggctcccagtccccccacgcccacggctacctcccctccaagttccccaacaagaacctcaagatgaactactgccgcaaccccgacggcgagccccgcccctggtgcttcaccaccgaccccaacaagcgctgggagttctgcgacatcccccgctgcaccacccccccccccacctccggccccacctaccagtgcctcaagggccgcggcgagaactaccgcggcaccgtctccgtcaccgcctccggccacacctgccagcgctggtccgcccagtccccccacaagcacaaccgcacccccgagaacttcccctgcaagaacctcgaggagaactactgccgcaaccccgacggcgagaccgccccctggtgctacaccaccgactccgaggtccgctgggactactgcaagatcccctcctgcggctcctccaccacctccaccgagcacctcgacgcccccgtcccccccgagcagacccccgtcgcccaggactgctaccgcggcaacggcgagtcctaccgcggcacctcctccaccaccatcaccggccgcaagtgccagtcctgggtctccatgaccccccaccgccacgagaagacccccggcaacttccccaacgccggcctcaccatgaactactgccgcaaccccgacgccgacaagtccccctggtgctacaccaccgacccccgcgtccgctgggagtactgcaacctcaagaagtgctccgagaccgagcagcaggtcaccaacttccccgccatcgcccaggtcccctccgtcgaggacctctccgaggactgcatgttcggcaacggcaagcgctaccgcggcaagcgcgccaccaccgtcgccggcgtcccctgccaggagtgggccgcccaggagccccaccgccactccatcttcacccccgagaccaacccccgcgccggcctcgagaagaactactgccgcaaccccgacggcgacgacaacggcccctggtgctacaccaccaacccccagaagctcttcgactactgcgacgtcccccagtgcgtcacctcctccttcgactgcggcaagcccaaggtcgagcccaagaagtgccccgcccgcgtcgtcggcggctgcgtctccatcccccactcctggccctggcagatctccctccgctaccgctaccgcggccacttctgcggcggcaccctcatctcccccgagtgggtcctcaccgccaagcactgcctcgagaagtcctcctccccctcctcctacaaggtcatcctcggcgcccacgaggagtaccacctcggcgagggcgtccaggagatcgacgtctccaagctcttcaaggagccctccggcgccgacatcgccctcctcaagctctcctcccccgccgtcatcaccgacaaggtcatccccgcctgcctccccacccccaactacgtcgtcgccgaccgcaccgcctgctacatcaccggctggggcgagaccaagggcacctacggcgccggcctcctcaaggaggcccgcctccccgtcatcgagaacaaggtctgcaaccgctacgagtacctcggcggcaaggtctcccccaacgagctctgcgccggccacctcgccggcggcatcgactcctgccagggcgactccggcggccccctcgtctgcttcgagaaggacaagtacatcctccagggcgtcacctcctggggcctcggctgcgccctccccaacaagcccggcgtctacgtccgcgtctcccgcttcgtcacctggatcgaggagatcatgcgccgcaactga

SEQ ID NO: 7405 - RNA, 2430 nt, synthetic construct
  misc_feature 1..2430: note = derived and/or modified sequence opt3 fromAngiostatin__Homo_sapiens__AKG50977
  source 1..2430: mol_type = other RNA
atggaccacaaggaggtggtcctgctccttctgttgttcttaaaaagcggcctgggggattccctagacgattacgttaacacccagggagcctttctcttctctctgtcaagaaagcaagtggctgcaaggagtgtagaagagtgcgccgcgaaatgtgaagctgagacaaattttatctgccgggccttccagtatcatagcaaggaccagcagtgtgtggtcatggcagaaaactccaaaacttctcccattgcccgcatgcgagatgtggttctttttgagaagcgtatatacctgtcggagtgcaagacgggtaatggcaaaaactatagagggaccacatcaaagactaaaagcggagtgatctgtcaaaagtggagtgtctcctctcctcacattccaaaatacagcccggaaaagttccccttggctggcctcgaggaaaattattgcaggaaccctgacaatgatgagaagggtccatggtgttacaccacagaccccgagacccggtttgattattgcgacatccctgaatgtgaggatgaatgcatgcattgttccggggagcactacgaaggaaaaatttcaaagactatgagtggcatcgagtgccagagctggggctctcagtccccacatgcacacgggtacctgccctcaaaattccctaacaagaatctgaaaatgaactattgccgcaatccagacggagagccgagaccctggtgttttacaaccgatcctaacaagaggtgggagttctgcgacataccacggtgtacgactccccctccaaccagcggtcccacataccagtgcctcaaaggccgcggggaaaattatcgaggaactgtgagtgtaaccgcctctggccacacatgtcaaagatggtccgctcagagcccgcataagcacaacaggacccctgaaaattttccctgcaagaacttagaggaaaactactgtcggaatccagacggtgagacggccccttggtgctatactacagattcggaggttcgttgggactactgtaaaatcccctcttgcgggtcctcaaccacaagtactgaacatctggatgcgccagtgccccctgagcagaccccagtcgcacaggactgttatcgcggaaacggcgaaagctacagaggcacgtcctctaccacaattactgggaggaagtgccaaagctgggtgtcaatgaccccgcaccggcacgagaaaacacccggaaatttccctaacgccggtcttactatgaattactgccgaaacccagatgctgacaagagtccctggtgttataccacagatcctcgcgtgagatgggaatactgcaatttgaaaaagtgttccgagaccgagcagcaggtcactaactttccagccatcgcacaagttcccagcgtggaagacctgtctgaggattgcatgttcggcaatgggaagaggtatcggggaaaacgcgctacgacagtagccggcgtgccgtgtcaggaatgggcggcccaggagcctcatagacactcaattttcaccccagagactaaccccagggcaggtctagaaaagaattactgccgtaaccctgacggggatgacaatggcccctggtgttataccacaaacccacagaaactctttgactactgcgatgtccctcaatgtgtgaccagtagcttcgactgcggaaagcccaaagttgagccaaagaagtgtccggctcgggtggtcggcgggtgcgtgtccatccctcattcttggccctggcagatatcgctgcgatatagatacaggggacacttttgcggtggcactcttattagcccagaatgggtactgacagccaaacattgtttggagaagtcctcaagtccctctagctacaaagttatcctcggggctcacgaagagtatcacctgggagagggcgtgcaggaaattgatgtctccaagttattcaaagagccttcaggtgccgacatcgcactgctcaaacttagctctccagccgtgatcacggataaggtcattcccgcttgcctgcctaccccgaattacgtggttgcggaccgcactgcatgttatataacagggtggggcgaaaccaagggaacatacggcgccgggttgctaaaggaggctcggctgccagtgatcgaaaacaaagtatgcaacagatatgagtacctcggaggtaaggtctcccccaatgagctgtgtgccggccatcttgcagggggaattgatagttgccagggcgacagcggtgggcctctggtgtgttttgaaaaagataagtatatcttgcaaggcgttacttcttggggactcggctgcgccctgccaaacaaacccggggtgtacgtcagggtgtcccgcttcgtaacctggatagaggaaattatgcgacggaattga

SEQ ID NO: 7406 - RNA, 2430 nt, synthetic construct
  misc_feature 1..2430: note = derived and/or modified sequence opt4 fromAngiostatin__Homo_sapiens__AKG50977
  source 1..2430: mol_type = other RNA
atggaccacaaggaggtggtgctgctgctgctgctgttcctgaagagcggcctgggcgacagcctggacgactacgtgaacacccagggcgccttcctgttcagcctgagcagaaagcaggtggccgccagaagcgtggaggagtgcgccgccaagtgcgaggccgagaccaacttcatctgcagagccttccagtaccacagcaaggaccagcagtgcgtggtgatggccgagaacagcaagaccagccccatcgccagaatgagagacgtggtgctgttcgagaagagaatctacctgagcgagtgcaagaccggcaacggcaagaactacagaggcaccaccagcaagaccaagagcggcgtgatctgccagaagtggagcgtgagcagcccccacatccccaagtacagccccgagaagttccccctggccggcctggaggagaactactgcagaaaccccgacaacgacgagaagggcccctggtgctacaccaccgaccccgagaccagattcgactactgcgacatccccgagtgcgaggacgagtgcatgcactgcagcggcgagcactacgagggcaagatcagcaagaccatgagcggcatcgagtgccagagctggggcagccagagcccccacgcccacggctacctgcccagcaagttccccaacaagaacctgaagatgaactactgcagaaaccccgacggcgagcccagaccctggtgcttcaccaccgaccccaacaagagatgggagttctgcgacatccccagatgcaccacccccccccccaccagcggccccacctaccagtgcctgaagggcagaggcgagaactacagaggcaccgtgagcgtgaccgccagcggccacacctgccagagatggagcgcccagagcccccacaagcacaacagaacccccgagaacttcccctgcaagaacctggaggagaactactgcagaaaccccgacggcgagaccgccccctggtgctacaccaccgacagcgaggtgagatgggactactgcaagatccccagctgcggcagcagcaccaccagcaccgagcacctggacgcccccgtgccccccgagcagacccccgtggcccaggactgctacagaggcaacggcgagagctacagaggcaccagcagcaccaccatcaccggcagaaagtgccagagctgggtgagcatgaccccccacagacacgagaagacccccggcaacttccccaacgccggcctgaccatgaactactgcagaaaccccgacgccgacaagagcccctggtgctacaccaccgaccccagagtgagatgggagtactgcaacctgaagaagtgcagcgagaccgagcagcaggtgaccaacttccccgccatcgcccaggtgcccagcgtggaggacctgagcgaggactgcatgttcggcaacggcaagagatacagaggcaagagagccaccaccgtggccggcgtgccctgccaggagtgggccgcccaggagccccacagacacagcatcttcacccccgagaccaaccccagagccggcctggagaagaactactgcagaaaccccgacggcgacgacaacggcccctggtgctacaccaccaacccccagaagctgttcgactactgcgacgtgccccagtgcgtgaccagcagcttcgactgcggcaagcccaaggtggagcccaagaagtgccccgccagagtggtgggcggctgcgtgagcatcccccacagctggccctggcagatcagcctgagatacagatacagaggccacttctgcggcggcaccctgatcagccccgagtgggtgctgaccgccaagcactgcctggagaagagcagcagccccagcagctacaaggtgatcctgggcgcccacgaggagtaccacctgggcgagggcgtgcaggagatcgacgtgagcaagctgttcaaggagcccagcggcgccgacatcgccctgctgaagctgagcagccccgccgtgatcaccgacaaggtgatccccgcctgcctgcccacccccaactacgtggtggccgacagaaccgcctgctacatcaccggctggggcgagaccaagggcacctacggcgccggcctgctgaaggaggccagactgcccgtgatcgagaacaaggtgtgcaacagatacgagtacctgggcggcaaggtgagccccaacgagctgtgcgccggccacctggccggcggcatcgacagctgccagggcgacagcggcggccccctggtgtgcttcgagaaggacaagtacatcctgcagggcgtgaccagctggggcctgggctgcgccctgcccaacaagcccggcgtgtacgtgagagtgagcagattcgtgacctggatcgaggagatcatgagaagaaactga

SEQ ID NO: 7407 - RNA, 2430 nt, synthetic construct
  misc_feature 1..2430: note = derived and/or modified sequence opt5 fromAngiostatin__Homo_sapiens__AKG50977
  source 1..2430: mol_type = other RNA
atggaccacaaggaggtggtcctgctcctgcttctgttcctcaaaagcggcctgggggattcccttgacgattacgttaacacccagggagcctttctgttctctctcagcagaaagcaagtggctgcccggtccgtggaagagtgcgcggctaaatgtgaagccgagacaaattttatctgccgcgccttccagtatcattctaaggaccagcagtgtgtcgtgatggctgaaaacagcaaaacgtcccccattgccagaatgcgggatgttgtgctgtttgagaagcgcatctacctgtctgagtgcaagaccggcaatgggaaaaactatagaggaacaaccagcaagacaaaatccggcgtcatttgtcaaaagtggagcgtgtcttcccctcacatcccgaaatacagccccgaaaagttccctctcgctgggctggaggaaaattattgccggaaccccgacaatgatgagaagggaccttggtgttacaccacagaccccgagacccgctttgattattgcgacattcctgaatgtgaggatgaatgcatgcattgttctggcgagcactacgaaggcaaaatctccaagacgatgagcgggatcgagtgccagtcttggggatcccagagcccgcatgcccacggctaccttccctccaaattccctaacaagaatctgaaaatgaactattgcagaaatcccgacggggagcctcggccctggtgttttaccacagatccgaacaagcgctgggagttctgcgacattcctagatgtaccacaccccctcccacctctggacccacgtaccagtgcctcaaaggccgcggggaaaattatcggggaacagttagcgtgaccgcgtccggccacacatgtcaaagatggagcgcccagtctcctcataagcacaaccggaccccggaaaattttccctgcaagaacctggaggaaaactactgtcgcaatcctgacggcgagaccgctccctggtgctatacaacggattccgaggtcagatgggactactgtaaaatccctagctgcgggtctagcaccacatccaccgaacatcttgatgcccccgtgccgcctgagcagacacccgtggctcaggactgttatcggggaaacggcgaatcttacagagggaccagctccacgacaattaccggacgcaagtgccaaagctgggtctctatgacccctcaccggcacgagaaaacacccggcaatttccctaacgccgggctgaccatgaattactgcagaaaccccgatgcggacaagtccccgtggtgttatacaacggatcctcgcgttcggtgggaatactgcaatctcaaaaagtgtagcgagaccgagcaacaggtgacaaactttcccgccatcgctcaggtgccctctgtcgaagacctgtccgaggattgcatgttcggaaatggcaagagatatcgcggcaaacgggccaccacagtggctggggttccttgtcaggaatgggccgcccaggagccgcatagacacagcattttcacccccgagacgaaccctcgcgctggactggaaaagaattactgccggaaccccgacggcgatgacaatgggccttggtgttataccacaaacccccagaaactctttgactactgcgatgtgcctcaatgtgtcacctcctctttcgactgcggaaagcccaaagtggagccgaagaagtgtcctgcgagagttgtgggcgggtgcgtcagcatcccccattcctggccttggcagatttctctgcgctatcggtacagaggccacttttgcggaggcacacttatcagccccgaatgggtgctgaccgccaaacattgtctcgagaagtccagctctccgtccagctacaaagtcatcctgggggctcacgaagagtatcaccttggagagggcgtgcaggaaattgatgtttctaagctgttcaaagagccttccggggccgacatcgccctcctgaagctgagctctcccgctgtgattacggataaggtcatccctgcctgcctccccacacccaattacgtggttgcggaccggaccgcttgttatattacaggatggggcgaaaccaaagggacctacggcgccggactgcttaaggaggcccgcctgcctgtgatcgaaaacaaagtctgcaacagatatgagtacctcggcgggaaggtgagcccgaatgagctgtgtgctggacatcttgccggcgggatcgattcctgccagggagacagcggcgggcccctggtgtgttttgaaaaagataagtatattctccaaggcgttacatcttggggactgggctgcgctctgcctaacaaacccggggtctacgtgcgggtgtccagattcgtcacgtggatcgaggaaattatgcgccggaattga

SEQ ID NO: 7408 - RNA, 2430 nt, synthetic construct
  misc_feature 1..2430: note = derived and/or modified sequence opt6 fromAngiostatin__Homo_sapiens__AKG50977
  source 1..2430: mol_type = other RNA
atggatcataaagaggtagtattactattgttactatttttaaaatccggactaggagacagtctcgacgactatgtaaatacccagggtgcatttctattttcattatcaagaaaacaagtagcagcacgaagcgtggaagaatgcgcagctaaatgtgaggctgaaacaaattttatatgtagagcattccaatatcatagcaaagatcaacaatgcgttgtaatggccgaaaactcaaaaacaagtcctatcgcgagaatgagagatgtagtacttttcgaaaaaagaatttatcttagcgaatgtaaaaccggaaatggcaaaaattacagaggaacaacatcaaaaaccaaaagtggtgttatctgtcaaaaatggtctgtatctagcccacatattccaaaatattcacctgaaaaattcccgttagcaggtctagaagagaattattgtagaaatcctgataacgatgaaaaaggtccatggtgctacacgacagatcccgaaactagattcgattactgtgatatacctgaatgcgaagatgagtgtatgcactgctcaggtgaacattacgaaggcaaaatttcaaaaacaatgtcaggtatagaatgtcaatcatggggatctcaatcaccacacgcacatggttatttacccagtaaattcccaaataaaaatctaaaaatgaactattgtagaaacccggacggtgaacccagaccatggtgttttactacagatccaaacaaaagatgggaattttgtgatataccaagatgtacaacacctccccctacatcaggacctacatatcaatgtttaaaagggagaggagaaaactatagaggtacagtctcagtaacagcaagtggacatacatgtcaaagatggtcagcacaaagtccccataaacataatagaactcccgaaaatttcccttgcaaaaatctagaagaaaactattgcagaaacccagacggagaaacagcaccgtggtgctacactacagacagtgaagtaagatgggattactgtaagataccttcatgtggaagctcaactacaagtacagaacacctagacgcacctgttccacctgaacaaactccggtcgcacaagattgttatcgcggtaatggagaatcatacaggggtacaagctcaactaccataacaggcagaaaatgccaaagttgggtaagtatgactcctcatcgacacgaaaaaaccccaggaaattttccaaacgcaggactgacaatgaactactgcagaaacccagatgccgataaatccccatggtgttacacaacagatccgagagtacgatgggagtattgtaaccttaaaaaatgtagtgaaacagaacaacaagtaacaaatttcccagcaattgcacaagttccttctgtagaagacctatcagaagattgtatgtttggcaacggaaaaagatatcgcggtaaaagagcaacaacagtagcaggcgtaccatgtcaagaatgggctgctcaagaaccacaccgacatagtatattcacgccagaaacaaatcccagagctggcttagagaaaaattattgtagaaatccagatggagacgataatgggccctggtgttatacaacaaatcctcaaaaacttttcgattactgcgatgtaccacaatgcgttacatcatcatttgactgtggaaaaccaaaagtggaacctaagaaatgtccagcaagagtagtaggaggctgtgtatcgataccacactcatggccatggcagattagtctaagatataggtacagaggtcatttctgtggaggaaccctaattagtccagaatgggtcctaacagcaaaacattgtctggaaaaatctagcagtccctctagctacaaagtaatactcggtgcccacgaagaatatcacttaggagaaggtgtccaagaaattgatgtatcaaaactattcaaagaaccaagcggcgcagatatagcattattaaaactaagtagccctgcagtcataaccgataaagtcatacctgcatgtctaccaaccccaaattatgtagtagcagatagaactgcttgttacataacaggctggggtgaaaccaaaggaacatatggagccggactactaaaagaagccaggttaccagtaattgaaaataaagtatgtaacagatatgaatatctaggaggaaaagtatcaccaaacgaattatgtgcaggacacctagcgggaggaattgattcatgccaaggtgattcaggtggaccattagtatgtttcgaaaaagataaatacatattacaaggagtaacatcatggggtctgggatgcgcattaccaaataagccaggtgtttatgtcagagtctctcgctttgtaacttggatagaagaaataatgaggagaaattaa

SEQ ID NO: 7409 - protein, 810 aa, synthetic construct
  REGION 1..810: note = Angiostatin__Homo_sapiens__P00747
MEHKEVVLLLLLFLKSGQGEPLDDYVNTQGASLFSVTKKQLGAGSIEECAAKCEEDEEFTCRAFQYHSKEQQCVIMAENRKSSIIIRMRDVVLFEKKVYLSECKTGNGKNYRGTMSKTKNGITCQKWSSTSPHRPRFSPATHPSEGLEENYCRNPDNDPQGPWCYTTDPEKRYDYCDILECEEECMHCSGENYDGKISKTMSGLECQAWDSQSPHAHGYIPSKFPNKNLKKNYCRNPDRELRPWCFTTDPNKRWELCDIPRCTTPPPSSGPTYQCLKGTGENYRGNVAVTVSGHTCQHWSAQTPHTHNRTPENFPCKNLDENYCRNPDGKRAPWCHTTNSQVRWEYCKIPSCDSSPVSTEQLAPTAPPELTPVVQDCYHGDGQSYRGTSSTTTTGKKCQSWSSMTPHRHQKTPENYPNAGLTMNYCRNPDADKGPWCFTTDPSVRWEYCNLKKCSGTEASVVAPPPVVLLPDVETPSEEDCMFGNGKGYRGKRATTVTGTPCQDWAAQEPHRHSIFTPETNPRAGLEKNYCRNPDGDVGGPWCYTTNPRKLYDYCDVPQCAAPSFDCGKPQVEPKKCPGRVVGGCVAHPHSWPWQVSLRTRFGMHFCGGTLISPEWVLTAAHCLEKSPRPSSYKVILGAHQEVNLEPHVQEIEVSRLFLEPTRKDIALLKLSSPAVITDKVIPACLPSPNYVVADRTECFITGWGETQGTFGAGLLKEAQLPVIENKVCNRYEFLNGRVQSTELCAGHLAGGTDSCQGDSGGPLVCFEKDKYILQGVTSWGLGCARPNKPGVYVRVSRFVTWIEGVMRNN

SEQ ID NO: 7410 - RNA, 2433 nt, synthetic construct
  misc_feature 1..2433: note = Angiostatin__Homo_sapiens__AAN85555
  source 1..2433: mol_type = other RNA
atggaacataaggaagtggttcttctacttcttttatttctgaaatcaggtcaaggagagcctctggatgactatgtgaatacccagggggcttcactgttcagtgtcactaagaagcagctgggagcaggaagtatagaagaatgtgcagcaaaatgtgaggaggacgaagaattcacctgcagggcattccaatatcacagtaaagagcaacaatgtgtgataatggctgaaaacaggaagtcctccataatcattaggatgagagatgtagttttatttgaaaagaaagtgtatctctcagagtgcaagactgggaatggaaagaactacagagggacgatgtccaaaacaaaaaatggcatcacctgtcaaaaatggagttccacttctccccacagacctagattctcacctgctacacacccctcagagggactggaggagaactactgcaggaatccagacaacgatccgcaggggccctggtgctatactactgatccagaaaagagatatgactactgcgacattcttgagtgtgaagaggaatgtatgcattgcagtggagaaaactatgacggcaaaatttccaagaccatgtctggactggaatgccaggcctgggactctcagagcccacacgctcatggatacattccttccaaatttccaaacaagaacctgaagaagaattactgtcgtaaccccgatagggagctgcggccttggtgtttcaccaccgaccccaacaagcgctgggaactttgcgacatcccccgctgcacaacacctccaccatcttctggtcccacctaccagtgtctgaagggaacaggtgaaaactatcgcgggaatgtggctgttaccgtgtccgggcacacctgtcagcactggagtgcacagacccctcacacacataacaggacaccagaaaacttcccctgcaaaaatttggatgaaaactactgccgcaatcctgacggaaaaagggccccatggtgccatacaaccaacagccaagtgcggtgggagtactgtaagataccgtcctgtgactcctccccagtatccacggaacaattggctcccacagcaccacctgagctaacccctgtggtccaggactgctaccatggtgatggacagagctaccgaggcacatcctccaccaccaccacaggaaagaagtgtcagtcttggtcatctatgacaccacaccggcaccagaagaccccagaaaactacccaaatgctggcctgacaatgaactactgcaggaatccagatgccgataaaggcccctggtgttttaccacagaccccagcgtcaggtgggagtactgcaacctgaaaaaatgctcaggaacagaagcgagtgttgtagcacctccgcctgttgtcctgcttccagatgtagagactccttccgaagaagactgtatgtttgggaatgggaaaggataccgaggcaagagggcgaccactgttactgggacgccatgccaggactgggctgcccaggagccccatagacacagcattttcactccagagacaaatccacgggcgggtctggaaaaaaattactgccgtaaccctgatggtgatgtaggtggtccctggtgctacacgacaaatccaagaaaactttacgactactgtgatgtccctcagtgtgcggccccttcatttgattgtgggaagcctcaagtggagccgaagaaatgtcctggaagggttgtaggggggtgtgtggcccacccacattcctggccctggcaagtcagtcttagaacaaggtttggaatgcacttctgtggaggcaccttgatatccccagagtgggtgttgactgctgcccactgcttggagaagtccccaaggccttcatcctacaaggtcatcctgggtgcacaccaagaagtgaatctcgaaccgcatgttcaggaaatagaagtgtctaggctgttcttggagcccacacgaaaagatattgccttgctaaagctaagcagtcctgccgtcatcactgacaaagtaatcccagcttgtctgccatccccaaattatgtggtcgctgaccggaccgaatgtttcatcactggctggggagaaacccaaggtacttttggagctggccttctcaaggaagcccagctccctgtgattgagaataaagtgtgcaatcgctatgagtttctgaatggaagagtccaatccaccgaactctgtgctgggcatttggccggaggcactgacagttgccagggtgacagtggagggcctctggtttgcttcgagaaggacaaatacattttacaaggagtcacttcttggggtcttggctgtgcacgccccaataagcctggtgtctatgttcgtgtttcaaggtttgttacttggattgagggagtgatgagaaataattaa

SEQ ID NO: 7411 - RNA, 2433 nt, synthetic construct
  misc_feature 1..2433: note = derived and/or modified sequence opt1 fromAngiostatin__Homo_sapiens__AAN85555
  source 1..2433: mol_type = other RNA
atggagcacaaggaggtggtcctgctcctgctgctgttcctcaagagcggccagggggagcccctggacgactacgtgaacacccagggcgcctccctcttcagcgtgaccaagaagcagctgggggccggctccatcgaggagtgcgcggccaagtgcgaggaggacgaggagttcacgtgccgcgccttccagtaccacagcaaggagcagcagtgcgtcatcatggccgagaaccggaagtccagcatcatcatccgcatgcgggacgtggtgctgttcgagaagaaggtctacctctccgagtgcaagaccgggaacggcaagaactaccgcggcaccatgagcaagaccaagaacgggatcacgtgccagaagtggtccagcacctccccgcaccggccccgcttcagccccgccacccacccctccgagggcctggaggagaactactgccggaacccggacaacgacccccaggggccctggtgctacaccacggaccccgagaagcgctacgactactgcgacatcctggagtgcgaggaggagtgcatgcactgcagcggcgagaactacgacgggaagatctccaagaccatgagcggcctcgagtgccaggcgtgggactcccagagcccgcacgcccacggctacatcccctccaagttccccaacaagaacctgaagaagaactactgccggaaccccgaccgcgagctgcggccgtggtgcttcaccaccgaccccaacaagcgctgggagctctgcgacatcccccggtgcacgacgcccccgcccagcagcgggcccacctaccagtgcctcaagggcaccggggagaactaccgcggcaacgtggccgtgaccgtctccggccacacgtgccagcactggagcgcccagacgccccacacccacaaccggaccccggagaacttcccctgcaagaacctggacgagaactactgccgcaaccccgacgggaagcgggcgccctggtgccacaccaccaactcccaggtgcgctgggagtactgcaagatcccgagctgcgactccagccccgtgtccaccgagcagctggcccccaccgcgcccccggagctgacccccgtcgtgcaggactgctaccacggcgacgggcagagctaccggggcacctccagcaccacgaccaccgggaagaagtgccagtcctggagctccatgacgccccaccgccaccagaagaccccggagaactaccccaacgccggcctgaccatgaactactgccggaaccccgacgccgacaagggcccctggtgcttcaccaccgacccgagcgtgcgctgggagtactgcaacctcaagaagtgctccgggacggaggccagcgtcgtggccccgccgcccgtggtcctgctgcccgacgtggagaccccctccgaggaggactgcatgttcggcaacgggaagggctaccgcgggaagcgggccaccaccgtgaccggcacgccctgccaggactgggccgcccaggagccccaccgccacagcatcttcacccccgagaccaacccccgggcgggcctcgagaagaactactgccgcaaccccgacggggacgtcggcgggccctggtgctacaccacgaacccgcggaagctgtacgactactgcgacgtgccccagtgcgccgccccctccttcgactgcggcaagccccaggtggagccgaagaagtgccccgggcgcgtcgtgggcggctgcgtcgcccacccccacagctggccctggcaggtcagcctgcggacccgcttcgggatgcacttctgcggcgggaccctcatctccccggagtgggtgctgaccgccgcgcactgcctggagaagtccccgcggcccagcagctacaaggtgatcctcggcgcccaccaggaggtgaacctggagccccacgtgcaggagatcgaggtctcccgcctgttcctcgagcccacgcggaaggacatcgccctgctgaagctcagctcccccgccgtgatcaccgacaaggtgatccccgcctgcctgccgagccccaactacgtcgtggcggaccgcaccgagtgcttcatcaccggctggggcgagacgcaggggaccttcggggccggcctgctcaaggaggcccagctgcccgtgatcgagaacaaggtctgcaaccggtacgagttcctgaacgggcgcgtgcagtccaccgagctctgcgccggccacctggcgggcgggaccgacagctgccagggcgactccgggggccccctggtgtgcttcgagaaggacaagtacatcctccagggggtcacgagctggggcctgggctgcgcccggccgaacaagcccggggtgtacgtgcgcgtctcccggttcgtgacctggatcgagggcgtgatgcgcaacaactga

SEQ ID NO: 7412 - RNA, 2433 nt, synthetic construct
  misc_feature 1..2433: note = derived and/or modified sequence opt2 fromAngiostatin__Homo_sapiens__AAN85555
  source 1..2433: mol_type = other RNA
atggagcacaaggaggtcgtcctcctcctcctcctcttcctcaagtccggccagggcgagcccctcgacgactacgtcaacacccagggcgcctccctcttctccgtcaccaagaagcagctcggcgccggctccatcgaggagtgcgccgccaagtgcgaggaggacgaggagttcacctgccgcgccttccagtaccactccaaggagcagcagtgcgtcatcatggccgagaaccgcaagtcctccatcatcatccgcatgcgcgacgtcgtcctcttcgagaagaaggtctacctctccgagtgcaagaccggcaacggcaagaactaccgcggcaccatgtccaagaccaagaacggcatcacctgccagaagtggtcctccacctccccccaccgcccccgcttctcccccgccacccacccctccgagggcctcgaggagaactactgccgcaaccccgacaacgacccccagggcccctggtgctacaccaccgaccccgagaagcgctacgactactgcgacatcctcgagtgcgaggaggagtgcatgcactgctccggcgagaactacgacggcaagatctccaagaccatgtccggcctcgagtgccaggcctgggactcccagtccccccacgcccacggctacatcccctccaagttccccaacaagaacctcaagaagaactactgccgcaaccccgaccgcgagctccgcccctggtgcttcaccaccgaccccaacaagcgctgggagctctgcgacatcccccgctgcaccaccccccccccctcctccggccccacctaccagtgcctcaagggcaccggcgagaactaccgcggcaacgtcgccgtcaccgtctccggccacacctgccagcactggtccgcccagaccccccacacccacaaccgcacccccgagaacttcccctgcaagaacctcgacgagaactactgccgcaaccccgacggcaagcgcgccccctggtgccacaccaccaactcccaggtccgctgggagtactgcaagatcccctcctgcgactcctcccccgtctccaccgagcagctcgcccccaccgccccccccgagctcacccccgtcgtccaggactgctaccacggcgacggccagtcctaccgcggcacctcctccaccaccaccaccggcaagaagtgccagtcctggtcctccatgaccccccaccgccaccagaagacccccgagaactaccccaacgccggcctcaccatgaactactgccgcaaccccgacgccgacaagggcccctggtgcttcaccaccgacccctccgtccgctgggagtactgcaacctcaagaagtgctccggcaccgaggcctccgtcgtcgcccccccccccgtcgtcctcctccccgacgtcgagaccccctccgaggaggactgcatgttcggcaacggcaagggctaccgcggcaagcgcgccaccaccgtcaccggcaccccctgccaggactgggccgcccaggagccccaccgccactccatcttcacccccgagaccaacccccgcgccggcctcgagaagaactactgccgcaaccccgacggcgacgtcggcggcccctggtgctacaccaccaacccccgcaagctctacgactactgcgacgtcccccagtgcgccgccccctccttcgactgcggcaagccccaggtcgagcccaagaagtgccccggccgcgtcgtcggcggctgcgtcgcccacccccactcctggccctggcaggtctccctccgcacccgcttcggcatgcacttctgcggcggcaccctcatctcccccgagtgggtcctcaccgccgcccactgcctcgagaagtccccccgcccctcctcctacaaggtcatcctcggcgcccaccaggaggtcaacctcgagccccacgtccaggagatcgaggtctcccgcctcttcctcgagcccacccgcaaggacatcgccctcctcaagctctcctcccccgccgtcatcaccgacaaggtcatccccgcctgcctcccctcccccaactacgtcgtcgccgaccgcaccgagtgcttcatcaccggctggggcgagacccagggcaccttcggcgccggcctcctcaaggaggcccagctccccgtcatcgagaacaaggtctgcaaccgctacgagttcctcaacggccgcgtccagtccaccgagctctgcgccggccacctcgccggcggcaccgactcctgccagggcgactccggcggccccctcgtctgcttcgagaaggacaagtacatcctccagggcgtcacctcctggggcctcggctgcgcccgccccaacaagcccggcgtctacgtccgcgtctcccgcttcgtcacctggatcgagggcgtcatgcgcaacaactga

SEQ ID NO: 7413 - RNA, 2433 nt, synthetic construct
  misc_feature 1..2433: note = derived and/or modified sequence opt3 fromAngiostatin__Homo_sapiens__AAN85555
  source 1..2433: mol_type = other RNA
atggagcacaaggaagtggtcctgctccttctgttgttcttaaaaagcggccagggggagcccctggacgattacgttaacacccaaggagcctccctattttctgtgacaaagaaacagctcggtgctggctcaatcgaagagtgcgcagccaagtgtgaagaggacgaggagttcacttgcagagcgtttcagtatcatagtaaagaacagcaatgtgtaattatggctgaaaataggaaaagctccataatcattcggatgcgcgatgtggtcctgttcgagaagaaagtgtacctttctgagtgcaagacggggaacggaaagaattatcgaggcaccatgtcgaagaccaaaaacggtatcacttgtcagaagtggtcaagcaccagtcctcaccgtccaagattttccccggccacacatccctctgaagggctggaggaaaattactgcaggaaccctgacaatgatccacagggaccctggtgttataccactgaccctgagaagcggtacgattattgcgacattttggaatgtgaggaggaatgcatgcactgtagcggcgagaactacgatggcaaaatctccaagacaatgtcagggctcgaatgccaggcatgggacagtcaaagcccacatgcccacggatacataccctctaaattccctaataagaacctgaaaaagaattattgccgcaacccagatagagagctgaggccgtggtgttttaccacggaccccaataaacggtgggaactctgcgatatccctcgctgtactaccccacccccttcctcaggtccaacataccagtgcttaaagggcactggggagaactatcgaggaaatgttgctgtgaccgtcagcggccacacatgtcagcattggagtgcacagacaccccacacgcataacagaactccggagaacttcccttgcaagaatctggacgaaaactactgtaggaatcccgacggtaaacgggccccatggtgccacacaaccaactctcaagtgcgttgggagtattgtaagattccttcctgcgatagctcgcccgtatctactgaacagcttgctccaacagcccctcctgagttgaccccagttgtgcaggactgttaccacggggatggacaatcctatcgcggcacgtcaagtaccacaactaccggcaaaaagtgccagagctggtcctctatgacaccgcatagacaccagaaaactcccgaaaattaccctaacgcggggctgaccatgaattactgcaggaacccagacgcagataagggaccctggtgttttacaaccgaccctagcgtccggtgggagtattgcaatctaaagaaatgttcaggtactgaggccagtgtggtggctccacccccggtcgttctcctgcctgatgtggaaacgccatccgaggaagactgcatgttcggcaacgggaagggataccgaggcaaacgcgccacaaccgtaactggtaccccctgtcaggattgggcagctcaagagcctcatagacacagcatctttacacccgagaccaatccaagggccgggcttgaaaagaactattgccggaatcctgacggcgatgtgggaggcccctggtgttacactacaaacccacgcaaactgtatgactactgcgacgtcccgcagtgtgcggccccttctttcgattgcgggaagccccaggtggagccaaagaaatgtcccggaagagttgtgggtggctgcgtcgcacatcctcactcatggccatggcaagtgagtttgaggacgcgttttgggatgcacttctgcggaggcaccctcattagccccgaatgggtactgactgctgcccattgtttagagaagtcccctcggccgtcttcgtataaagttatcctgggtgctcaccaggaagtgaatctcgagccacatgtccaggagatagaagtgagccgacttttcctggagcccacaagaaaggacattgccttgctaaaactgtcctcacccgcagtcatcaccgataaggtgattccagcctgcctccccagtcctaactacgttgtggctgacaggacagaatgttttatcactgggtggggcgagacccagggaacgttcggcgcggggctgcttaaggaagcacagctgccggtaatcgagaacaaagtctgcaatcgctacgagtttttgaacggacgggtgcaatctaccgaactctgtgccggtcacctggctggcgggacagatagctgccagggagactccggcggtcccttagtttgtttcgagaaggataaatatattctgcagggggtgacttcatggggcctaggatgcgccagaccaaataagcctggcgtctacgtgagggtaagccgctttgtgacctggatagaaggggttatgcgaaacaattga

SEQ ID NO: 7414 - RNA, 2433 nt, synthetic construct
  misc_feature 1..2433: note = derived and/or modified sequence opt4 fromAngiostatin__Homo_sapiens__AAN85555
  source 1..2433: mol_type = other RNA
atggagcacaaggaggtggtgctgctgctgctgctgttcctgaagagcggccagggcgagcccctggacgactacgtgaacacccagggcgccagcctgttcagcgtgaccaagaagcagctgggcgccggcagcatcgaggagtgcgccgccaagtgcgaggaggacgaggagttcacctgcagagccttccagtaccacagcaaggagcagcagtgcgtgatcatggccgagaacagaaagagcagcatcatcatcagaatgagagacgtggtgctgttcgagaagaaggtgtacctgagcgagtgcaagaccggcaacggcaagaactacagaggcaccatgagcaagaccaagaacggcatcacctgccagaagtggagcagcaccagcccccacagacccagattcagccccgccacccaccccagcgagggcctggaggagaactactgcagaaaccccgacaacgacccccagggcccctggtgctacaccaccgaccccgagaagagatacgactactgcgacatcctggagtgcgaggaggagtgcatgcactgcagcggcgagaactacgacggcaagatcagcaagaccatgagcggcctggagtgccaggcctgggacagccagagcccccacgcccacggctacatccccagcaagttccccaacaagaacctgaagaagaactactgcagaaaccccgacagagagctgagaccctggtgcttcaccaccgaccccaacaagagatgggagctgtgcgacatccccagatgcaccacccccccccccagcagcggccccacctaccagtgcctgaagggcaccggcgagaactacagaggcaacgtggccgtgaccgtgagcggccacacctgccagcactggagcgcccagaccccccacacccacaacagaacccccgagaacttcccctgcaagaacctggacgagaactactgcagaaaccccgacggcaagagagccccctggtgccacaccaccaacagccaggtgagatgggagtactgcaagatccccagctgcgacagcagccccgtgagcaccgagcagctggcccccaccgccccccccgagctgacccccgtggtgcaggactgctaccacggcgacggccagagctacagaggcaccagcagcaccaccaccaccggcaagaagtgccagagctggagcagcatgaccccccacagacaccagaagacccccgagaactaccccaacgccggcctgaccatgaactactgcagaaaccccgacgccgacaagggcccctggtgcttcaccaccgaccccagcgtgagatgggagtactgcaacctgaagaagtgcagcggcaccgaggccagcgtggtggcccccccccccgtggtgctgctgcccgacgtggagacccccagcgaggaggactgcatgttcggcaacggcaagggctacagaggcaagagagccaccaccgtgaccggcaccccctgccaggactgggccgcccaggagccccacagacacagcatcttcacccccgagaccaaccccagagccggcctggagaagaactactgcagaaaccccgacggcgacgtgggcggcccctggtgctacaccaccaaccccagaaagctgtacgactactgcgacgtgccccagtgcgccgcccccagcttcgactgcggcaagccccaggtggagcccaagaagtgccccggcagagtggtgggcggctgcgtggcccacccccacagctggccctggcaggtgagcctgagaaccagattcggcatgcacttctgcggcggcaccctgatcagccccgagtgggtgctgaccgccgcccactgcctggagaagagccccagacccagcagctacaaggtgatcctgggcgcccaccaggaggtgaacctggagccccacgtgcaggagatcgaggtgagcagactgttcctggagcccaccagaaaggacatcgccctgctgaagctgagcagccccgccgtgatcaccgacaaggtgatccccgcctgcctgcccagccccaactacgtggtggccgacagaaccgagtgcttcatcaccggctggggcgagacccagggcaccttcggcgccggcctgctgaaggaggcccagctgcccgtgatcgagaacaaggtgtgcaacagatacgagttcctgaacggcagagtgcagagcaccgagctgtgcgccggccacctggccggcggcaccgacagctgccagggcgacagcggcggccccctggtgtgcttcgagaaggacaagtacatcctgcagggcgtgaccagctggggcctgggctgcgccagacccaacaagcccggcgtgtacgtgagagtgagcagattcgtgacctggatcgagggcgtgatgagaaacaactga

SEQ ID NO: 7415 - RNA, 2433 nt, synthetic construct
  misc_feature 1..2433: note = derived and/or modified sequence opt5 fromAngiostatin__Homo_sapiens__AAN85555
  source 1..2433: mol_type = other RNA
atggagcacaaggaagtggtcctgctcctgcttctgttcctcaaaagcggccagggggagcccctggacgattacgttaacacccaaggagcctccctcttttctgtgacaaagaaacagctgggcgctgggagcatcgaagagtgcgccgcgaagtgtgaagaggacgaggagttcacgtgcagagcttttcagtatcattccaaagagcagcaatgtgtgattatggccgaaaatcggaagtctagcatcattatccgcatgagagatgtcgtgcttttcgagaagaaagtttacctgtccgagtgcaagaccggaaacggcaaaaattatcgggggacaatgtctaagaccaaaaacggaattacatgtcagaagtggagctccaccagccctcaccgcccgagattttctcccgccacacatccttccgaaggcctggaggaaaattactgccggaaccccgacaatgatcctcagggcccctggtgttataccacggaccctgagaagcgctacgattattgcgacatcctcgaatgtgaggaggaatgcatgcactgtagcggggagaactacgatggaaaaatctctaagaccatgtccggcctggaatgccaggcttgggacagccaatctccgcatgcccacgggtacattccctccaaattccctaataagaaccttaaaaagaattattgcagaaaccccgatcgggagctgcgcccttggtgttttacaaccgaccccaataaaagatgggaactctgcgatatcccgcggtgtacaacccctccccctagctccggacccacgtaccagtgcctgaagggcacaggggagaactatcgcggaaatgtggctgtcaccgtgtctggccacacatgtcagcattggagcgcccagacaccccacacccataacagaacccctgagaacttcccgtgcaagaatcttgacgaaaactactgtcggaatcccgacggcaaacgcgcgccttggtgccacacgaccaactcccaagttagatgggagtattgtaagattcccagctgcgattcttcccctgtgagcacagaacagctggcccccaccgctccgcctgagctcacacccgtcgtgcaggactgttaccacggggatggacaatcttatcggggcaccagctccacgacaaccaccgggaaaaagtgccagtcttggagctccatgacacctcatagacaccagaaaacccccgaaaattaccctaacgccggactgacaatgaattactgccgcaaccccgacgctgataagggcccgtggtgttttacgaccgaccctagcgtgcggtgggagtattgcaatctgaagaaatgttctgggacagaggcctccgtcgttgcgccccctcccgtggtgctcctgccggatgtcgaaacccccagcgaggaagactgcatgttcggaaacggcaagggctacagagggaaacgcgccacaaccgtgacgggaaccccttgtcaggattgggctgcccaagagccccatcggcactctatctttacacctgagaccaatcccagagctggccttgaaaagaactattgccgcaatcctgacggggatgttggaggcccctggtgttacacaaccaacccgcggaaactgtatgactactgcgacgtgcctcagtgtgccgccccctccttcgattgcgggaagcctcaggtcgagcccaagaaatgtccgggcagagtggttggaggctgcgtggctcatcctcacagctggccctggcaggtctccctccgcacgcggtttgggatgcacttctgcggaggcacactgatttctcctgaatgggtgcttaccgcggcccattgtctggaaaagagccccagaccctcctcttataaagtcatcctcggggctcaccaagaagtgaatctggagcctcatgttcaggagattgaagtgagccgcctgttcctcgagccgacacggaaggacatcgccctgcttaaactgtccagccccgccgtcatcaccgataaggtgattcctgcttgcctcccctctcctaactacgttgtggccgacagaaccgaatgttttatcacaggatggggcgagacgcaggggaccttcggcgcgggactgcttaaggaagctcagctgcccgtcattgagaacaaagtgtgcaatcggtacgagtttctcaacggccgcgtgcaatccacagaactgtgtgccgggcacctggccggaggcaccgatagctgccagggggactctggaggccctctcgtttgtttcgagaaggataaatatatcctgcagggggtcacatcctggggccttggatgcgctagaccgaataagcccggcgtgtacgtgcgggtcagcagatttgtgacctggattgaaggggttatgcgcaacaattga

SEQ ID NO: 7416 - RNA, 2433 nt, synthetic construct
  misc_feature 1..2433: note = derived and/or modified sequence opt6 fromAngiostatin__Homo_sapiens__AAN85555
  source 1..2433: mol_type = other RNA
atggaacataaagaagttgtattattactattattatttttaaaatctggtcaaggagaaccattagacgattatgtaaatacccagggagcttcattattcagtgtcacgaaaaaacaacttggagcaggctcaatagaagaatgcgctgctaaatgcgaagaagacgaagaatttacatgcagggcatttcaatatcatagcaaagaacaacaatgtgtaatcatggcagaaaatcgaaaatcttcaataataataagaatgagagatgtagtattattcgaaaaaaaagtatacttatccgaatgcaaaaccggaaacggaaaaaattacagaggaacaatgagtaaaactaaaaacggtattacatgtcaaaaatggtctagtacctcaccacatagacccagatttagtccagcaacacacccatcagaaggcctagaagaaaattactgcagaaatcccgataatgaccctcaaggcccttggtgctacacaactgaccctgaaaaacgatacgattattgcgacatactcgaatgcgaagaagaatgtatgcattgctccggagaaaactatgatggtaaaatatcaaagacaatgtctgggttagaatgccaagcatgggattcacaatcccctcatgcacatggatatataccaagtaaattccctaacaaaaatctaaagaaaaactactgtagaaatccagacagagagttaagaccatggtgttttactacagatcctaataaaagatgggaattatgcgatatacctagatgcacaacaccacctcccagttctggtccaacttaccaatgcttaaaaggaacaggtgaaaactacagaggtaatgtagctgttacagtatcaggacatacatgtcaacactggagcgctcaaactccacatactcataacagaacacctgaaaattttccttgtaaaaatctagatgaaaattattgtaggaatcccgatggaaaacgagctccgtggtgtcacacaaccaattcacaagtgagatgggaatattgcaaaataccgtcatgtgattcatccccagtatctactgaacaactagcgcctacagcccccccagaattaactccagtcgtacaagattgttatcacggagatgggcaatcatacagaggaacatcaagtacaacaaccaccggcaaaaaatgtcaatcatggtcttcaatgaccccgcatagacatcaaaagacgccagaaaattacccaaatgccggattaaccatgaattattgcagaaatcccgatgctgataaaggtccatggtgcttcacaacagatccatcagtacgatgggaatactgtaatctaaagaaatgcagtggaaccgaagcctcggttgtagcaccaccaccagtggtattactacctgatgttgaaacacctagcgaagaagattgtatgtttggaaatggaaaaggctatcgaggaaaaagagcgacaactgtaacaggaactccgtgtcaagattgggctgcacaggaaccacatagacactcaatttttacacctgaaacaaatccaagagcaggcttagaaaaaaattactgtagaaaccctgacggtgatgtaggaggaccatggtgttatacaactaatcctcgaaaactatacgactactgtgacgttcctcaatgcgctgctccctcattcgactgtggaaaaccacaagtagaaccaaaaaaatgtccaggcagagtagtcggaggttgcgtagcacacccgcactcatggccttggcaagtatcattaagaacaagatttggcatgcacttttgtggtgggacattaatatccccagaatgggtattaacagctgcccattgcttagagaaatctccaagaccatcatcatacaaggtgatattaggtgcacatcaagaagtaaatctcgagccacacgtgcaagagatagaagtaagtagactatttttagaaccaacaagaaaagatatagcactattaaaactctcttcgccagccgtcattaccgataaagttatacctgcttgtttaccaagtcccaattatgtagtcgcagatagaactgaatgttttattacaggatggggggaaacacaaggtacttttggtgctgggctacttaaagaagctcaacttccagttatagaaaataaagtatgtaatcgatatgaatttcttaatggaagagtacaatcaacagaattatgcgcaggtcatctagcaggcggaacagactcatgccaaggagacagtggcggtccactcgtatgttttgaaaaagataaatatatacttcaaggtgtcacatcatggggattgggatgtgctcgaccaaataaaccaggtgtatatgtcagagtatccagattcgtaacatggatagaaggtgtcatgagaaataactaa

SEQ ID NO: 7417 - protein, 136 aa, synthetic construct
  REGION 1..136: note = Angiostatin__Homo_sapiens__Q5TEH5
MEHKEVVLLLLLFLKSGQGEPLDDYVNTQGASLFSVTKKQLGAGSIEECAAKCEEDEEFTCRAFQYHSKEQQCVIMAENRKSSIIIRMRDVVLFEKKVYLSECKTGNGKNYRGTMSKTKNGITCQKWSSTSPHRPR

SEQ ID NO: 7418 - RNA, 411 nt, synthetic construct
  misc_feature 1..411: note = Angiostatin__Homo_sapiens__EAW47592
  source 1..411: mol_type = other RNA
atggaacataaggaagtggttcttctacttcttttatttctgaaatcaggtcaaggagagcctctggatgactatgtgaatacccagggggcttcactgttcagtgtcactaagaagcagctgggagcaggaagtatagaagaatgtgcagcaaaatgtgaggaggacgaagaattcacctgcagggcattccaatatcacagtaaagagcaacaatgtgtgataatggctgaaaacaggaagtcctccataatcattaggatgagagatgtagttttatttgaaaagaaagtgtatctctcagagtgcaagactgggaatggaaagaactacagagggacgatgtccaaaacaaaaaatggcatcacctgtcaaaaatggagttccacttctccccacagacctaggtaa

SEQ ID NO: 7419 - RNA, 411 nt, synthetic construct
  misc_feature 1..411: note = derived and/or modified sequence opt1 fromAngiostatin__Homo_sapiens__EAW47592
  source 1..411: mol_type = other RNA
atggagcacaaggaggtggtcctgctcctgctgctgttcctcaagagcggccagggggagcccctggacgactacgtgaacacccagggcgcctccctcttcagcgtgaccaagaagcagctgggggccggctccatcgaggagtgcgcggccaagtgcgaggaggacgaggagttcacgtgccgcgccttccagtaccacagcaaggagcagcagtgcgtcatcatggccgagaaccggaagtccagcatcatcatccgcatgcgggacgtggtgctgttcgagaagaaggtctacctctccgagtgcaagaccgggaacggcaagaactaccgcggcaccatgagcaagaccaagaacgggatcacgtgccagaagtggtccagcacctccccgcaccggccccgctga

SEQ ID NO: 7420 - RNA, 411 nt, synthetic construct
  misc_feature 1..411: note = derived and/or modified sequence opt2 fromAngiostatin__Homo_sapiens__EAW47592
  source 1..411: mol_type = other RNA
atggagcacaaggaggtcgtcctcctcctcctcctcttcctcaagtccggccagggcgagcccctcgacgactacgtcaacacccagggcgcctccctcttctccgtcaccaagaagcagctcggcgccggctccatcgaggagtgcgccgccaagtgcgaggaggacgaggagttcacctgccgcgccttccagtaccactccaaggagcagcagtgcgtcatcatggccgagaaccgcaagtcctccatcatcatccgcatgcgcgacgtcgtcctcttcgagaagaaggtctacctctccgagtgcaagaccggcaacggcaagaactaccgcggcaccatgtccaagaccaagaacggcatcacctgccagaagtggtcctccacctccccccaccgcccccgctga

SEQ ID NO: 7421 - RNA, 411 nt, synthetic construct
  misc_feature 1..411: note = derived and/or modified sequence opt3 fromAngiostatin__Homo_sapiens__EAW47592
  source 1..411: mol_type = other RNA
atggagcacaaggaagtggtcctgctccttctgttgttcttaaaaagcggccagggggagcccctggacgattacgttaacacccaaggagcctccctattttctgtgacaaagaaacagctcggtgctggctcaatcgaagagtgcgcagccaagtgtgaagaggacgaggagttcacttgcagagcgtttcagtatcatagtaaagaacagcaatgtgtaattatggctgaaaataggaaaagctccataatcattcggatgcgcgatgtggtcctgttcgagaagaaagtgtacctttctgagtgcaagacggggaacggaaagaattatcgaggcaccatgtcgaagactaaaaacggtatcacatgtcagaagtggtcaagcaccagtcctcaccgtccaagatga

SEQ ID NO: 7422 - RNA, 411 nt, synthetic construct
  misc_feature 1..411: note = derived and/or modified sequence opt4 fromAngiostatin__Homo_sapiens__EAW47592
  source 1..411: mol_type = other RNA
atggagcacaaggaggtggtgctgctgctgctgctgttcctgaagagcggccagggcgagcccctggacgactacgtgaacacccagggcgccagcctgttcagcgtgaccaagaagcagctgggcgccggcagcatcgaggagtgcgccgccaagtgcgaggaggacgaggagttcacctgcagagccttccagtaccacagcaaggagcagcagtgcgtgatcatggccgagaacagaaagagcagcatcatcatcagaatgagagacgtggtgctgttcgagaagaaggtgtacctgagcgagtgcaagaccggcaacggcaagaactacagaggcaccatgagcaagaccaagaacggcatcacctgccagaagtggagcagcaccagcccccacagacccagatga

SEQ ID NO: 7423 - RNA, 411 nt, synthetic construct
  misc_feature 1..411: note = derived and/or modified sequence opt5 fromAngiostatin__Homo_sapiens__EAW47592
  source 1..411: mol_type = other RNA
atggagcacaaggaagtggtcctgctcctgcttctgttcctcaaaagcggccagggggagcccctggacgattacgttaacacccaaggagcctcccttttctctgtgacaaagaaacagctgggcgctgggagcatcgaagagtgcgccgcgaagtgtgaagaggacgaggaatttacgtgcagagcttttcagtatcattccaaagagcagcaatgtgtgattatggccgaaaatcggaagtctagcatcattatccgcatgagagatgtcgttctcttcgagaagaaagtgtacctgtccgagtgcaagaccggaaacggcaaaaattatcgggggacaatgtctaagaccaaaaacggaattacatgtcagaagtggagctccaccagccctcaccgcccgagatga

SEQ ID NO: 7424 - RNA, 411 nt, synthetic construct
  misc_feature 1..411: note = derived and/or modified sequence opt6 fromAngiostatin__Homo_sapiens__EAW47592
  source 1..411: mol_type = other RNA
atggaacacaaagaagtagtactactactactattattcctaaaatcaggacaaggagaaccactagacgactacgtaaacacacaaggagcatcactattcagcgtaacaaaaaaacaactaggagcaggaagcatagaagaatgcgcagcaaaatgcgaagaagacgaagaattcacatgcagagcattccaataccactcaaaagaacaacaatgcgtaataatggcagaaaacagaaaaagcagcataataataagaatgagagacgtagtattattcgaaaaaaaagtatacctaagcgaatgcaaaacaggaaacggaaaaaactacagaggaacaatgtcaaaaacaaaaaacggaataacatgccaaaaatggtcaagcacaagcccacacagaccaagataa

SEQ ID NO: 7425 - protein, 1712 aa, synthetic construct
  REGION 1..1712: note = Canstatin__Homo_sapiens__P08572
MGRDQRAVAGPALRRWLLLGTVTVGFLAQSVLAGVKKFDVPCGGRDCSGGCQCYPEKGGRGQPGPVGPQGYNGPPGLQGFPGLQGRKGDKGERGAPGVTGPKGDVGARGVSGFPGADGIPGHPGQGGPRGRPGYDGCNGTQGDSGPQGPPGSEGFTGPPGPQGPKGQKGEPYALPKEERDRYRGEPGEPGLVGFQGPPGRPGHVGQMGPVGAPGRPGPPGPPGPKGQQGNRGLGFYGVKGEKGDVGQPGPNGIPSDTLHPIIAPTGVTFHPDQYKGEKGSEGEPGIRGISLKGEEGIMGFPGLRGYPGLSGEKGSPGQKGSRGLDGYQGPDGPRGPKGEAGDPGPPGLPAYSPHPSLAKGARGDPGFPGAQGEPGSQGEPGDPGLPGPPGLSIGDGDQRRGLPGEMGPKGFIGDPGIPALYGGPPGPDGKRGPPGPPGLPGPPGPDGFLFGLKGAKGRAGFPGLPGSPGARGPKGWKGDAGECRCTEGDEAIKGLPGLPGPKGFAGINGEPGRKGDRGDPGQHGLPGFPGLKGVPGNIGAPGPKGAKGDSRTITTKGERGQPGVPGVPGMKGDDGSPGRDGLDGFPGLPGPPGDGIKGPPGDPGYPGIPGTKGTPGEMGPPGLGLPGLKGQRGFPGDAGLPGPPGFLGPPGPAGTPGQIDCDTDVKRAVGGDRQEAIQPGCIGGPKGLPGLPGPPGPTGAKGLRGIPGFAGADGGPGPRGLPGDAGREGFPGPPGFIGPRGSKGAVGLPGPDGSPGPIGLPGPDGPPGERGLPGEVLGAQPGPRGDAGVPGQPGLKGLPGDRGPPGFRGSQGMPGMPGLKGQPGLPGPSGQPGLYGPPGLHGFPGAPGQEGPLGLPGIPGREGLPGDRGDPGDTGAPGPVGMKGLSGDRGDAGFTGEQGHPGSPGFKGIDGMPGTPGLKGDRGSPGMDGFQGMPGLKGRPGFPGSKGEAGFFGIPGLKGLAGEPGFKGSRGDPGPPGPPPVILPGMKDIKGEKGDEGPMGLKGYLGAKGIQGMPGIPGLSGIPGLPGRPGHIKGVKGDIGVPGIPGLPGFPGVAGPPGITGFPGFIGSRGDKGAPGRAGLYGEIGATGDFGDIGDTINLPGRPGLKGERGTTGIPGLKGFFGEKGTEGDIGFPGITGVTGVQGPPGLKGQTGFPGLTGPPGSQGELGRIGLPGGKGDDGWPGAPGLPGFPGLRGIRGLHGLPGTKGFPGSPGSDIHGDPGFPGPPGERGDPGEANTLPGPVGVPGQKGDQGAPGERGPPGSPGLQGFPGITPPSNISGAPGDKGAPGIFGLKGYRGPPGPPGSAALPGSKGDTGNPGAPGTPGTKGWAGDSGPQGRPGVFGLPGEKGPRGEQGFMGNTGPTGAVGDRGPKGPKGDPGFPGAPGTVGAPGIAGIPQKIAVQPGTVGPQGRRGPPGAPGEMGPQGPPGEPGFRGAPGKAGPQGRGGVSAVPGFRGDEGPIGHQGPIGQEGAPGRPGSPGLPGMPGRSVSIGYLLVKHSQTDQEPMCPVGMNKLWSGYSLLYFEGQEKAHNQDLGLAGSCLARFSTMPFLYCNPGDVCYYASRNDKSYWLSTTAPLPMMPVAEDEIKPYISRCSVCEAPAIAIAVHSQDVSIPHCPAGWRSLWIGYSFLMHTAAGDEGGGQSLVSPGSCLEDFRATPFIECNGGRGTCHYYANKYSFWLTTIPEQSFQGSPSADTLKAGLIRTHISRCQVCMKNL

SEQ ID NO: 7426 - RNA, 5139 nt, synthetic construct
  misc_feature 1..5139: note = Canstatin__Homo_sapiens__CCDS41907.1
  source 1..5139: mol_type = other RNA
atggggagagaccagcgcgcggtggccggccctgccctacggcggtggctgctgctggggacagtgaccgtggggttcctcgcccagagcgtcttggcgggtgtgaagaagtttgatgtgccgtgtggaggaagagattgcagtgggggctgccagtgctaccctgagaaaggtggacgtggtcagcctgggccagtgggcccccaggggtacaatgggccaccaggattacaaggattcccgggactgcagggacgtaaaggagacaagggtgaaaggggagcccccggagtaacgggacccaagggcgacgtgggagcaagaggcgtttctggattccctggtgccgatggaattcctggacacccggggcaaggtgggcccaggggaaggccgggctacgatggctgcaacggaacccagggagactcaggtccacaggggccccccggctctgaggggttcaccgggcctcccgggccccaaggaccaaaagggcagaaaggtgagccttatgcactgcctaaagaggagcgcgacagatatcggggtgaacctggagagcctggattggtcggtttccagggacctcccggccgccctgggcatgtgggacagatgggtccagttggagctccagggagaccaggaccacctggaccccctggaccaaaaggacagcaaggcaacagaggacttggtttctacggagttaagggtgaaaagggtgacgtagggcagccgggacccaacgggattccatcagacaccctccaccccatcatcgcgcccacaggagtcaccttccacccagatcagtacaagggtgaaaaaggcagtgagggggaaccaggaataagaggcatttccttgaagggagaagaaggaatcatgggctttcctggactgaggggttaccctggcttgagtggtgaaaaaggatcaccaggacagaagggaagccgaggcctggatggctatcaagggcctgatggaccccggggacccaagggagaagccggagacccagggccccctggactacctgcctactcccctcacccttccctagcaaaaggtgccagaggtgacccgggattcccaggggcccaaggggagccaggaagccagggtgagccaggagacccgggcctcccaggtccccctggcctctccatcggagatggagatcagaggagaggcctgccgggtgagatgggacccaagggcttcatcggagaccccggcatccctgcgctctacgggggcccacctggacctgatggaaagcgagggcctccaggaccccccgggctccctggaccacctggacctgatggcttcctgtttgggctgaaaggagcaaaaggaagagcaggcttccctgggcttcccggctcccctggagcccgcggaccaaaggggtggaaaggtgacgctggggaatgcagatgtacagaaggcgacgaagctatcaaaggtcttccgggactgccaggacccaagggcttcgcaggcatcaacggggagccggggaggaaaggggacagaggagaccccggccaacacggcctccctgggttcccagggctcaagggagtgcctggcaacattggtgctcccggacccaaaggagcaaaaggagattccagaacaatcacaaccaaaggtgagcggggacagcccggcgtcccaggtgtgcccgggatgaaaggtgacgatggcagcccaggccgcgatgggctcgatggattccccggcctcccaggccctcccggtgatggcatcaagggccctccaggggacccaggctatccaggaatacctggaacgaagggtactccaggagaaatgggccccccaggactgggccttcccggcctcaaaggccaacgtggtttccctggagacgccggcttacctggaccaccaggcttcctgggccctcctggccccgcagggaccccaggacaaatagattgtgacacagatgtgaaaagggccgttggaggtgacagacaggaggccatccagccaggttgcataggagggcccaagggattgccaggcctgccaggacccccaggccccacaggtgccaaaggcctccgaggaatcccaggcttcgcaggagctgatggaggaccagggcccaggggcttgccaggagacgcaggtcgtgaagggttcccaggacccccagggttcataggaccccgaggatccaaaggtgcagtgggcctccctggcccagatggatccccaggtcccatcggcctgccagggccagatgggccccctggggaaaggggcctccctggagaagtcctgggagctcagcccgggccacggggagatgctggtgtgcctggacagcctgggcttaaaggccttcccggagacagaggcccccctggattcagaggaagccaagggatgcctgggatgccagggctgaagggccagccaggcctcccaggaccttccggccagccaggcctgtatgggcctccaggactgcatggattcccaggagctcctggccaagaggggcccttggggctgccaggaatcccaggccgtgaaggtctgcctggtgatagaggggaccctggggacacaggcgctcctggccctgtgggcatgaaaggtctctctggtgacagaggagatgctggcttcacaggggagcaaggccatccaggaagccctggatttaaaggaattgatggaatgcctgggacccccgggctaaaaggagatagaggctcacctgggatggatggtttccaaggcatgcctggactcaaagggagacccgggtttccagggagcaaaggcgaggctggatttttcggaatacccggtctgaagggtctggctggtgagccaggttttaaaggcagccgaggggaccctgggcccccaggaccacctcctgtcatcctgccaggaatgaaagacattaaaggagagaaaggagatgaagggcctatggggctgaaaggatacctgggcgcaaaaggtatccaaggaatgccaggcatcccagggctgtcaggaatccctgggctgcctgggaggcccggccacatcaaaggagtcaagggagacatcggagtccccggcatccccggtttgccaggattccctggggtggctggcccccctggaattacgggattcccaggattcataggaagccggggtgacaaaggtgccccagggagagcaggcctgtatggcgagattggcgcgactggtgatttcggtgacatcggggacactataaatttaccaggaagaccaggcctgaagggggagcggggcaccactggaataccaggtctgaagggattctttggagagaagggaacagaaggtgacatcggcttccctgggataacaggcgtgactggagtccaaggccctcctggacttaaaggacaaacaggctttccagggctgactgggcctccagggtcgcagggagagctggggcggattggactgcctggtggcaaaggagatgatggctggccgggagctccgggcttaccaggttttccgggactccgtgggatccgcggcttacacggcttgccaggcaccaagggctttccaggatccccaggttctgacatccacggagacccaggcttcccaggccctcctggggaaagaggtgacccaggagaggccaacacccttccaggccctgtgggagtcccaggacagaaaggagaccaaggagctccaggggaacgaggcccacctgggagcccaggacttcaggggttccctggtatcacacccccttccaacatctctggggcacctggtgacaaaggggcgccagggatatttggcctgaaaggttatcggggcccaccagggccaccaggttctgctgctcttcctggaagcaaaggtgacacagggaacccaggagctccaggaaccccagggaccaaaggatgggccggggactccgggccccagggcaggcctggtgtgtttggtctcccaggagaaaaagggcccaggggtgaacaaggcttcatggggaacactggacccactggggcggtgggcgacagaggccccaagggacccaagggagacccaggattccctggtgcccccgggactgtgggagcccccgggattgcaggaatcccccagaagattgccgtccaaccagggacagtgggtccccaggggaggcgaggcccccctggggcaccgggggagatggggccccagggcccccccggagaaccaggtttccgtggggctccagggaaagctgggccccaaggaagaggtggtgtgtctgctgttcccggcttccggggagatgaaggacccataggccaccaggggccgattggccaagaaggtgcaccaggccgtccagggagcccgggcctgccgggtatgccaggccgcagcgtcagcatcggctacctcctggtgaagcacagccagacggaccaggagcccatgtgcccagtgggcatgaacaaactctggagtggatacagcctgctgtacttcgagggccaggagaaggcgcacaaccaggacctggggctggcgggctcctgcctggcgcggttcagcaccatgcccttcctgtactgcaaccctggtgatgtctgctactatgccagccggaacgacaagtcctactggctctctaccactgcgccgctgcccatgatgcccgtggccgaggacgagatcaagccctacatcagccgctgttctgtgtgtgaggccccggccatcgccatcgcggtccacagtcaggatgtctccatcccacactgcccagctgggtggcggagtttgtggatcggatattccttcctcatgcacacggcggcgggagacgaaggcggtggccaatcactggtgtcaccgggcagctgtctagaggacttccgcgccacaccattcatcgaatgcaatggaggccgcggcacctgccactactacgccaacaagtacagcttctggctgaccaccattcccgagcagagcttccagggctcgccctccgccgacacgctcaaggccggcctcatccgcacacacatcagccgctgccaggtgtgcatgaagaacctgtga

SEQ ID NO: 7427 - RNA, 5139 nt, synthetic construct
  misc_feature 1..5139: note = derived and/or modified sequence opt1 fromCanstatin__Homo_sapiens__CCDS41907.1
  source 1..5139: mol_type = other RNA
atgggccgcgaccagcgggccgtggccgggcccgcgctgcgccggtggctcctgctgggcaccgtcaccgtggggttcctcgcccagagcgtgctggccggcgtcaagaagttcgacgtgccgtgcgggggccgcgactgctccggcgggtgccagtgctaccccgagaagggcgggcggggccagcccgggcccgtgggcccgcagggctacaacgggccgcccggcctgcaggggttccccggcctccagggccgcaagggggacaagggcgagcgcggggcccccggcgtcacggggcccaagggcgacgtgggcgcccggggcgtgagcggcttccccggggcggacggcatccccgggcacccgggccagggcgggccccggggccgccccgggtacgacggctgcaacgggacccagggcgactccggcccccaggggccgcccggcagcgaggggttcaccggcccgcccggcccccaggggcccaagggccagaagggggagccctacgccctgcccaaggaggagcgggaccgctaccggggcgagccgggggagcccggcctggtcggcttccaggggccgcccggccgccccgggcacgtgggccagatggggcccgtgggcgcccccggccggccggggccgcccggcccgcccgggcccaagggccagcaggggaaccgcggcctcggcttctacggggtcaagggcgagaagggggacgtgggccagcccgggcccaacggcatcccctccgacaccctgcaccccatcatcgcccccacgggcgtgaccttccaccccgaccagtacaagggggagaagggcagcgagggggagccgggcatccggggcatctccctgaagggggaggagggcatcatggggttccccggcctccgcgggtaccccggcctgagcggcgagaaggggtcccccggccagaaggggagccggggcctggacgggtaccagggcccggacggcccccgcgggcccaagggcgaggcgggggaccccggcccgcccgggctccccgcctacagcccccacccgtccctggccaagggcgcccggggcgaccccgggttccccggcgcccagggggagccgggctcccagggcgagcccggggaccccggcctgcccgggccgcccggcctcagcatcggggacggcgaccagcgccgcggcctgcccggggagatgggccccaaggggttcatcggcgacccggggatccccgcgctgtacggcggcccgcccgggcccgacggcaagcgggggccgcccggcccgcccgggctccccggcccgcccggccccgacgggttcctgttcggcctgaagggggccaagggccgcgccgggttccccggcctccccggctcccccggggcccggggccccaaggggtggaagggcgacgccggcgagtgccgctgcaccgagggggacgaggcgatcaagggcctgcccgggctgcccggccccaaggggttcgccggcatcaacggcgagccggggcggaagggcgaccgcggggaccccggccagcacgggctccccggcttcccgggcctgaagggggtccccggcaacatcggggcccccggccccaagggggccaagggcgacagccggaccatcacgaccaagggcgagcgcgggcagccgggcgtgcccggggtgcccggcatgaagggggacgacggctcccccggccgggacgggctggacggcttcccggggctccccggcccgcccggcgacgggatcaagggcccgcccggggaccccggctaccccgggatccccggcaccaagggcacccccggggagatgggcccgcccgggctgggcctgcccgggctcaagggccagcgcggcttccccggggacgccggcctgcccgggcccccgggcttcctggggccgcccggccccgcgggcacgcccgggcagatcgactgcgacaccgacgtcaagcgggccgtgggcggggaccgccaggaggccatccagcccggctgcatcggcgggcccaagggcctcccggggctgcccggcccgcccgggcccaccggcgccaagggcctgcgggggatccccggcttcgccggggcggacggcgggcccggcccccgcggcctcccgggggacgccggccgggaggggttccccggcccgcccgggttcatcggcccccgcggcagcaagggggccgtgggcctgcccgggcccgacggctcccccgggccgatcggcctgcccggccccgacgggcccccgggcgagcgggggctccccggcgaggtcctgggcgcccagcccgggccccgcggcgacgcgggggtgccgggccagcccgggctgaagggcctccccggcgaccgggggccgcccggcttccgcgggagccagggcatgcccgggatgcccggcctgaagggccagccggggctgcccggccccagcgggcagcccggcctctacgggccgcccggcctgcacggcttccccggggcccccggccaggaggggccgctgggcctgcccggcatccccgggcgcgagggcctccccggggaccggggcgacccgggggacaccggcgcccccggccccgtggggatgaagggcctgtccggggaccgcggcgacgccgggttcacgggcgagcagggccaccccgggagcccgggcttcaaggggatcgacggcatgcccgggacccccggcctgaagggcgaccgggggtcccccggcatggacgggttccagggcatgccggggctcaagggccgccccggcttccccgggagcaagggcgaggccgggttcttcggcatccccggcctgaaggggctggcgggcgagccggggttcaagggctcccgcggggaccccgggcccccggggcccccgcccgtcatcctccccggcatgaaggacatcaagggcgagaagggggacgagggccccatggggctgaagggctacctgggcgccaaggggatccagggcatgcccgggatccccggcctcagcgggatcccgggcctgcccggccggcccgggcacatcaagggcgtgaagggggacatcggcgtccccggcatcccggggctgcccggcttccccggggtggccgggcccccgggcatcaccggcttccccggcttcatcgggtcccggggcgacaagggggcccccggccgcgccgggctctacggcgagatcggcgcgaccggggacttcggcgacatcggggacacgatcaacctgcccggccggccggggctgaagggcgagcgcggcaccaccgggatccccggcctcaaggggttcttcggcgagaaggggaccgagggcgacatcggcttccccgggatcacgggcgtgaccggggtccaggggcccccgggcctgaagggccagaccggcttccccgggctgaccggcccgcccgggagccagggcgagctcggccggatcgggctgcccggcgggaagggcgacgacgggtggcccggcgcccccggcctgccggggttccccggcctccgcgggatccggggcctgcacgggctgcccggcacgaagggcttccccgggtccccgggcagcgacatccacggggaccccggcttccccgggcccccgggcgagcgcggcgaccccggggaggccaacaccctccccggccccgtgggggtgccgggccagaagggcgaccagggggcccccggcgagcgggggccgcccggctcccccgggctgcagggcttccccggcatcaccccgcccagcaacatctccggggcccccggcgacaagggggcgcccggcatcttcgggctgaagggctaccgcggcccgcccgggccgcccggcagcgccgccctccccgggtccaagggcgacaccgggaaccccggcgcccccggcacgcccgggaccaagggctgggcgggggacagcggcccccagggccggccgggggtcttcggcctgcccggggagaagggcccccgcggggagcagggcttcatgggcaacaccgggcccaccggcgccgtgggggaccggggcccgaaggggcccaagggcgaccccggcttccccggggccccgggcacggtgggggcccccggcatcgccgggatcccccagaagatcgcggtccagcccggcaccgtgggcccgcaggggcgccggggcccgcccggggcccccggcgagatggggccccagggcccgcccggcgagcccgggttccgcggcgcccccgggaaggccggcccccagggccgcgggggcgtgtccgccgtccccgggttccggggcgacgaggggcccatcggccaccagggcccgatcgggcaggagggcgcgcccgggcgccccggcagcccggggctgcccggcatgcccggccggtccgtgagcatcgggtacctcctggtgaagcacagccagaccgaccaggagcccatgtgcccggtcggcatgaacaagctgtggtccgggtacagcctcctgtacttcgagggccaggagaaggcccacaaccaggacctggggctcgccggctcctgcctggcccgcttcagcaccatgcccttcctgtactgcaaccccggcgacgtgtgctactacgcctcccggaacgacaagagctactggctctccaccacggcgcccctgccgatgatgcccgtggccgaggacgagatcaagccctacatcagccgctgctccgtctgcgaggcccccgccatcgcgatcgccgtgcacagccaggacgtgtccatcccgcactgccccgccgggtggcggagcctgtggatcggctactccttcctcatgcacaccgccgccggggacgagggcggcgggcagagcctggtctcccccggcagctgcctggaggacttccgcgcgacccccttcatcgagtgcaacgggggccgggggacctgccactactacgccaacaagtactccttctggctcacgaccatcccggagcagagcttccagggcagcccctccgccgacaccctgaaggccggcctgatccgcacccacatcagccggtgccaggtgtgcatgaagaacctctga

SEQ ID NO: 7428 - RNA, 5139 nt, synthetic construct
  misc_feature 1..5139: note = derived and/or modified sequence opt2 fromCanstatin__Homo_sapiens__CCDS41907.1
  source 1..5139: mol_type = other RNA
atgggccgcgaccagcgcgccgtcgccggccccgccctccgccgctggctcctcctcggcaccgtcaccgtcggcttcctcgcccagtccgtcctcgccggcgtcaagaagttcgacgtcccctgcggcggccgcgactgctccggcggctgccagtgctaccccgagaagggcggccgcggccagcccggccccgtcggcccccagggctacaacggcccccccggcctccagggcttccccggcctccagggccgcaagggcgacaagggcgagcgcggcgcccccggcgtcaccggccccaagggcgacgtcggcgcccgcggcgtctccggcttccccggcgccgacggcatccccggccaccccggccagggcggcccccgcggccgccccggctacgacggctgcaacggcacccagggcgactccggcccccagggcccccccggctccgagggcttcaccggcccccccggcccccagggccccaagggccagaagggcgagccctacgccctccccaaggaggagcgcgaccgctaccgcggcgagcccggcgagcccggcctcgtcggcttccagggcccccccggccgccccggccacgtcggccagatgggccccgtcggcgcccccggccgccccggcccccccggcccccccggccccaagggccagcagggcaaccgcggcctcggcttctacggcgtcaagggcgagaagggcgacgtcggccagcccggccccaacggcatcccctccgacaccctccaccccatcatcgcccccaccggcgtcaccttccaccccgaccagtacaagggcgagaagggctccgagggcgagcccggcatccgcggcatctccctcaagggcgaggagggcatcatgggcttccccggcctccgcggctaccccggcctctccggcgagaagggctcccccggccagaagggctcccgcggcctcgacggctaccagggccccgacggcccccgcggccccaagggcgaggccggcgaccccggcccccccggcctccccgcctactccccccacccctccctcgccaagggcgcccgcggcgaccccggcttccccggcgcccagggcgagcccggctcccagggcgagcccggcgaccccggcctccccggcccccccggcctctccatcggcgacggcgaccagcgccgcggcctccccggcgagatgggccccaagggcttcatcggcgaccccggcatccccgccctctacggcggcccccccggccccgacggcaagcgcggcccccccggcccccccggcctccccggcccccccggccccgacggcttcctcttcggcctcaagggcgccaagggccgcgccggcttccccggcctccccggctcccccggcgcccgcggccccaagggctggaagggcgacgccggcgagtgccgctgcaccgagggcgacgaggccatcaagggcctccccggcctccccggccccaagggcttcgccggcatcaacggcgagcccggccgcaagggcgaccgcggcgaccccggccagcacggcctccccggcttccccggcctcaagggcgtccccggcaacatcggcgcccccggccccaagggcgccaagggcgactcccgcaccatcaccaccaagggcgagcgcggccagcccggcgtccccggcgtccccggcatgaagggcgacgacggctcccccggccgcgacggcctcgacggcttccccggcctccccggcccccccggcgacggcatcaagggcccccccggcgaccccggctaccccggcatccccggcaccaagggcacccccggcgagatgggcccccccggcctcggcctccccggcctcaagggccagcgcggcttccccggcgacgccggcctccccggcccccccggcttcctcggcccccccggccccgccggcacccccggccagatcgactgcgacaccgacgtcaagcgcgccgtcggcggcgaccgccaggaggccatccagcccggctgcatcggcggccccaagggcctccccggcctccccggcccccccggccccaccggcgccaagggcctccgcggcatccccggcttcgccggcgccgacggcggccccggcccccgcggcctccccggcgacgccggccgcgagggcttccccggcccccccggcttcatcggcccccgcggctccaagggcgccgtcggcctccccggccccgacggctcccccggccccatcggcctccccggccccgacggcccccccggcgagcgcggcctccccggcgaggtcctcggcgcccagcccggcccccgcggcgacgccggcgtccccggccagcccggcctcaagggcctccccggcgaccgcggcccccccggcttccgcggctcccagggcatgcccggcatgcccggcctcaagggccagcccggcctccccggcccctccggccagcccggcctctacggcccccccggcctccacggcttccccggcgcccccggccaggagggccccctcggcctccccggcatccccggccgcgagggcctccccggcgaccgcggcgaccccggcgacaccggcgcccccggccccgtcggcatgaagggcctctccggcgaccgcggcgacgccggcttcaccggcgagcagggccaccccggctcccccggcttcaagggcatcgacggcatgcccggcacccccggcctcaagggcgaccgcggctcccccggcatggacggcttccagggcatgcccggcctcaagggccgccccggcttccccggctccaagggcgaggccggcttcttcggcatccccggcctcaagggcctcgccggcgagcccggcttcaagggctcccgcggcgaccccggcccccccggccccccccccgtcatcctccccggcatgaaggacatcaagggcgagaagggcgacgagggccccatgggcctcaagggctacctcggcgccaagggcatccagggcatgcccggcatccccggcctctccggcatccccggcctccccggccgccccggccacatcaagggcgtcaagggcgacatcggcgtccccggcatccccggcctccccggcttccccggcgtcgccggcccccccggcatcaccggcttccccggcttcatcggctcccgcggcgacaagggcgcccccggccgcgccggcctctacggcgagatcggcgccaccggcgacttcggcgacatcggcgacaccatcaacctccccggccgccccggcctcaagggcgagcgcggcaccaccggcatccccggcctcaagggcttcttcggcgagaagggcaccgagggcgacatcggcttccccggcatcaccggcgtcaccggcgtccagggcccccccggcctcaagggccagaccggcttccccggcctcaccggcccccccggctcccagggcgagctcggccgcatcggcctccccggcggcaagggcgacgacggctggcccggcgcccccggcctccccggcttccccggcctccgcggcatccgcggcctccacggcctccccggcaccaagggcttccccggctcccccggctccgacatccacggcgaccccggcttccccggcccccccggcgagcgcggcgaccccggcgaggccaacaccctccccggccccgtcggcgtccccggccagaagggcgaccagggcgcccccggcgagcgcggcccccccggctcccccggcctccagggcttccccggcatcacccccccctccaacatctccggcgcccccggcgacaagggcgcccccggcatcttcggcctcaagggctaccgcggcccccccggcccccccggctccgccgccctccccggctccaagggcgacaccggcaaccccggcgcccccggcacccccggcaccaagggctgggccggcgactccggcccccagggccgccccggcgtcttcggcctccccggcgagaagggcccccgcggcgagcagggcttcatgggcaacaccggccccaccggcgccgtcggcgaccgcggccccaagggccccaagggcgaccccggcttccccggcgcccccggcaccgtcggcgcccccggcatcgccggcatcccccagaagatcgccgtccagcccggcaccgtcggcccccagggccgccgcggcccccccggcgcccccggcgagatgggcccccagggcccccccggcgagcccggcttccgcggcgcccccggcaaggccggcccccagggccgcggcggcgtctccgccgtccccggcttccgcggcgacgagggccccatcggccaccagggccccatcggccaggagggcgcccccggccgccccggctcccccggcctccccggcatgcccggccgctccgtctccatcggctacctcctcgtcaagcactcccagaccgaccaggagcccatgtgccccgtcggcatgaacaagctctggtccggctactccctcctctacttcgagggccaggagaaggcccacaaccaggacctcggcctcgccggctcctgcctcgcccgcttctccaccatgcccttcctctactgcaaccccggcgacgtctgctactacgcctcccgcaacgacaagtcctactggctctccaccaccgcccccctccccatgatgcccgtcgccgaggacgagatcaagccctacatctcccgctgctccgtctgcgaggcccccgccatcgccatcgccgtccactcccaggacgtctccatcccccactgccccgccggctggcgctccctctggatcggctactccttcctcatgcacaccgccgccggcgacgagggcggcggccagtccctcgtctcccccggctcctgcctcgaggacttccgcgccacccccttcatcgagtgcaacggcggccgcggcacctgccactactacgccaacaagtactccttctggctcaccaccatccccgagcagtccttccagggctccccctccgccgacaccctcaaggccggcctcatccgcacccacatctcccgctgccaggtctgcatgaagaacctctga

SEQ ID NO: 7429 - RNA, 5139 nt, synthetic construct
  misc_feature 1..5139: note = derived and/or modified sequence opt3 fromCanstatin__Homo_sapiens__CCDS41907.1
  source 1..5139: mol_type = other RNA
atgggcagagaccagagggccgtggctgggcccgcactgcggcgctggctccttctgggaaccgtcacagttggtttcttggcccaaagcgtgttagcgggcgtaaagaaatttgatgtgccttgcgggggacgagactgttccggcggttgccagtgttacccagagaagggaggacgtggccagccgggccccgtcgggcctcagggatataacggtccacccggcctgcaagggttccctggactacagggcagaaaaggtgataagggggaaaggggagctccaggcgtgactggccccaaaggggacgttggagcccggggtgtgtctggctttcctggggcagatggaatcccaggccacccgggtcagggcggcccccgcggaagacctggctacgacgggtgcaatggaacgcagggtgattcaggcccacaagggccccctggaagtgagggcttcaccggtccacccgggccgcagggccctaagggacagaagggcgaaccctatgccctcccaaaagaggaaagggaccggtaccgcggggagcctggagagcccggtctggtcggctttcaggggccacccggacgacctggccatgtgggtcaaatggggccagtaggcgctccgggaagacccggccctccagggccccctggaccaaagggccagcagggtaacagggggcttggattctatggcgttaaaggtgaaaagggcgatgtggggcaacccggaccgaatggcattcctagcgacacactgcacccaataatcgcacccactggggtcacctttcatcctgatcagtacaaaggagagaagggctccgaaggtgagcccgggattcggggaatctctttgaagggcgaggaaggtattatgggcttcccagggctccgtggatatcctggcctgtcgggggagaaaggatcacccggccagaagggtagccgcgggctggacggataccagggcccagatggtccgagaggccctaaaggggaagccggagaccccggcccacccgggctccctgcttacagtccacacccctccttagccaagggagcgaggggcgaccctggttttccgggggcacaaggagagccaggctctcagggcgaacccggggatcctggactgccaggtccccctggccttagcatcggggacggagatcagcggcgaggcttgccgggtgagatggggcccaaaggattcataggcgacccaggcatccctgccctgtatgggggacccccaggtcctgatggcaagcgcgggcccccaggaccgcctggcctacccggtccacccgggcctgacggatttctcttcggcctgaaaggcgctaaggggagagccggatttccaggtcttcccggctcccctggggcaaggggaccgaagggctggaaaggtgatgctggggagtgtcggtgcacagaaggagacgaggccattaagggcctgccaggcttgcccgggcctaaaggattcgcgggtatcaacggcgaacccgggcgcaagggagatagaggcgacccaggtcagcatgggctccctggattccccggcctgaaaggcgtgccagggaatattggagcccctggtccgaagggcgcaaagggggattcaaggaccatcactacaaaaggagagcgtggccaacccggtgtgccaggggtccctggcatgaagggagacgacggcagtcccgggcgggatggattagacggttttccaggcctgcctgggcccccgggagatggcataaaaggtccacctggggaccccggctacccagggattcccggcaccaaggggacgcctggagaaatgggtccgcccggcctcgggcttccaggactgaaaggccagcgaggtttccctggggatgctggcttgcccggacctccaggctttctagggccccctggaccagccggcactcccggtcagatcgactgtgataccgacgttaagagagctgtagggggagataggcaggaggccattcaaccgggctgcatcggtggccctaaggggctgccaggactccccggccctccagggcccacaggagcaaaaggcctgcgcggtatcccggggttcgccggagctgacggcggtcctggcccccgggggcttccaggagatgcgggcagagaggggtttcctggacccccaggcttcattggtcccagggggagcaagggagcagtgggcctgcctggcccagacgggtctccgggacccataggtttgcctggcccagatgggccccctggagaacgcggcctcccaggtgaggtgctgggggcccagcccggacctcgaggcgacgctggcgtcccggggcagccaggattaaaaggtctgcccggcgaccgggggcctcccggatttcgtggctcccagggtatgccagggatgcctggactaaagggccaacccggcctcccagggccgtcaggacagcctggtctgtatgggcccccagggcttcacggattccccggcgcccctggtcaggaagggccattgggactgcccggcatccctggcagagaggggctcccgggagataggggtgacccaggcgatactggggcacccggacctgtgggcatgaaaggtctgagcggggaccgcggagatgccggctttaccggcgaacaagggcacccaggaagtcccggtttcaagggcattgacgggatgcctggaacacccggccttaagggtgatcgggggtctccaggaatggacggctttcagggcatgccggggctgaaaggaagacctggtttccccggctccaagggggaggctggatttttcggcatcccaggtttgaaagggctcgccggcgagcctggattcaagggcagccgaggggatcccggaccacctggtcccccgccagttatactgcctggcatgaaagacattaagggggaaaaaggagatgagggccccatgggtttaaaggggtacctgggcgcaaagggaatccagggcatgccagggatccccggactatcgggtattcctggcctcccggggaggccaggacatatcaaaggcgtgaagggtgacattggcgtccccgggatacctggactgcccggctttccaggggtggcgggacctcccggcatcaccggtttcccagggtttattggatctcgcggcgataaaggtgctcctggccgggccgggctttatggagaaatcggcgcaacgggggacttcggagacatcggcgatactattaacttgccgggtagacccgggctgaagggagagaggggcacaaccggtataccaggcctcaaagggtttttcggagagaagggcactgaaggggacatcggatttcctggcattacaggtgtaaccggggttcagggacccccaggcctgaagggccaaacggggttccctggattaaccggtcccccgggctcccagggggagctgggacgtatcggccttccaggtgggaaaggagatgacggctggcctggcgcccccgggttgccaggatttcccggtctccgcggcattcgggggctgcacggactacctggcacaaagggtttccccgggtcaccaggaagtgatatccatggcgaccctggctttccggggcccccaggagaaagaggtgatcctggcgaggctaatactctgcccgggccagtgggagtccctggccagaaaggtgaccagggggcccccggagaaaggggcccgcctggcagcccagggctccaaggattccccggtataacccctccatccaacatctctggcgcacccggggataagggagctcctggcatttttggtctgaaagggtaccgaggaccacccggcccgcctggcagcgccgcgcttcccgggtcaaagggagacacaggtaatccaggcgcccccgggactcctggaaccaagggctgggctggtgatagtgggccacagggccggcccggagtgttcggcttgcctggggagaaaggaccacgcggtgagcagggcttcatggggaacacaggaccgaccggcgcagtcggtgacagagggcccaagggccctaaaggagacccaggctttcccggggcccctggaactgtgggtgctccaggcatcgccgggattccccagaagatcgcagttcaaccgggaacggtgggccctcagggtaggcgggggccacccggcgcgcctggagaaatgggcccccaggggccaccgggagagcctggtttccgaggcgcccccgggaaagctggaccacaaggcagaggtggcgtatccgccgtccccgggtttcgcggagatgaaggccctatagggcaccagggaccaattggccaggagggtgcacccgggaggcctggaagcccaggcctgccgggtatgcccggccgttctgtgtcaatcgggtatttactcgttaagcacagtcagacagaccaagaacctatgtgtccagtgggaatgaataagctgtggagcggctactcccttctgtacttcgaggggcaggagaaagctcataaccaggatttgggactcgccggctcttgcctggcacggttttcgaccatgcccttcctatattgtaatcctggtgacgtctgctactatgccagcagaaacgataagtcctactggctgtcaactaccgctccactccccatgatgcctgtggcggaagacgagattaaaccgtatatcagtaggtgctctgtatgtgaagcccccgcaatagctatcgccgtgcacagccaggatgtttccattccacattgccctgccgggtggcgctcactgtggatcggatacagctttcttatgcacacagctgcaggcgacgagggtggcgggcaatctttggtctcccccggaagttgtctggaagatttccgagccaccccatttattgagtgcaatggcgggagaggaacttgtcattattacgcgaacaagtacagcttctggttaacaacgatccctgagcagtcttttcagggctccccctcagctgacaccctcaaagccggtctgatacggactcacattagtaggtgccaggtgtgtatgaagaacctttga

SEQ ID NO: 7430 - RNA, 5139 nt, synthetic construct
  misc_feature 1..5139: note = derived and/or modified sequence opt4 fromCanstatin__Homo_sapiens__CCDS41907.1
  source 1..5139: mol_type = other RNA
atgggcagagaccagagagccgtggccggccccgccctgagaagatggctgctgctgggcaccgtgaccgtgggcttcctggcccagagcgtgctggccggcgtgaagaagttcgacgtgccctgcggcggcagagactgcagcggcggctgccagtgctaccccgagaagggcggcagaggccagcccggccccgtgggcccccagggctacaacggcccccccggcctgcagggcttccccggcctgcagggcagaaagggcgacaagggcgagagaggcgcccccggcgtgaccggccccaagggcgacgtgggcgccagaggcgtgagcggcttccccggcgccgacggcatccccggccaccccggccagggcggccccagaggcagacccggctacgacggctgcaacggcacccagggcgacagcggcccccagggcccccccggcagcgagggcttcaccggcccccccggcccccagggccccaagggccagaagggcgagccctacgccctgcccaaggaggagagagacagatacagaggcgagcccggcgagcccggcctggtgggcttccagggcccccccggcagacccggccacgtgggccagatgggccccgtgggcgcccccggcagacccggcccccccggcccccccggccccaagggccagcagggcaacagaggcctgggcttctacggcgtgaagggcgagaagggcgacgtgggccagcccggccccaacggcatccccagcgacaccctgcaccccatcatcgcccccaccggcgtgaccttccaccccgaccagtacaagggcgagaagggcagcgagggcgagcccggcatcagaggcatcagcctgaagggcgaggagggcatcatgggcttccccggcctgagaggctaccccggcctgagcggcgagaagggcagccccggccagaagggcagcagaggcctggacggctaccagggccccgacggccccagaggccccaagggcgaggccggcgaccccggcccccccggcctgcccgcctacagcccccaccccagcctggccaagggcgccagaggcgaccccggcttccccggcgcccagggcgagcccggcagccagggcgagcccggcgaccccggcctgcccggcccccccggcctgagcatcggcgacggcgaccagagaagaggcctgcccggcgagatgggccccaagggcttcatcggcgaccccggcatccccgccctgtacggcggcccccccggccccgacggcaagagaggcccccccggcccccccggcctgcccggcccccccggccccgacggcttcctgttcggcctgaagggcgccaagggcagagccggcttccccggcctgcccggcagccccggcgccagaggccccaagggctggaagggcgacgccggcgagtgcagatgcaccgagggcgacgaggccatcaagggcctgcccggcctgcccggccccaagggcttcgccggcatcaacggcgagcccggcagaaagggcgacagaggcgaccccggccagcacggcctgcccggcttccccggcctgaagggcgtgcccggcaacatcggcgcccccggccccaagggcgccaagggcgacagcagaaccatcaccaccaagggcgagagaggccagcccggcgtgcccggcgtgcccggcatgaagggcgacgacggcagccccggcagagacggcctggacggcttccccggcctgcccggcccccccggcgacggcatcaagggcccccccggcgaccccggctaccccggcatccccggcaccaagggcacccccggcgagatgggcccccccggcctgggcctgcccggcctgaagggccagagaggcttccccggcgacgccggcctgcccggcccccccggcttcctgggcccccccggccccgccggcacccccggccagatcgactgcgacaccgacgtgaagagagccgtgggcggcgacagacaggaggccatccagcccggctgcatcggcggccccaagggcctgcccggcctgcccggcccccccggccccaccggcgccaagggcctgagaggcatccccggcttcgccggcgccgacggcggccccggccccagaggcctgcccggcgacgccggcagagagggcttccccggcccccccggcttcatcggccccagaggcagcaagggcgccgtgggcctgcccggccccgacggcagccccggccccatcggcctgcccggccccgacggcccccccggcgagagaggcctgcccggcgaggtgctgggcgcccagcccggccccagaggcgacgccggcgtgcccggccagcccggcctgaagggcctgcccggcgacagaggcccccccggcttcagaggcagccagggcatgcccggcatgcccggcctgaagggccagcccggcctgcccggccccagcggccagcccggcctgtacggcccccccggcctgcacggcttccccggcgcccccggccaggagggccccctgggcctgcccggcatccccggcagagagggcctgcccggcgacagaggcgaccccggcgacaccggcgcccccggccccgtgggcatgaagggcctgagcggcgacagaggcgacgccggcttcaccggcgagcagggccaccccggcagccccggcttcaagggcatcgacggcatgcccggcacccccggcctgaagggcgacagaggcagccccggcatggacggcttccagggcatgcccggcctgaagggcagacccggcttccccggcagcaagggcgaggccggcttcttcggcatccccggcctgaagggcctggccggcgagcccggcttcaagggcagcagaggcgaccccggcccccccggccccccccccgtgatcctgcccggcatgaaggacatcaagggcgagaagggcgacgagggccccatgggcctgaagggctacctgggcgccaagggcatccagggcatgcccggcatccccggcctgagcggcatccccggcctgcccggcagacccggccacatcaagggcgtgaagggcgacatcggcgtgcccggcatccccggcctgcccggcttccccggcgtggccggcccccccggcatcaccggcttccccggcttcatcggcagcagaggcgacaagggcgcccccggcagagccggcctgtacggcgagatcggcgccaccggcgacttcggcgacatcggcgacaccatcaacctgcccggcagacccggcctgaagggcgagagaggcaccaccggcatccccggcctgaagggcttcttcggcgagaagggcaccgagggcgacatcggcttccccggcatcaccggcgtgaccggcgtgcagggcccccccggcctgaagggccagaccggcttccccggcctgaccggcccccccggcagccagggcgagctgggcagaatcggcctgcccggcggcaagggcgacgacggctggcccggcgcccccggcctgcccggcttccccggcctgagaggcatcagaggcctgcacggcctgcccggcaccaagggcttccccggcagccccggcagcgacatccacggcgaccccggcttccccggcccccccggcgagagaggcgaccccggcgaggccaacaccctgcccggccccgtgggcgtgcccggccagaagggcgaccagggcgcccccggcgagagaggcccccccggcagccccggcctgcagggcttccccggcatcaccccccccagcaacatcagcggcgcccccggcgacaagggcgcccccggcatcttcggcctgaagggctacagaggcccccccggcccccccggcagcgccgccctgcccggcagcaagggcgacaccggcaaccccggcgcccccggcacccccggcaccaagggctgggccggcgacagcggcccccagggcagacccggcgtgttcggcctgcccggcgagaagggccccagaggcgagcagggcttcatgggcaacaccggccccaccggcgccgtgggcgacagaggccccaagggccccaagggcgaccccggcttccccggcgcccccggcaccgtgggcgcccccggcatcgccggcatcccccagaagatcgccgtgcagcccggcaccgtgggcccccagggcagaagaggcccccccggcgcccccggcgagatgggcccccagggcccccccggcgagcccggcttcagaggcgcccccggcaaggccggcccccagggcagaggcggcgtgagcgccgtgcccggcttcagaggcgacgagggccccatcggccaccagggccccatcggccaggagggcgcccccggcagacccggcagccccggcctgcccggcatgcccggcagaagcgtgagcatcggctacctgctggtgaagcacagccagaccgaccaggagcccatgtgccccgtgggcatgaacaagctgtggagcggctacagcctgctgtacttcgagggccaggagaaggcccacaaccaggacctgggcctggccggcagctgcctggccagattcagcaccatgcccttcctgtactgcaaccccggcgacgtgtgctactacgccagcagaaacgacaagagctactggctgagcaccaccgcccccctgcccatgatgcccgtggccgaggacgagatcaagccctacatcagcagatgcagcgtgtgcgaggcccccgccatcgccatcgccgtgcacagccaggacgtgagcatcccccactgccccgccggctggagaagcctgtggatcggctacagcttcctgatgcacaccgccgccggcgacgagggcggcggccagagcctggtgagccccggcagctgcctggaggacttcagagccacccccttcatcgagtgcaacggcggcagaggcacctgccactactacgccaacaagtacagcttctggctgaccaccatccccgagcagagcttccagggcagccccagcgccgacaccctgaaggccggcctgatcagaacccacatcagcagatgccaggtgtgcatgaagaacctgtga

SEQ ID NO: 7431 - RNA, 5139 nt, synthetic construct
  misc_feature 1..5139: note = derived and/or modified sequence opt5 fromCanstatin__Homo_sapiens__CCDS41907.1
  source 1..5139: mol_type = other RNA
atgggcagagaccagcgggccgtggctgggcccgccctgcgcagatggctcctgcttggaaccgtcacagttggcttcctggcgcaaagcgtgctcgctggggtgaagaaatttgatgtcccttgcggaggccgggactgttccgggggatgccagtgttacccggagaagggcggccgcgggcagcccggacctgtgggcccccaggggtataacggacctcccggcctgcaagggttccctggacttcagggcagaaaaggcgataagggggaacggggagccccgggcgttacggggcccaaaggagacgtgggcgcccgcggggtctctggatttcctggcgctgatggcatccccgggcaccctggacagggcgggcccagaggacggccgggctacgacgggtgcaatggcacccagggagatagcggccctcaagggccccctggatccgagggcttcacagggcctcccggaccccagggcccgaaggggcagaagggcgaaccctatgccctgcctaaagaggaacgcgacagataccggggagagcccggcgagcctgggctcgtgggatttcagggacccccggggcgccctggacatgttggccaaatggggcccgtgggcgctcctggaagacccggccctcccgggccgcctggacccaagggccagcaggggaaccggggactgggcttctatggggtcaaaggcgaaaagggagatgtgggccaacccgggcctaatggcattccgtctgacaccctgcaccccatcattgcccctacaggcgtgacctttcatcccgatcagtacaaaggggagaagggaagcgaaggcgagcctggcatccgcgggatttccctcaagggagaggaaggcatcatggggttccccggactgagaggctatcctgggctttctggagagaaaggcagccccggccagaaggggtcccggggactggacggctaccaggggccggatggacctagaggccccaaaggggaagcgggagaccctgggcccccgggcctccctgcctacagcccccacccttctctggctaagggcgcccgcggagaccccggctttcccggggctcaaggagagcctggctcccagggggaaccgggagatcccggccttcctgggccccctggcctgagcatcggagacggcgatcagcggagagggctccccggagagatgggccctaaagggttcattggagacccgggcatccccgccctgtatggcgggcctcccggacctgatggcaagcgcgggcccccgggacctcccggcctgcccgggcctcccggacctgacggctttctcttcggcctgaaaggggcgaagggacgggccggctttccggggcttcccggatctcctggcgctagagggcccaagggatggaaaggcgatgccggcgagtgtcgctgcacagaaggggacgaggctattaagggactgcctggcctccccgggccgaaaggattcgccggcatcaacggggaacctggccggaagggagatagaggcgaccccgggcagcatggactgcctggcttccccgggcttaaaggagtccctggcaatattggggcccccggcccgaagggagctaagggcgattcccgcaccatcacgaccaaaggggagcggggacaacctggcgttcccggggtgcccggaatgaagggcgacgacgggagccctggcagagatggactggacggctttccggggctccccggacctcccggcgatgggattaaaggacctcccggcgaccctggctacccggggatccccggaacaaagggcacccctggggaaatgggaccccctggcctggggctgcccggactcaaaggccagcgcggcttcccgggggatgcgggactgcctggccctcccgggtttcttggacctcccggccccgccgggacaccgggacagatcgactgtgataccgacgtgaagcgggctgtcggcggcgatagacaggaggccattcaacccgggtgcatcggaggccctaaggggctgcccggactccctgggcccccgggccctacgggagccaaaggcctgcggggcattcccgggttcgctggagccgacggcgggcctggaccccgcggccttcctggggatgcgggaagagagggctttcccggcccgcctgggttcatcggaccccggggctctaagggggctgtgggactgcccggccctgacgggtccccgggacccattggcctccctggccccgatgggcctcccggagaaagaggcctgcctggggaggttctgggagcccagcccggcccgcgcggggacgccggagtgcctggccagcccggcctcaaagggctgcctggagaccgggggcccccgggctttagaggaagccagggcatgcctgggatgcccggccttaagggacaacccggcctgcctgggccctccggacagcctggcctctatgggccgcccggactgcacggcttccctggggctcccggccaggaaggacctctgggccttcccgggatccctggacgcgagggcctcccgggggatagaggagaccccggcgatacaggggcccctggccccgtcggaatgaaaggcctgtctggggaccggggagatgctggctttaccggggaacaaggacaccctggcagccccgggttcaagggcatcgacggaatgccgggcacacctgggctgaagggagatcgcggctcccccgggatggacggatttcagggcatgcccggcctcaaagggagacctggattccccggcagcaagggggaggccggatttttcggcattcctgggctgaaaggacttgcgggcgagccgggcttcaaggggtctcggggagatcccggccctcccgggcctcccccggtgatcctgcctggaatgaaagacattaagggcgaaaaaggggatgagggacccatgggcctcaagggctacctgggggccaagggaatccagggcatgcctgggattcccggactgtccggcatcccggggcttcctggacgccccggccatatcaaaggcgttaagggggacattggagtgcccggcatccctgggctccccggatttcctggcgtcgctgggccgcccggaattaccggcttccctggctttatcgggagcagaggagataaaggcgcccccgggcgggctggactgtatggcgaaattggggccaccggagacttcggcgacatcggcgatacaattaacctgcctgggcgccccggactcaagggcgagagagggacgaccggaatccctggcctgaaagggtttttcggagagaagggcacagaaggcgacatcgggtttccgggaattaccggcgtgacaggggtccagggaccccctggccttaaggggcaaaccggcttccccggactgacgggccctcccgggtctcagggagagctcggccggatcgggctgccgggaggcaaaggggatgacggctggcctggagcgcccggcctgcccgggtttcctggacttcgcggcattagagggctccacggactgcccggcacaaaggggttccctggcagcccgggatccgatatccatggcgaccccgggtttcctggaccccctggcgaaagaggggatcccggagaggccaataccctgccgggccctgtgggggttcccggccagaaaggagaccagggcgctcctggggaacggggaccccctggctctcccgggctccaaggattcccgggcattacaccccctagcaacatctccggcgcccccggggataagggagctcctggcatctttgggctgaaaggataccgcggcccgcccgggcctcccggaagcgccgcccttcctggctctaagggcgacaccgggaatcccggagctcctggcacccccgggacaaagggatgggcgggcgattccgggccgcagggacggcctggcgtgttcggcctgcccggggagaaaggacctagaggcgagcaggggttcatgggaaacacgggccccaccggggccgtcggagaccgcggcccgaagggccctaaaggggaccccggatttcccggcgctcctgggacagtgggagcccccggcattgccgggatccctcagaagattgctgttcaaccgggaaccgtgggcccccagggccggagagggcctcccggagcccctggcgaaatggggccccagggaccgcctggcgagcccgggttccgcggagcgcctggcaaagctggcccccaagggcggggaggcgtcagcgccgtgcctgggtttagaggagatgaaggccccatcgggcaccagggaccgattggccaggagggcgcccccgggcgccctggatctcccggcctccctgggatgcccggacggtccgtgagcatcggctatctgctggttaagcactcccagacagaccaagaacctatgtgtccggtcgggatgaataaactttggtctggctacagcctcctgtacttcgagggacaggagaaggctcataaccaggatctgggcctcgccgggtcctgcctggcgagattttctaccatgcccttcctttattgtaatcctggagacgtgtgctactatgctagccggaacgataagtcctactggctgagcacgaccgctcccctccctatgatgcccgtggccgaagacgagatcaaaccgtatatttctcgctgctccgtctgtgaagcccctgccatcgctattgccgtgcacagccaggatgtttctatcccccattgccctgcgggctggagatccctgtggattgggtacagctttctgatgcacacagccgctggagacgagggcgggggccaatctcttgtgagccccggatcctgtctggaagatttccgggccaccccgtttatcgagtgcaatggcgggcgcggaacatgtcattattacgctaacaagtacagcttctggctcaccacgatccctgagcagtcttttcagggctcccccagcgccgacacactgaaagccgggctcattagaacccacatctcccggtgccaggtctgtatgaagaacctgtga

SEQ ID NO: 7432 - RNA, 5139 nt, synthetic construct
  misc_feature 1..5139: note = derived and/or modified sequence opt6 fromCanstatin__Homo_sapiens__CCDS41907.1
  source 1..5139: mol_type = other RNA
atgggaagagatcaaagggcagtggcgggacctgcactacgaagatggttattattaggaacagttacagtaggattcttggcacaatctgtacttgcaggggtaaaaaaatttgatgtaccctgcggaggacgtgattgtagtggcggttgccaatgttacccagaaaaaggtggtaggggtcaaccgggaccagttggaccacaaggatataatggaccaccaggactacaaggatttcctggcttacagggtagaaaaggcgataagggggaaagaggagctccaggtgtcacaggtccaaaaggcgacgttggagcaagaggggtttccggatttcccggggcagatggaatcccgggacatccaggtcaaggaggtcctcgcggtcgaccaggatatgacggatgcaacggtactcagggtgacagtggacctcaaggtccaccagggagtgagggatttactggacctccgggtccgcaagggccgaaaggacagaagggagaaccatacgcgttaccaaaagaggaaagggatcgctatagaggggaaccaggggaaccaggcttagtgggatttcaaggaccacctggacgcccaggccatgtaggacaaatgggacctgtaggagcccctggaagacccggtccgccaggaccaccaggtccaaaaggacaacaggggaatcgcggcttaggtttctatggagtaaaaggtgaaaaaggagatgttggtcaacccggtcccaatggaataccttcagatacactacatccaataatagccccaacaggcgtaacatttcatcccgaccaatataaaggagaaaaaggtagtgaaggggaacctggaatccgcggtatatccttaaaaggagaggaaggaatcatgggatttccaggactccgaggttatcctggcttaagcggagaaaaagggtctccgggacaaaaaggatcgagaggactagacggatatcaaggaccggacggtcctagagggccaaagggagaagcaggcgacccggggccaccaggactcccagcatattcaccacatcccagcttagccaaaggagcacgtggggacccggggttcccaggagcgcaaggagaaccaggaagtcaaggtgaaccaggtgatcctggtttacctggaccacctggtttaagtataggagatggtgatcaaaggcgaggattgcccggtgaaatggggcctaagggatttataggagatccaggaataccagcactatatggagggcctcccggtccagatggaaaaagaggaccaccgggccctccggggctacctggaccaccaggccctgatggtttcttatttggtttaaaaggagcaaagggcagagcaggtttccccggacttccaggaagtcctggagccagagggcctaagggatggaaaggagatgccggtgaatgtagatgcactgaaggcgatgaagcaataaaaggtcttcctggtttacctggcccgaagggatttgctggtattaatggagagcctggaagaaaaggagatagaggggatccaggacaacacggtttacctggatttccaggcctaaaaggagtcccaggaaatatcggcgcaccaggtcccaaaggagcaaaaggggatagtagaacaattacaactaagggagaaaggggtcaaccaggagtaccgggagtaccaggaatgaagggtgacgatggaagtcccgggagagacggcctagatggatttccaggtttgccgggacctccaggggacggaataaaaggtcctccaggagatccaggttatcccggcataccaggtaccaaaggaacgcctggcgagatgggtccaccaggcttaggtttaccaggattaaaaggacaaaggggattcccaggcgatgcagggttaccgggtcccccagggttcttaggaccaccgggaccggcaggtactccagggcaaattgactgtgatacagatgtaaagagagcagttggtggagacaggcaagaagctatacagcctggttgtattggtggtcctaaagggctaccgggactcccagggcccccaggacctacaggcgcaaagggtttacgaggtattcctggctttgccggagctgacggaggacctggtccgagggggttaccgggtgatgctggtagagaaggatttccaggcccaccaggcttcattggtcctagaggttcgaaaggggcagtgggactgccgggtcctgacggaagtcctgggccaattggactgcctggtcctgatgggcctccaggggagagaggactaccaggcgaagttcttggagcgcaaccgggtccgaggggggacgccggagtgcccggacaaccaggacttaaaggtctacctggtgacagaggccctcctggtttcagaggaagtcaaggcatgcccgggatgccaggattgaaaggccaaccaggcctcccaggacctagcggtcaacccgggctatatggtcctcccggattacatggattccccggagcaccggggcaggaaggtccattaggattaccaggtatacctggccgtgagggtcttccaggagacagaggtgacccaggagatacgggggcgcctggaccggtaggtatgaaaggtttaagtggagatcgaggtgatgcaggttttaccggcgaacaaggtcatcctggcagtcccgggtttaaaggtattgatggtatgccgggaactcccggattaaagggagatcgagggtccccgggaatggatggattccaaggaatgcccggattaaaggggaggccgggcttcccaggatctaaaggagaagcagggtttttcggaataccaggcttaaaaggactggcgggagagccagggttcaaaggtagtagaggggatccgggaccacctgggccaccaccagtgatattgcctggtatgaaggatataaaaggggagaagggggatgagggacccatgggactaaaaggatacttaggagctaaagggatacagggaatgcccggtataccgggcttgtcaggaatacctggtctccctggcaggccgggacatattaaaggagtaaaaggagatataggggttccaggaatacccggattacctggatttcctggtgttgctggaccacccggaataaccggctttccaggttttattggcagtagaggagataaaggagcgcctggacgtgccggactttatggagaaataggtgccacgggtgattttggagatatcggagatacaataaatttacctggaagacctggtctaaaaggtgaaagggggactacaggaatacccggccttaagggattttttggggaaaagggtacagagggagatataggttttccaggaattactggagtcacaggcgtccaggggccgcccggtttaaagggacaaacaggatttccaggactaacgggccctcctggtagtcaaggagaactgggaagaataggactaccaggcggcaagggtgacgatggatggccaggagcaccaggtctacccggctttccaggacttagagggataagaggacttcatggtctacctggaactaaaggatttccaggaagtcccggatcagacatacatggcgatcctggttttccaggtccaccgggagaacgaggggacccaggagaagcaaatacgttgcctggaccggtcggtgttccaggtcaaaaaggtgatcaaggggctccaggagagcgaggaccaccaggttcacccggattacaagggtttcctggcattaccccgccatctaatataagtggtgcaccaggagataaaggtgccccaggtatattcgggttgaaaggctatagagggccaccaggtccaccaggctccgccgcattaccaggctcaaaaggtgatactggaaaccctggtgcaccgggaactccaggcacgaagggttgggcgggggatagtggtccgcaaggtagaccaggagtgtttggtcttccaggagaaaaaggaccacgtggagaacaaggatttatgggaaacacaggtcccactggagctgtgggagatagaggtccaaaaggacccaaaggggaccctggatttccaggggctccgggaacggtgggggctcctggtatagcaggcattcctcagaaaatagcggtccaaccaggaacagtaggacctcaaggtcgcagaggaccaccaggtgcaccaggtgaaatgggaccgcaaggccccccaggcgaacctggatttagaggagctcctggtaaagcagggccacaaggccgtggtggagttagtgcagttccaggcttccgaggagatgaaggtcctatagggcatcaaggaccgataggacaggaaggagctccaggacgccctggtagtcctggattaccgggtatgccaggtcgttcggtaagtattggatacctattagtaaagcattctcaaacagatcaagagcccatgtgtcccgttggaatgaataaattgtggagtgggtacagcttattatatttcgagggtcaagaaaaagcacataatcaggatttaggattagccgggtcctgtttagcaagattctcgaccatgcctttcttgtactgcaatccgggtgatgtttgctattatgcatcacgcaacgataagtcatattggttaagtacaactgctcctttgcccatgatgccagtagctgaggatgaaataaaaccatatatatccagatgtagtgtctgcgaagcaccggctatagccatagcggtacattcacaagacgtcagcatcccacattgtccagcgggatggagatcattgtggataggatactcatttctaatgcacaccgcggcaggagatgaaggcggtggacaaagcttagtttcgccaggatcttgcctagaagactttagagctactccgtttatagaatgcaacgggggaaggggaacctgtcattattatgcaaataagtatagcttttggttaactacgattccagaacaaagtttccaaggctctccaagcgcagacaccttgaaagcagggttgatcagaactcacatttcacgatgtcaagtatgtatgaagaatttatag

SEQ ID NO: 7433 - protein, 184 aa, synthetic construct
  REGION 1..184: note = Endostatin__Homo_sapiens__Endostatin__Homo_sapiens_
MHSHRDFQPVLHLVALNSPLSGGMRGIRGADFQCFQQARAVGLAGTFRAFLSSRLQDLYSIVRRADRAAVPIVNLKDELLFPSWEALFSGSEGPLKPGARIFSFDGKDVLRHPTWPQKSVWHGSDPNGRRLTESYCETWRTEAPSATGQASSLLGGRLLGQSAASCHHAYIVLCIENSFMTASK

SEQ ID NO: 7434 - RNA, 555 nt, synthetic construct
  misc_feature 1..555: note = Endostatin__Homo_sapiens__NM_030582.3
  source 1..555: mol_type = other RNA
atgcacagccaccgcgacttccagccggtgctccacctggttgcgctcaacagccccctgtcaggcggcatgcggggcatccgcggggccgacttccagtgcttccagcaggcgcgggccgtggggctggcgggcaccttccgcgccttcctgtcctcgcgcctgcaggacctgtacagcatcgtgcgccgtgccgaccgcgcagccgtgcccatcgtcaacctcaaggacgagctgctgtttcccagctgggaggctctgttctcaggctctgagggtccgctgaagcccggggcacgcatcttctcctttgacggcaaggacgtcctgaggcaccccacctggccccagaagagcgtgtggcatggctcggaccccaacgggcgcaggctgaccgagagctactgtgagacgtggcggacggaggctccctcggccacgggccaggcctcctcgctgctggggggcaggctcctggggcagagtgccgcgagctgccatcacgcctacatcgtgctctgcattgagaacagcttcatgactgcctccaagtag

SEQ ID NO: 7435 - RNA, 555 nt, synthetic construct
  misc_feature 1..555: note = derived and/or modified sequence opt1 fromEndostatin__Homo_sapiens__NM_030582.3
  source 1..555: mol_type = other RNA
atgcacagccaccgcgacttccagcccgtgctgcacctcgtcgccctgaactccccgctgagcggcgggatgcggggcatccgcggggccgacttccagtgcttccagcaggcgcgggccgtgggcctcgccgggaccttccgcgccttcctgtccagccggctgcaggacctctactccatcgtgcgccgggccgaccgcgcggccgtccccatcgtgaacctgaaggacgagctcctgttccccagctgggaggccctgttctccggcagcgagggccccctgaagccgggggcccggatcttctccttcgacggcaaggacgtgctccgccaccccacctggccccagaagtccgtctggcacgggagcgaccccaacggccggcgcctgacggagagctactgcgagacctggcggaccgaggcgccgtccgccaccgggcaggccagctccctgctcggcggccgcctgctggggcagagcgccgcctcctgccaccacgcgtacatcgtgctctgcatcgagaacagcttcatgacggcctccaagtga

SEQ ID NO: 7436 - RNA, 555 nt, synthetic construct
  misc_feature 1..555: note = derived and/or modified sequence opt2 fromEndostatin__Homo_sapiens__NM_030582.3
  source 1..555: mol_type = other RNA
atgcactcccaccgcgacttccagcccgtcctccacctcgtcgccctcaactcccccctctccggcggcatgcgcggcatccgcggcgccgacttccagtgcttccagcaggcccgcgccgtcggcctcgccggcaccttccgcgccttcctctcctcccgcctccaggacctctactccatcgtccgccgcgccgaccgcgccgccgtccccatcgtcaacctcaaggacgagctcctcttcccctcctgggaggccctcttctccggctccgagggccccctcaagcccggcgcccgcatcttctccttcgacggcaaggacgtcctccgccaccccacctggccccagaagtccgtctggcacggctccgaccccaacggccgccgcctcaccgagtcctactgcgagacctggcgcaccgaggccccctccgccaccggccaggcctcctccctcctcggcggccgcctcctcggccagtccgccgcctcctgccaccacgcctacatcgtcctctgcatcgagaactccttcatgaccgcctccaagtga

SEQ ID NO: 7437 - RNA, 555 nt, synthetic construct
  misc_feature 1..555: note = derived and/or modified sequence opt3 fromEndostatin__Homo_sapiens__NM_030582.3
  source 1..555: mol_type = other RNA
atgcacagccatagagacttccagcccgtgctgcacctcgtcgcccttaactcccctctgtctggcgggatgaggggaatccggggtgctgattttcaatgcttccagcaggcacgcgccgttggcttggcggggacctttcgagctttcttatcaagtcgtctgcaggacctatacagcattgtgagaagggccgatcgggcagccgtaccaatagtgaatctcaaggacgagctgctttttccgtcctgggaagctctgttctctggatcggagggccccttgaaacctggtgcacgcatcttttcattcgatgggaaggacgtcctcagacatccaacatggccccagaaaagcgtgtggcacggaagtgatcctaacggcaggcggctgactgaatcctattgtgagacgtggcgcaccgaagccccatctgctacaggccaagccagctccctgctcgggggacgattactgggtcagtcagcggcaagttgccatcacgcctacattgttctttgtatcgagaatagctttatgactgcttctaagtga

SEQ ID NO: 7438 - RNA, 555 nt, synthetic construct
  misc_feature 1..555: note = derived and/or modified sequence opt4 fromEndostatin__Homo_sapiens__NM_030582.3
  source 1..555: mol_type = other RNA
atgcacagccacagagacttccagcccgtgctgcacctggtggccctgaacagccccctgagcggcggcatgagaggcatcagaggcgccgacttccagtgcttccagcaggccagagccgtgggcctggccggcaccttcagagccttcctgagcagcagactgcaggacctgtacagcatcgtgagaagagccgacagagccgccgtgcccatcgtgaacctgaaggacgagctgctgttccccagctgggaggccctgttcagcggcagcgagggccccctgaagcccggcgccagaatcttcagcttcgacggcaaggacgtgctgagacaccccacctggccccagaagagcgtgtggcacggcagcgaccccaacggcagaagactgaccgagagctactgcgagacctggagaaccgaggcccccagcgccaccggccaggccagcagcctgctgggcggcagactgctgggccagagcgccgccagctgccaccacgcctacatcgtgctgtgcatcgagaacagcttcatgaccgccagcaagtga

SEQ ID NO: 7439 - RNA, 555 nt, synthetic construct
  misc_feature 1..555: note = derived and/or modified sequence opt5 fromEndostatin__Homo_sapiens__NM_030582.3
  source 1..555: mol_type = other RNA
atgcacagccatagagacttccagcccgtgctgcacctcgtcgccctgaactcccctctttctggcgggatgcggggaatccgcggcgctgattttcaatgcttccagcaggccagagcggttgggctggctggaacctttcgggccttcctcagctcccgcctgcaggacctttactctattgtgagacgggccgatcgcgctgccgtgccgatcgtcaatctgaaggacgagctcctgtttcccagctgggaggctctgttctccggctctgaggggcctctcaaacccggagccagaatttttagcttcgatggcaaggacgtgctgcggcatcctacatggccccaaaaatccgtttggcacggcagcgatcctaacgggcgcagacttacggaatcttattgtgagacctggcggacagaagcgccgtccgccaccggacaggctagctctctgctcggcgggcgcctgcttggacagtccgccgctagctgccatcacgcctacatcgtgctgtgtattgaaaattcttttatgacagcgtccaagtga

SEQ ID NO: 7440 - RNA, 555 nt, synthetic construct
  misc_feature 1..555: note = derived and/or modified sequence opt6 fromEndostatin__Homo_sapiens__NM_030582.3
  source 1..555: mol_type = other RNA
atgcattcacatagagatttccaacccgtactacatttagtagcattaaattcaccattatcaggaggaatgagaggaataagaggagcagactttcaatgtttccaacaagcaagagctgtaggactagctggaacattcagagcatttttaagctcaagactacaagacttatacagtatagtaagacgagctgatagagcagcagtaccaatagtaaatttaaaagacgaactattatttccatcatgggaagcactattttcaggatcagaaggaccattaaaaccaggagcaagaatattttcatttgacggaaaagacgtattaagacatcccacatggccacaaaaaagcgtatggcatggatcagacccaaacggaagaagactaacagaatcatactgtgaaacatggagaacagaagcaccatcagcaacaggacaagcatcatcattattaggaggaagactattaggacaatcagcagcatcatgtcaccatgcatatatagtactatgtatagaaaactcattcatgacagcaagcaaataa

SEQ ID NO: 7441 - protein, 1356 aa, synthetic construct
  REGION 1..1356: note = FLK-1__Homo_sapiens__P35968
MQSKVLLAVALWLCVETRAASVGLPSVSLDLPRLSIQKDILTIKANTTLQITCRGQRDLDWLWPNNQSGSEQRVEVTECSDGLFCKTLTIPKVIGNDTGAYKCFYRETDLASVIYVYVQDYRSPFIASVSDQHGVVYITENKNKTVVIPCLGSISNLNVSLCARYPEKRFVPDGNRISWDSKKGFTIPSYMISYAGMVFCEAKINDESYQSIMYIVVVVGYRIYDVVLSPSHGIELSVGEKLVLNCTARTELNVGIDFNWEYPSSKHQHKKLVNRDLKTQSGSEMKKFLSTLTIDGVTRSDQGLYTCAASSGLMTKKNSTFVRVHEKPFVAFGSGMESLVEATVGERVRIPAKYLGYPPPEIKWYKNGIPLESNHTIKAGHVLTIMEVSERDTGNYTVILTNPISKEKQSHVVSLVVYVPPQIGEKSLISPVDSYQYGTTQTLTCTVYAIPPPHHIHWYWQLEEECANEPSQAVSVTNPYPCEEWRSVEDFQGGNKIEVNKNQFALIEGKNKTVSTLVIQAANVSALYKCEAVNKVGRGERVISFHVTRGPEITLQPDMQPTEQESVSLWCTADRSTFENLTWYKLGPQPLPIHVGELPTPVCKNLDTLWKLNATMFSNSTNDILIMELKNASLQDQGDYVCLAQDRKTKKRHCVVRQLTVLERVAPTITGNLENQTTSIGESIEVSCTASGNPPPQIMWFKDNETLVEDSGIVLKDGNRNLTIRRVRKEDEGLYTCQACSVLGCAKVEAFFIIEGAQEKTNLEIIILVGTAVIAMFFWLLLVIILRTVKRANGGELKTGYLSIVMDPDELPLDEHCERLPYDASKWEFPRDRLKLGKPLGRGAFGQVIEADAFGIDKTATCRTVAVKMLKEGATHSEHRALMSELKILIHIGHHLNVVNLLGACTKPGGPLMVIVEFCKFGNLSTYLRSKRNEFVPYKTKGARFRQGKDYVGAIPVDLKRRLDSITSSQSSASSGFVEEKSLSDVEEEEAPEDLYKDFLTLEHLICYSFQVAKGMEFLASRKCIHRDLAARNILLSEKNVVKICDFGLARDIYKDPDYVRKGDARLPLKWMAPETIFDRVYTIQSDVWSFGVLLWEIFSLGASPYPGVKIDEEFCRRLKEGTRMRAPDYTTPEMYQTMLDCWHGEPSQRPTFSELVEHLGNLLQANAQQDGKDYIVLPISETLSMEEDSGLSLPTSPVSCMEEEEVCDPKFHYDNTAGISQYLQNSKRKSRPVSVKTFEDIPLEEPEVKVIPDDNQTDSGMVLASEELKTLEDRTKLSPSFGGMVPSKSRESVASEGSNQTSGYQSGYHSDDTDTTVYSSEEAELLKLIEIGVQTGSTAQILQPDSGTTLSSPPV

SEQ ID NO: 7442 - RNA, 4071 nt, synthetic construct
  misc_feature 1..4071: note = FLK-1__Homo_sapiens__AAB88005
  source 1..4071: mol_type = other RNA
atgcagagcaaggtgctgctggccgtcgccctgtggctctgcgtggagacccgggccgcctctgtgggtttgcctagtgtttctcttgatctgcccaggctcagcatacaaaaagacatacttacaattaaggctaatacaactcttcaaattacttgcaggggacagagggacttggactggctttggcccaataatcagagtggcagtgagcaaagggtggaggtgactgagtgcagcgatggcctcttctgtaagacactcacaattccaaaagtgatcggaaatgacactggagcctacaagtgcttctaccgggaaactgacttggcctcggtcatttatgtctatgttcaagattacagatctccatttattgcttctgttagtgaccaacatggagtcgtgtacattactgagaacaaaaacaaaactgtggtgattccatgtctcgggtccatttcaaatctcaacgtgtcactttgtgcaagatacccagaaaagagatttgttcctgatggtaacagaatttcctgggacagcaagaagggctttactattcccagctacatgatcagctatgctggcatggtcttctgtgaagcaaaaattaatgatgaaagttaccagtctattatgtacatagttgtcgttgtagggtataggatttatgatgtggttctgagtccgtctcatggaattgaactatctgttggagaaaagcttgtcttaaattgtacagcaagaactgaactaaatgtggggattgacttcaactgggaatacccttcttcgaagcatcagcataagaaacttgtaaaccgagacctaaaaacccagtctgggagtgagatgaagaaatttttgagcaccttaactatagatggtgtaacccggagtgaccaaggattgtacacctgtgcagcatccagtgggctgatgaccaagaagaacagcacatttgtcagggtccatgaaaaaccttttgttgcttttggaagtggcatggaatctctggtggaagccacggtgggggagcgtgtcagaatccctgcgaagtaccttggttacccacccccagaaataaaatggtataaaaatggaataccccttgagtccaatcacacaattaaagcggggcatgtactgacgattatggaagtgagtgaaagagacacaggaaattacactgtcatccttaccaatcccatttcaaaggagaagcagagccatgtggtctctctggttgtgtatgtcccaccccagattggtgagaaatctctaatctctcctgtggattcctaccagtacggcaccactcaaacgctgacatgtacggtctatgccattcctcccccgcatcacatccactggtattggcagttggaggaagagtgcgccaacgagcccagccaagctgtctcagtgacaaacccatacccttgtgaagaatggagaagtgtggaggacttccagggaggaaataaaattgaagttaataaaaatcaatttgctctaattgaaggaaaaaacaaaactgtaagtacccttgttatccaagcggcaaatgtgtcagctttgtacaaatgtgaagcggtcaacaaagtcgggagaggagagagggtgatctccttccacgtgaccaggggtcctgaaattactttgcaacctgacatgcagcccactgagcaggagagcgtgtctttgtggtgcactgcagacagatctacgtttgagaacctcacatggtacaagcttggcccacagcctctgccaatccatgtgggagagttgcccacacctgtttgcaagaacttggatactctttggaaattgaatgccaccatgttctctaatagcacaaatgacattttgatcatggagcttaagaatgcatccttgcaggaccaaggagactatgtctgccttgctcaagacaggaagaccaagaaaagacattgcgtggtcaggcagctcacagtcctagagcgtgtggcacccacgatcacaggaaacctggagaatcagacgacaagtattggggaaagcatcgaagtctcatgcacggcatctgggaatccccctccacagatcatgtggtttaaagataatgagacccttgtagaagactcaggcattgtattgaaggatgggaaccggaacctcactatccgcagagtgaggaaggaggacgaaggcctctacacctgccaggcatgcagtgttcttggctgtgcaaaagtggaggcatttttcataatagaaggtgcccaggaaaagacgaacttggaaatcattattctagtaggcacggcggtgattgccatgttcttctggctacttcttgtcatcatcctacggaccgttaagcgggccaatggaggggaactgaagacaggctacttgtccatcgtcatggatccagatgaactcccattggatgaacattgtgaacgactgccttatgatgccagcaaatgggaattccccagagaccggctgaagctaggtaagcctcttggccgtggtgcctttggccaagtgattgaagcagatgcctttggaattgacaagacagcaacttgcaggacagtagcagtcaaaatgttgaaagaaggagcaacacacagtgagcatcgagctctcatgtctgaactcaagatcctcattcatattggtcaccatctcaatgtggtcaaccttctaggtgcctgtaccaagccaggagggccactcatggtgattgtggaattctgcaaatttggaaacctgtccacttacctgaggagcaagagaaatgaatttgtcccctacaagaccaaaggggcacgattccgtcaagggaaagactacgttggagcaatccctgtggatctgaaacggcgcttggacagcatcaccagtagccagagctcagccagctctggatttgtggaggagaagtccctcagtgatgtagaagaagaggaagctcctgaagatctgtataaggacttcctgaccttggagcatctcatctgttacagcttccaagtggctaagggcatggagttcttggcatcgcgaaagtgtatccacagggacctggcggcacgaaatatcctcttatcggagaagaacgtggttaaaatctgtgactttggcttggcccgggatatttataaagatccagattatgtcagaaaaggagatgctcgcctccctttgaaatggatggccccagaaacaatttttgacagagtgtacacaatccagagtgacgtctggtcttttggtgttttgctgtgggaaatattttccttaggtgcttctccatatcctggggtaaagattgatgaagaattttgtaggcgattgaaagaaggaactagaatgagggcccctgattatactacaccagaaatgtaccagaccatgctggactgctggcacggggagcccagtcagagacccacgttttcagagttggtggaacatttgggaaatctcttgcaagctaatgctcagcaggatggcaaagactacattgttcttccgatatcagagactttgagcatggaagaggattctggactctctctgcctacctcacctgtttcctgtatggaggaggaggaagtatgtgaccccaaattccattatgacaacacagcaggaatcagtcagtatctgcagaacagtaagcgaaagagccggcctgtgagtgtaaaaacatttgaagatatcccgttagaagaaccagaagtaaaagtaatcccagatgacaaccagacggacagtggtatggttcttgcctcagaagagctgaaaactttggaagacagaaccaaattatctccatcttttggtggaatggtgcccagcaaaagcagggagtctgtggcatctgaaggctcaaaccagacaagcggctaccagtccggatatcactccgatgacacagacaccaccgtgtactccagtgaggaagcagaacttttaaagctgatagagattggagtgcaaaccggtagcacagcccagattctccagcctgactcggggaccacactgagctctcctcctgtttaa

SEQ ID NO: 7443 - RNA, 4071 nt, synthetic construct
  misc_feature 1..4071: note = derived and/or modified sequence opt1 fromFLK-1__Homo_sapiens__AAB88005
  source 1..4071: mol_type = other RNA
atgcagagcaaggtgctgctcgccgtcgccctgtggctgtgcgtggagacccgcgcggcctccgtgggcctccccagcgtctccctggacctgccccggctcagcatccagaaggacatcctgaccatcaaggccaacacgaccctgcagatcacgtgccgcgggcagcgggacctcgactggctgtggcccaacaaccagtccggcagcgagcagcgcgtggaggtgaccgagtgctccgacgggctgttctgcaagaccctcaccatccccaaggtcatcggcaacgacaccggggcctacaagtgcttctaccgggagaccgacctggccagcgtgatctacgtgtacgtccaggactaccgctcccccttcatcgcgagcgtgtccgaccagcacggcgtggtctacatcacggagaacaagaacaagaccgtggtgatcccgtgcctgggcagcatctccaacctcaacgtcagcctgtgcgcccggtaccccgagaagcgcttcgtgcccgacgggaaccggatctcctgggacagcaagaagggcttcaccatcccctcctacatgatcagctacgccgggatggtgttctgcgaggccaagatcaacgacgagtcctaccagagcatcatgtacatcgtcgtggtggtcggctaccgcatctacgacgtggtgctgagcccgtcccacgggatcgagctcagcgtcggcgagaagctggtgctgaactgcaccgcgcggacggagctcaacgtcggcatcgacttcaactgggagtacccctccagcaagcaccagcacaagaagctggtgaaccgcgacctgaagacccagtccgggagcgagatgaagaagttcctctccaccctgaccatcgacggcgtgacgcggagcgaccaggggctgtacacgtgcgccgcctccagcggcctcatgaccaagaagaactccaccttcgtccgcgtgcacgagaagcccttcgtggccttcggcagcgggatggagtccctggtcgaggccaccgtgggcgagcgggtgcgcatccccgcgaagtacctggggtacccgccgcccgagatcaagtggtacaagaacggcatccccctcgagagcaaccacaccatcaaggccgggcacgtcctgaccatcatggaggtgtccgagcgggacaccggcaactacacggtgatcctgaccaacccgatcagcaaggagaagcagtcccacgtcgtgagcctcgtggtctacgtgccgccccagatcggcgagaagtccctgatcagccccgtggacagctaccagtacgggaccacccagacgctgacctgcaccgtctacgccatcccgccgccccaccacatccactggtactggcagctcgaggaggagtgcgccaacgagccctcccaggccgtgagcgtgaccaacccctacccctgcgaggagtggcgctccgtcgaggacttccagggcgggaacaagatcgaggtgaacaagaaccagttcgcgctgatcgagggcaagaacaagacggtgagcaccctggtcatccaggccgccaacgtgtccgccctctacaagtgcgaggccgtgaacaaggtcgggcggggcgagcgcgtgatcagcttccacgtgacccggggccccgagatcaccctgcagcccgacatgcagcccacggagcaggagtccgtcagcctgtggtgcaccgcggaccgctccaccttcgagaacctcacctggtacaagctggggccccagcccctgccgatccacgtgggcgagctccccacccccgtgtgcaagaacctggacacgctgtggaagctcaacgccaccatgttcagcaactccaccaacgacatcctgatcatggagctgaagaacgccagcctgcaggaccagggggactacgtctgcctcgcccaggaccgcaagaccaagaagcggcactgcgtggtgcgccagctgacggtcctggagcgggtggcccccaccatcaccggcaacctcgagaaccagaccacgtccatcggggagagcatcgaggtgtcctgcaccgcgagcggcaacccgccgccccagatcatgtggttcaaggacaacgagaccctggtcgaggactccggcatcgtgctgaaggacgggaaccgcaacctcaccatccggcgcgtgcggaaggaggacgagggcctgtacacgtgccaggcctgcagcgtcctggggtgcgccaaggtggaggccttcttcatcatcgagggcgcgcaggagaagaccaacctcgagatcatcatcctggtgggcaccgccgtcatcgccatgttcttctggctgctcctggtgatcatcctgcgcaccgtgaagcgggccaacgggggcgagctcaagacggggtacctgagcatcgtcatggaccccgacgagctgcccctcgacgagcactgcgagcgcctgccctacgacgcctccaagtgggagttcccccgggaccgcctgaagctcggcaagcccctggggcggggcgcgttcggccaggtgatcgaggccgacgccttcgggatcgacaagaccgcgacctgccgcaccgtggccgtcaagatgctgaaggagggcgccacgcacagcgagcaccgggccctcatgtccgagctgaagatcctgatccacatcgggcaccacctcaacgtggtcaacctgctgggcgcctgcaccaagcccgggggccccctcatggtgatcgtggagttctgcaagttcggcaacctgagcacctacctgcgctccaagcggaacgagttcgtcccctacaagaccaagggggcccgcttccggcagggcaaggactacgtgggggccatccccgtggacctcaagcgccgcctggacagcatcacgtccagccagtccagcgcgtccagcggcttcgtcgaggagaagtccctgagcgacgtggaggaggaggaggccccggaggacctctacaaggacttcctgaccctggagcacctcatctgctactccttccaggtggccaaggggatggagttcctggccagccggaagtgcatccaccgcgacctggcggcccggaacatcctcctgtccgagaagaacgtcgtgaagatctgcgacttcggcctggcccgcgacatctacaaggaccccgactacgtgcggaagggcgacgcccgcctccccctgaagtggatggcccccgagaccatcttcgaccgggtctacaccatccagagcgacgtgtggtccttcggggtgctgctctgggagatcttcagcctgggcgcgagcccgtaccccggggtcaagatcgacgaggagttctgccgccggctgaaggagggcacgcgcatgcgggcccccgactacaccacccccgagatgtaccagaccatgctcgactgctggcacggggagccgtcccagcgccccacgttcagcgagctggtggagcacctgggcaacctcctgcaggccaacgcccagcaggacggcaaggactacatcgtgctgcccatctccgagaccctcagcatggaggaggactccgggctgagcctgccgacctcccccgtcagctgcatggaggaggaggaggtgtgcgaccccaagttccactacgacaacaccgccggcatctcccagtacctccagaacagcaagcggaagtcccgccccgtgagcgtcaagacgttcgaggacatcccgctggaggagcccgaggtgaaggtgatccccgacgacaaccagaccgactccgggatggtcctggcgagcgaggagctcaagaccctggaggaccggaccaagctgtcccccagcttcggcggcatggtgccgtccaagagccgcgagtccgtggccagcgaggggagcaaccagacctccggctaccagagcgggtaccactccgacgacacggacaccaccgtctacagctccgaggaggccgagctcctgaagctgatcgagatcggcgtgcagaccgggagcacggcccagatcctccagcccgactccggcaccaccctgagctccccgcccgtgtga

SEQ ID NO: 7444 - RNA, 4071 nt, synthetic construct
  misc_feature 1..4071: note = derived and/or modified sequence opt2 fromFLK-1__Homo_sapiens__AAB88005
  source 1..4071: mol_type = other RNA
atgcagtccaaggtcctcctcgccgtcgccctctggctctgcgtcgagacccgcgccgcctccgtcggcctcccctccgtctccctcgacctcccccgcctctccatccagaaggacatcctcaccatcaaggccaacaccaccctccagatcacctgccgcggccagcgcgacctcgactggctctggcccaacaaccagtccggctccgagcagcgcgtcgaggtcaccgagtgctccgacggcctcttctgcaagaccctcaccatccccaaggtcatcggcaacgacaccggcgcctacaagtgcttctaccgcgagaccgacctcgcctccgtcatctacgtctacgtccaggactaccgctcccccttcatcgcctccgtctccgaccagcacggcgtcgtctacatcaccgagaacaagaacaagaccgtcgtcatcccctgcctcggctccatctccaacctcaacgtctccctctgcgcccgctaccccgagaagcgcttcgtccccgacggcaaccgcatctcctgggactccaagaagggcttcaccatcccctcctacatgatctcctacgccggcatggtcttctgcgaggccaagatcaacgacgagtcctaccagtccatcatgtacatcgtcgtcgtcgtcggctaccgcatctacgacgtcgtcctctccccctcccacggcatcgagctctccgtcggcgagaagctcgtcctcaactgcaccgcccgcaccgagctcaacgtcggcatcgacttcaactgggagtacccctcctccaagcaccagcacaagaagctcgtcaaccgcgacctcaagacccagtccggctccgagatgaagaagttcctctccaccctcaccatcgacggcgtcacccgctccgaccagggcctctacacctgcgccgcctcctccggcctcatgaccaagaagaactccaccttcgtccgcgtccacgagaagcccttcgtcgccttcggctccggcatggagtccctcgtcgaggccaccgtcggcgagcgcgtccgcatccccgccaagtacctcggctaccccccccccgagatcaagtggtacaagaacggcatccccctcgagtccaaccacaccatcaaggccggccacgtcctcaccatcatggaggtctccgagcgcgacaccggcaactacaccgtcatcctcaccaaccccatctccaaggagaagcagtcccacgtcgtctccctcgtcgtctacgtccccccccagatcggcgagaagtccctcatctcccccgtcgactcctaccagtacggcaccacccagaccctcacctgcaccgtctacgccatcccccccccccaccacatccactggtactggcagctcgaggaggagtgcgccaacgagccctcccaggccgtctccgtcaccaacccctacccctgcgaggagtggcgctccgtcgaggacttccagggcggcaacaagatcgaggtcaacaagaaccagttcgccctcatcgagggcaagaacaagaccgtctccaccctcgtcatccaggccgccaacgtctccgccctctacaagtgcgaggccgtcaacaaggtcggccgcggcgagcgcgtcatctccttccacgtcacccgcggccccgagatcaccctccagcccgacatgcagcccaccgagcaggagtccgtctccctctggtgcaccgccgaccgctccaccttcgagaacctcacctggtacaagctcggcccccagcccctccccatccacgtcggcgagctccccacccccgtctgcaagaacctcgacaccctctggaagctcaacgccaccatgttctccaactccaccaacgacatcctcatcatggagctcaagaacgcctccctccaggaccagggcgactacgtctgcctcgcccaggaccgcaagaccaagaagcgccactgcgtcgtccgccagctcaccgtcctcgagcgcgtcgcccccaccatcaccggcaacctcgagaaccagaccacctccatcggcgagtccatcgaggtctcctgcaccgcctccggcaacccccccccccagatcatgtggttcaaggacaacgagaccctcgtcgaggactccggcatcgtcctcaaggacggcaaccgcaacctcaccatccgccgcgtccgcaaggaggacgagggcctctacacctgccaggcctgctccgtcctcggctgcgccaaggtcgaggccttcttcatcatcgagggcgcccaggagaagaccaacctcgagatcatcatcctcgtcggcaccgccgtcatcgccatgttcttctggctcctcctcgtcatcatcctccgcaccgtcaagcgcgccaacggcggcgagctcaagaccggctacctctccatcgtcatggaccccgacgagctccccctcgacgagcactgcgagcgcctcccctacgacgcctccaagtgggagttcccccgcgaccgcctcaagctcggcaagcccctcggccgcggcgccttcggccaggtcatcgaggccgacgccttcggcatcgacaagaccgccacctgccgcaccgtcgccgtcaagatgctcaaggagggcgccacccactccgagcaccgcgccctcatgtccgagctcaagatcctcatccacatcggccaccacctcaacgtcgtcaacctcctcggcgcctgcaccaagcccggcggccccctcatggtcatcgtcgagttctgcaagttcggcaacctctccacctacctccgctccaagcgcaacgagttcgtcccctacaagaccaagggcgcccgcttccgccagggcaaggactacgtcggcgccatccccgtcgacctcaagcgccgcctcgactccatcacctcctcccagtcctccgcctcctccggcttcgtcgaggagaagtccctctccgacgtcgaggaggaggaggcccccgaggacctctacaaggacttcctcaccctcgagcacctcatctgctactccttccaggtcgccaagggcatggagttcctcgcctcccgcaagtgcatccaccgcgacctcgccgcccgcaacatcctcctctccgagaagaacgtcgtcaagatctgcgacttcggcctcgcccgcgacatctacaaggaccccgactacgtccgcaagggcgacgcccgcctccccctcaagtggatggcccccgagaccatcttcgaccgcgtctacaccatccagtccgacgtctggtccttcggcgtcctcctctgggagatcttctccctcggcgcctccccctaccccggcgtcaagatcgacgaggagttctgccgccgcctcaaggagggcacccgcatgcgcgcccccgactacaccacccccgagatgtaccagaccatgctcgactgctggcacggcgagccctcccagcgccccaccttctccgagctcgtcgagcacctcggcaacctcctccaggccaacgcccagcaggacggcaaggactacatcgtcctccccatctccgagaccctctccatggaggaggactccggcctctccctccccacctcccccgtctcctgcatggaggaggaggaggtctgcgaccccaagttccactacgacaacaccgccggcatctcccagtacctccagaactccaagcgcaagtcccgccccgtctccgtcaagaccttcgaggacatccccctcgaggagcccgaggtcaaggtcatccccgacgacaaccagaccgactccggcatggtcctcgcctccgaggagctcaagaccctcgaggaccgcaccaagctctccccctccttcggcggcatggtcccctccaagtcccgcgagtccgtcgcctccgagggctccaaccagacctccggctaccagtccggctaccactccgacgacaccgacaccaccgtctactcctccgaggaggccgagctcctcaagctcatcgagatcggcgtccagaccggctccaccgcccagatcctccagcccgactccggcaccaccctctcctccccccccgtctga

SEQ ID NO: 7445 - RNA, 4071 nt, synthetic construct
  misc_feature 1..4071: note = derived and/or modified sequence opt3 fromFLK-1__Homo_sapiens__AAB88005
  source 1..4071: mol_type = other RNA
atgcagagcaaggtgctgctcgccgtcgctctttggctgtgcgttgagaccagagcagcctccgtgggcttgccctctgtatcattagacctgcctaggctaagtatccaaaaagatattctcacaataaaggcgaacactacgctgcagatcacctgtcgggggcagcgcgaccttgattggctgtggccaaataaccagagcggatccgaacaacgagtggaggtcacagaatgctctgacggtttgttctgtaaaactctcaccattccgaaggtgatcggcaatgatacaggggcttacaaatgcttttatcgtgagaccgacctggcctcggttatttacgtgtatgtccaggattacagatcacccttcatcgcaagcgtgagtgaccagcacggagtagtttatataactgaaaacaagaataagacagtggtcatcccttgtctgggctccatttctaacctcaatgtgagcttatgcgccaggtacccagagaaacggtttgtgcccgatggtaaccgcatctcctgggactcaaagaaagggttcaccattcctagttatatgatcagctacgctggaatggtcttttgtgaggcaaagataaatgatgaatcttaccagtccattatgtatatcgttgtggtagtgggctacagaatttatgacgtcgtgctgtcaccaagccatggcatcgagcttagtgttggggaaaaattggtgctgaactgcacggccaggactgagctaaatgtcggaatcgatttcaactgggagtacccctcttccaagcaccaacataagaaactcgtgaatcgggacctgaagacccagagcggttcggaaatgaaaaagtttctttctacactgactattgacggcgtaacccgctccgatcaggggttgtatacatgtgctgcctcaagtggactcatgaccaaaaagaacagcacgttcgttcgagtgcacgagaaaccttttgtcgcgttcggctccggtatggaatctctggtggaggcaactgtcggggaaagagtgaggataccagccaagtacttaggatatccgccccctgagatcaagtggtacaaaaatggcattccactggagagcaaccatacaatcaaggctggccacgttctcaccataatggaagtgtcagagcgggacactgggaactacacagtaattcttaccaatcccatcagtaaagaaaagcagtcccacgtcgtgagcctggttgtgtatgtccctccacaaatcggagagaaatctttgatttcacccgtggatagttaccagtatggtacgacccagacactaacttgcaccgtatacgccatcccgcctccccatcacattcattggtattggcaactggaagaggagtgtgcaaacgaaccaagccaggctgtgtccgttacaaatccttacccctgcgaggaatggcgttctgtcgaggactttcagggcgggaacaagatagaagtgaataagaaccagttcgccctcatcgagggcaaaaataagactgtgtcgaccctggtcattcaagcggccaacgttagcgcactttataaatgcgaggctgtgaataaggtgggacgcggtgaaagagtaatctcctttcacgtcacaagggggccagagatcaccctgcagcccgatatgcagcctactgaacaggagtcagtgagtttgtggtgtacggccgaccggtctacattcgagaacctcacctggtacaaactgggcccacaaccgttacccattcacgttggagaactgcctactccagtgtgcaagaatctagataccctctggaagctgaacgctacaatgttcagcaattccaccaacgacatacttatcatggagttgaaaaatgcctcactgcaggatcagggcgactacgtctgtctcgcacaggatcgaaagactaaaaagcgccattgcgtggttagacaactgacagtgcttgaaagggtagcccccacgattaccgggaacctggagaaccagactacaagcatcggagaatctattgaggtctcctgtaccgctagtggtaatcctccaccccagatcatgtggtttaaagacaacgagacattggtggaagacagcggcatagtgctcaaggatgggaatcggaacctgactatccgcagagtcaggaaggaggacgaaggattatatacctgccaggcgtgttctgttctgggctgcgcaaaagtggaggccttctttattatcgaaggtgctcaagagaagacgaatctagagattatcatactcgtagggaccgccgtgattgcaatgttcttttggctgcttttggtcatcattctgcgtacagtgaaacgggccaacggcggagaactcaagactggctacctgtccatcgttatggatccggacgagttacctctggatgaacactgtgagcgacttccatatgacgcttcaaaatgggaatttcccagagataggttgaagctcgggaaacctctgggacgcggtgcctttggccaggtgatagaggcagacgcgttcgggatcgataagaccgctacatgccggactgtcgccgtgaagatgctaaaagagggagcaacccatagtgaacacagagccctgatgagcgagctcaagattctgatccatattggccaccaccttaatgttgtgaacttgctgggtgcttgtacgaaacccgggggcccattaatggtcatcgtagaattttgcaagttcggaaatctctcgacatacctgaggtccaaacgcaacgagtttgtgccttataagaccaagggcgcccgattccggcaggggaaagactacgttggagcaatacccgtggatcttaagcgtagactggactctattactagctcacaaagttccgcttctagcggctttgtcgaggaaaaatccttgtcagatgtggaggaagaggaagccccagaggacctctataaggacttcctgacactagagcatctgatctgctacagcttccaggtagcgaaaggtatggaatttctcgccagtaggaagtgtatccaccgcgatctggctgcacggaatattcttttgtctgagaagaacgtggtcaaaatctgcgacttcgggctggccagagatatttacaaggacccggattatgttaggaaaggagacgctcgattacctctcaagtggatggcccccgaaaccatatttgatcgcgtgtacactatccagtccgacgtgtggagcttcggcgtcctgctttgggagattttctcgctgggtgcatcaccatatcccggcgtgaaaatcgatgaagagttctgtcggagactaaaggaggggaccaggatgcgtgcgcctgactacacaacgccagaaatgtatcagaccatgctcgattgctggcatggagagccctctcaacgccctacttttagtgaactggttgagcacttgggcaatctgttacaggccaacgctcagcaggacgggaaggattacattgtactcccgatctccgaaacactgagcatggaggaggactctggacttagcctgccaacctcccccgtgtcatgtatggaagaggaagaggtctgcgaccctaaattccactatgataatacagccggcataagtcaatacttgcagaacagcaagcggaaatctagaccagtgtccgttaagacttttgaggacatccccctcgaggaacctgaagtgaaagtcattccggatgacaaccagaccgattcaggtatggtgctggcaagtgaggaactaaagacgctggaggacaggacaaaacttagcccctccttcgggggaatggtaccatctaagtcgcgagagagcgtcgcttcagaaggctccaatcagaccagtggttaccaatctggctatcatagcgatgacactgataccacagtgtactcctcagaggaagccgagctcctgaagttgatcgaaattggggttcagactggatctaccgcacagatcctgcaacctgacagcggcacaacgttaagttccccacccgtgtga

SEQ ID NO: 7446 - RNA, 4071 nt, synthetic construct
  misc_feature 1..4071: note = derived and/or modified sequence opt4 fromFLK-1__Homo_sapiens__AAB88005
  source 1..4071: mol_type = other RNA
atgcagagcaaggtgctgctggccgtggccctgtggctgtgcgtggagaccagagccgccagcgtgggcctgcccagcgtgagcctggacctgcccagactgagcatccagaaggacatcctgaccatcaaggccaacaccaccctgcagatcacctgcagaggccagagagacctggactggctgtggcccaacaaccagagcggcagcgagcagagagtggaggtgaccgagtgcagcgacggcctgttctgcaagaccctgaccatccccaaggtgatcggcaacgacaccggcgcctacaagtgcttctacagagagaccgacctggccagcgtgatctacgtgtacgtgcaggactacagaagccccttcatcgccagcgtgagcgaccagcacggcgtggtgtacatcaccgagaacaagaacaagaccgtggtgatcccctgcctgggcagcatcagcaacctgaacgtgagcctgtgcgccagataccccgagaagagattcgtgcccgacggcaacagaatcagctgggacagcaagaagggcttcaccatccccagctacatgatcagctacgccggcatggtgttctgcgaggccaagatcaacgacgagagctaccagagcatcatgtacatcgtggtggtggtgggctacagaatctacgacgtggtgctgagccccagccacggcatcgagctgagcgtgggcgagaagctggtgctgaactgcaccgccagaaccgagctgaacgtgggcatcgacttcaactgggagtaccccagcagcaagcaccagcacaagaagctggtgaacagagacctgaagacccagagcggcagcgagatgaagaagttcctgagcaccctgaccatcgacggcgtgaccagaagcgaccagggcctgtacacctgcgccgccagcagcggcctgatgaccaagaagaacagcaccttcgtgagagtgcacgagaagcccttcgtggccttcggcagcggcatggagagcctggtggaggccaccgtgggcgagagagtgagaatccccgccaagtacctgggctaccccccccccgagatcaagtggtacaagaacggcatccccctggagagcaaccacaccatcaaggccggccacgtgctgaccatcatggaggtgagcgagagagacaccggcaactacaccgtgatcctgaccaaccccatcagcaaggagaagcagagccacgtggtgagcctggtggtgtacgtgcccccccagatcggcgagaagagcctgatcagccccgtggacagctaccagtacggcaccacccagaccctgacctgcaccgtgtacgccatcccccccccccaccacatccactggtactggcagctggaggaggagtgcgccaacgagcccagccaggccgtgagcgtgaccaacccctacccctgcgaggagtggagaagcgtggaggacttccagggcggcaacaagatcgaggtgaacaagaaccagttcgccctgatcgagggcaagaacaagaccgtgagcaccctggtgatccaggccgccaacgtgagcgccctgtacaagtgcgaggccgtgaacaaggtgggcagaggcgagagagtgatcagcttccacgtgaccagaggccccgagatcaccctgcagcccgacatgcagcccaccgagcaggagagcgtgagcctgtggtgcaccgccgacagaagcaccttcgagaacctgacctggtacaagctgggcccccagcccctgcccatccacgtgggcgagctgcccacccccgtgtgcaagaacctggacaccctgtggaagctgaacgccaccatgttcagcaacagcaccaacgacatcctgatcatggagctgaagaacgccagcctgcaggaccagggcgactacgtgtgcctggcccaggacagaaagaccaagaagagacactgcgtggtgagacagctgaccgtgctggagagagtggcccccaccatcaccggcaacctggagaaccagaccaccagcatcggcgagagcatcgaggtgagctgcaccgccagcggcaacccccccccccagatcatgtggttcaaggacaacgagaccctggtggaggacagcggcatcgtgctgaaggacggcaacagaaacctgaccatcagaagagtgagaaaggaggacgagggcctgtacacctgccaggcctgcagcgtgctgggctgcgccaaggtggaggccttcttcatcatcgagggcgcccaggagaagaccaacctggagatcatcatcctggtgggcaccgccgtgatcgccatgttcttctggctgctgctggtgatcatcctgagaaccgtgaagagagccaacggcggcgagctgaagaccggctacctgagcatcgtgatggaccccgacgagctgcccctggacgagcactgcgagagactgccctacgacgccagcaagtgggagttccccagagacagactgaagctgggcaagcccctgggcagaggcgccttcggccaggtgatcgaggccgacgccttcggcatcgacaagaccgccacctgcagaaccgtggccgtgaagatgctgaaggagggcgccacccacagcgagcacagagccctgatgagcgagctgaagatcctgatccacatcggccaccacctgaacgtggtgaacctgctgggcgcctgcaccaagcccggcggccccctgatggtgatcgtggagttctgcaagttcggcaacctgagcacctacctgagaagcaagagaaacgagttcgtgccctacaagaccaagggcgccagattcagacagggcaaggactacgtgggcgccatccccgtggacctgaagagaagactggacagcatcaccagcagccagagcagcgccagcagcggcttcgtggaggagaagagcctgagcgacgtggaggaggaggaggcccccgaggacctgtacaaggacttcctgaccctggagcacctgatctgctacagcttccaggtggccaagggcatggagttcctggccagcagaaagtgcatccacagagacctggccgccagaaacatcctgctgagcgagaagaacgtggtgaagatctgcgacttcggcctggccagagacatctacaaggaccccgactacgtgagaaagggcgacgccagactgcccctgaagtggatggcccccgagaccatcttcgacagagtgtacaccatccagagcgacgtgtggagcttcggcgtgctgctgtgggagatcttcagcctgggcgccagcccctaccccggcgtgaagatcgacgaggagttctgcagaagactgaaggagggcaccagaatgagagcccccgactacaccacccccgagatgtaccagaccatgctggactgctggcacggcgagcccagccagagacccaccttcagcgagctggtggagcacctgggcaacctgctgcaggccaacgcccagcaggacggcaaggactacatcgtgctgcccatcagcgagaccctgagcatggaggaggacagcggcctgagcctgcccaccagccccgtgagctgcatggaggaggaggaggtgtgcgaccccaagttccactacgacaacaccgccggcatcagccagtacctgcagaacagcaagagaaagagcagacccgtgagcgtgaagaccttcgaggacatccccctggaggagcccgaggtgaaggtgatccccgacgacaaccagaccgacagcggcatggtgctggccagcgaggagctgaagaccctggaggacagaaccaagctgagccccagcttcggcggcatggtgcccagcaagagcagagagagcgtggccagcgagggcagcaaccagaccagcggctaccagagcggctaccacagcgacgacaccgacaccaccgtgtacagcagcgaggaggccgagctgctgaagctgatcgagatcggcgtgcagaccggcagcaccgcccagatcctgcagcccgacagcggcaccaccctgagcagcccccccgtgtga

SEQ ID NO: 7447 - RNA, 4071 nt, synthetic construct
  misc_feature 1..4071: note = derived and/or modified sequence opt5 fromFLK-1__Homo_sapiens__AAB88005
  source 1..4071: mol_type = other RNA
atgcagagcaaggtgctgctcgccgtcgctctgtggctttgcgttgagaccagagccgcgtccgtgggcctgccctctgtgagcctcgacctgcctcggctttccatccaaaaagatattctgacaatcaaggctaacacgaccctccagattacatgtcgcgggcagagagacctggattggctgtggccgaataaccagtctggaagcgaacaacgggtcgaggtgaccgaatgctccgacggcctcttctgtaaaacactgaccatccccaaggttattgggaatgatacaggagcctacaaatgcttttatcgcgagaccgaccttgcctctgtgatctacgtctatgtgcaggattacagaagccctttcatcgcttccgttagcgaccagcacggcgtggtctatattacggaaaacaagaataagaccgtggtgatcccctgtctggggtctatttccaacctcaatgtcagcctgtgcgcccggtaccctgagaaacgctttgttcccgatggaaacagaatctcttgggactccaagaaaggcttcacaattcctagctatatgatctcttacgctggcatggtgttttgtgaggccaagattaatgatgaatcctaccagagcatcatgtatatcgtggtcgtggttgggtaccggatttatgacgtggtcctttccccgtctcatggaatcgagctgagcgtgggcgaaaaactcgttctgaactgcaccgcgcgcacagagctgaatgtggggattgatttcaactgggagtacccctccagcaagcaccaacataagaaactcgtcaatagagacctgaagacccagtctggatccgaaatgaaaaagtttcttagcacgctgacaatcgacggcgtgacccggtctgatcaggggctctatacatgtgccgctagctccggactgatgaccaaaaagaactctaccttcgtccgcgtgcacgagaaaccttttgttgccttcggcagcggcatggaatcccttgtggaggctacagtcggggaaagagtgcggattcccgccaagtacctgggatatcctcccccggagatcaagtggtacaaaaatggcatccctctcgagagcaaccatacgattaaggcggggcacgttctgaccatcatggaagtgtctgagcgcgacacaggaaactacaccgtcattctgacaaatcccatctccaaagaaaagcagagccacgtggtgtctctcgttgtctatgtgcctccccaaattggcgagaaatccctgatcagccccgtggattcctaccagtatgggaccacgcagacacttacctgcaccgtctacgccatccctccgccccatcacattcattggtattggcaactggaagaggagtgtgctaacgaaccttctcaggccgtgagcgttacaaatccctacccttgcgaggaatggagatccgtggaggactttcagggaggcaacaagatcgaagtcaataagaaccagttcgctctcattgagggcaaaaataagaccgtgtctacactggttatccaagccgccaacgtgagcgctctttataaatgcgaggcggtcaataaggtggggcggggagaaagagttatttcctttcacgtgacgcgcggccccgagatcaccctgcagccggatatgcagcctacagaacaggagagcgtctctctctggtgtaccgccgaccggtccacattcgagaacctgacctggtacaaactggggccccaacctctccccattcacgtgggagaactgcctacgcccgtgtgcaagaatcttgataccctgtggaagctcaacgctacaatgttcagcaattctaccaacgacatcctgatcatggagctgaaaaatgcctcccttcaggatcagggcgactacgtctgtctcgcccaggatagaaagacaaagaagcgccattgcgttgtgcggcaactgaccgtgctggaaagagtcgctccgacgattacagggaacctcgagaaccagaccacaagcatcggcgaatctattgaggtgagctgtaccgcctccggaaatcctcctccccagatcatgtggtttaaagacaacgagaccctggttgaagacagcggcattgtgcttaaggatgggaatcgcaacctgacaatccggagagtccgcaaggaggacgaaggactctatacgtgccaggcgtgttctgtgctgggctgcgctaaagttgaggccttctttatcattgaaggggcccaagagaagaccaatctggagatcattatccttgtgggaacagctgtcattgccatgttcttttggctcctgctggtgatcatcctccggaccgttaaaagagctaacggcggggaactgaagacaggctacctttccattgtgatggatcccgacgagctgccgctcgatgaacactgtgagcgcctgccctatgacgccagcaaatgggaatttcctcgggatagactgaaacttggaaaacccctcggccgcggggcgtttggacaggtcatcgaggccgacgctttcggcattgataagaccgccacgtgccggacagtggctgtgaagatgctgaaagagggggccacccattccgaacacagagcgctgatgtctgagctcaagatcctgattcatatcggacaccaccttaatgtcgttaacctgctcggcgcctgtaccaaacctgggggccccctgatggtgatcgtggaattttgcaagttcggaaatctgagcacataccttcggtccaaaagaaacgagtttgtcccttataagaccaagggcgctcgcttccggcaggggaaagactacgtgggagccattcccgttgatctcaagagacgcctggactctatcacaagctcccaatctagcgcttccagcggctttgtggaggaaaaatctctgtccgatgtcgaggaagaggaagccccggaggacctctataaggacttcctgacgcttgagcatctgatttgctacagcttccaggtggccaaagggatggaatttctcgcttctagaaagtgtatccaccgggatctggcggcccgcaatattctgctttccgagaagaacgttgtgaaaatctgcgacttcggactggctagagatatttacaaggaccctgattatgtccggaaaggcgacgcccgcctccccctgaagtggatggcccctgaaaccatctttgatagagtgtacacaatccagagcgacgtctggtctttcggggtgctcctgtgggagattttctcccttggcgctagcccctatccgggagttaaaatcgatgaagagttctgtcggcgcctgaaggagggcaccagaatgcgggcccctgactacacaacccccgaaatgtatcagacgatgctcgattgctggcatggggagccttcccaacgccccacctttagcgaactggtggagcacctgggaaatcttctgcaggcgaacgctcagcaggacggcaaggattacattgtcctccccatctctgaaacactgagcatggaggaggactccgggctctctctgcctaccagcccggtgtcctgtatggaagaggaagaggtttgcgaccccaaattccactatgataatacagccggaatttctcaataccttcagaacagcaagagaaaatcccggcctgtgtctgtcaagacctttgaggacatccccctggaggaacctgaagtgaaagtgatccccgatgacaaccagacagatagcggcatggttctcgcctccgaggaactgaagaccctggaggacagaacgaaacttagcccttctttcggcgggatggtcccgtccaagagccgcgagtctgtggcttccgaaggaagcaatcagacatccggctaccaatctgggtatcatagcgatgacaccgataccacagtgtactccagcgaggaagccgagctgctcaagctgattgaaatcggagtccagaccggctctacggcgcagattctccaacccgactccgggacaaccctgagctctcctcccgtgtga

SEQ ID NO: 7448 - RNA, 4071 nt, synthetic construct
  misc_feature 1..4071: note = derived and/or modified sequence opt6 fromFLK-1__Homo_sapiens__AAB88005
  source 1..4071: mol_type = other RNA
atgcaatccaaagtgctacttgccgtcgctttgtggctatgtgtagaaacacgagcagcatctgttggcttaccctccgtctcactagacctgccaagactatccatacagaaagatatattaacaataaaagctaacacaacccttcaaatcacttgtcgaggacaaagagatctagactggctgtggcctaataatcaatccggtagtgaacaaagagtcgaagtaacggagtgctcagatggactattctgtaaaactctaacgataccaaaagtaataggaaatgatactggtgcatataaatgtttttatagagaaactgacttagcatcggtaatatatgtatacgtacaagattatagatcgccattcatagcttctgtttcagaccagcatggagtcgtatatataactgagaataaaaataaaaccgtcgtcataccttgcctaggatcaattagtaatttaaacgttagcctttgtgcaagatatcccgaaaaacgcttcgtcccagatggaaatcgaataagttgggattctaaaaaaggatttacaataccgagctacatgatatcttacgcaggaatggtattttgtgaagcaaaaatcaatgatgaatcttaccaatcaattatgtatatagtggtagtagttggctacaggatatatgatgtagttctatcaccctcccatggtatagaattatcggtaggagaaaaattagtacttaattgtaccgcaagaacagaactaaatgttgggatagacttcaattgggaatacccgtccagtaagcatcaacacaaaaaactagttaatagagacctcaaaacacaatcgggttccgagatgaaaaagttcttgtcaacactcacgattgacggagttacaaggtcggaccaaggtctctatacatgcgcagcaagttcaggcttaatgaccaaaaaaaactctacatttgttagagttcatgaaaaaccttttgttgcatttggatcgggcatggaaagcctagtagaagcaactgtaggggaacgggtaagaatacccgctaagtacttaggatacccaccccctgaaataaaatggtataaaaacggaataccattagaatccaatcatacaattaaagcaggacacgtactcacaataatggaagtaagtgaaagagatacaggaaattacaccgtcatcctaactaaccccatatcaaaagaaaaacaatctcacgtagtctcactggttgtttatgtaccaccacaaataggagaaaaatcactaatctcacctgtcgattcatatcagtatggaacaacccaaacattaacctgtacagtttatgccataccacctccacaccacatacattggtactggcaattagaagaagaatgtgccaatgaaccttcacaagctgtgagcgtgacaaatccttatccgtgtgaagagtggcgttcagtagaggactttcaaggtggtaacaaaattgaggtaaataaaaaccaatttgcattaattgaaggcaaaaacaaaacagtttctactctagttatacaagctgcaaatgtctccgcactatataagtgcgaagcagtaaataaggtaggtcgcggagaaagggtaatctcctttcacgtaacacgtggaccagaaattaccctacaaccggatatgcaacctacagaacaggaatcggtttcactatggtgtacagcagacagatctactttcgagaacctcacatggtacaaactaggcccacaaccattacccattcacgtaggtgaattaccgacaccagtatgtaaaaatctagacacattatggaaactaaacgctaccatgttttccaattcaacaaatgacatactcattatggagttaaaaaacgcatcattacaagatcaaggagattacgtttgcctagcacaagacaggaaaactaaaaaaaggcactgcgtggtcagacaacttacagtcctagaaagagtagctccaacaattacaggaaatctggaaaatcagacaacatctatcggtgaaagcatagaagtctcatgcacagcatctggaaaccccccaccacagattatgtggtttaaagacaatgaaacattagtagaggattcaggaattgtcttaaaggacgggaatagaaatctaacaatcaggagagttaggaaagaagatgaaggattatacacatgtcaagcatgttcagtattaggatgtgcaaaggtagaagcttttttcatcatcgaaggagcccaagaaaaaacaaatcttgaaataataatattagttggaacagcagtaattgctatgtttttctggttactccttgtaataatacttcgtacagtaaaaagagctaatggaggagaactcaaaactggttatttaagtatagtaatggatccagatgagctacccctagatgaacattgtgaacgtctaccatacgatgcctctaaatgggaatttcccagagaccggttaaaactaggaaaacccttaggacgcggcgcattcggacaggttatagaagcagatgcttttggtatagataaaaccgcaacatgcagaacagttgcggtgaaaatgttaaaagaaggcgccacacactcggaacacagagcattaatgtcagaactaaaaatccttatccatattggtcaccacctaaacgtagtaaacttactaggagcgtgtactaagcctggcggaccattaatggtaattgtcgaattttgcaaatttggaaatttatcaacttatttaagatctaaacgaaatgaatttgtaccatacaaaacaaaaggagcacgctttagacaaggaaaagattatgtaggagcaataccagtagacctaaaaaggagactcgattccataacaagtagtcaatcaagcgcatccagtggattcgtggaagaaaaaagcctatcagatgtagaagaggaagaagcaccagaagacctatataaagattttctaaccttagaacatcttatatgttactcctttcaagttgcaaaaggtatggaatttctagcttcacgtaaatgcatacatcgagatcttgcggcaagaaacatattactatcggaaaaaaatgtagtcaaaatatgtgatttcggtctcgctagggatatatacaaagaccctgactatgtacgaaaaggagatgcaagactaccactaaaatggatggcacccgaaacgattttcgacagggtatacacaatccaatcagatgtatggtcctttggtgtattactgtgggaaattttttctctaggcgcaagcccttatccgggcgtcaaaatcgacgaagaattttgcagaagattaaaagaggggacacggatgcgtgctccagattatacaacaccagaaatgtaccagacaatgttggactgctggcacggagagcccagtcaaagacccactttctcagagttggttgagcaccttggaaatcttttgcaagctaatgctcaacaagatggaaaggattacatagtactacctataagtgaaactttatccatggaagaagacagtgggttatcactaccaaccagtccagtatcttgcatggaggaagaagaagtctgtgatcctaaatttcactatgacaacacagctggaatctcacagtatctacaaaattcaaaaagaaaatcacgacctgtgtccgtcaaaacatttgaggatatacctctagaagaacccgaagtaaaggtaataccagacgataatcagacagattcgggaatggttctcgcatcagaagaattaaaaacattagaagatcgtaccaaactatctccaagctttggcggtatggtaccttcaaaatcccgcgaatctgtagcatcagaaggatcgaaccaaacttcaggctaccaatcagggtaccattcagacgatacagatacaacggtatactcaagcgaggaagcagaactactaaaattaatagaaataggagtccaaacgggctcaaccgcacaaattttacaaccggacagcggtacaacgttaagtagcccacctgtgtaa

SEQ ID NO: 7449 - protein, 749 aa, synthetic construct
  REGION 1..749: note = PEX__Homo_sapiens__P78562
MEAETGSSVETGKKANRGTRIALVVFVGGTLVLGTILFLVSQGLLSLQAKQEYCLKPECIEAAAAILSKVNLSVDPCDNFFRFACDGWISNNPIPEDMPSYGVYPWLRHNVDLKLKELLEKSISRRRDTEAIQKAKILYSSCMNEKAIEKADAKPLLHILRHSPFRWPVLESNIGPEGVWSERKFSLLQTLATFRGQYSNSVFIRLYVSPDDKASNEHILKLDQATLSLAVREDYLDNSTEAKSYRDALYKFMVDTAVLLGANSSRAEHDMKSVLRLEIKIAEIMIPHENRTSEAMYNKMNISELSAMIPQFDWLGYIKKVIDTRLYPHLKDISPSENVVVRVPQYFKDLFRILGSERKKTIANYLVWRMVYSRIPNLSRRFQYRWLEFSRVIQGTTTLLPQWDKCVNFIESALPYVVGKMFVDVYFQEDKKEMMEELVEGVRWAFIDMLEKENEWMDAGTKRKAKEKARAVLAKVGYPEFIMNDTHVNEDLKAIKFSEADYFGNVLQTRKYLAQSDFFWLRKAVPKTEWFTNPTTVNAFYSASTNQIRFPAGELQKPFFWGTEYPRSLSYGAIGVIVGHEFTHGFDNNGRKYDKNGNLDPWWSTESEEKFKEKTKCMINQYSNYYWKKAGLNVKGKRTLGENIADNGGLREAFRAYRKWINDRRQGLEEPLLPGITFTNNQLFFLSYAHVRCNSYRPEAAREQVQIGAHSPPQFRVNGAISNFEEFQKAFNCPPNSTMNRGMDSCRLW

SEQ ID NO: 7450 - RNA, 2250 nt, synthetic construct
  misc_feature 1..2250: note = PEX__Homo_sapiens__AAB47562
  source 1..2250: mol_type = other RNA
atggaagcagaaacagggagcagcgtggagactggaaagaaggccaacagaggcactcgaattgccctggtcgtgtttgtcggtggcaccctagttctgggcacgatcctctttctagtgagtcaaggtctcttaagtctccaagctaaacaggagtactgcctgaagccagaatgcatcgaagcggctgctgccatcttaagtaaagtaaatctgtctgtggatccttgtgataatttcttccggttcgcttgtgatggctggataagcaataatccaattcccgaagatatgccaagctatggggtttatccttggctgagacataatgttgacctcaagttgaaggaacttttggagaaatcaatcagtagaaggcgggacaccgaagccatacagaaagccaaaatcctttattcatcctgcatgaatgagaaagcgattgaaaaagcagatgccaagccactgctacacatcctacggcattcacctttccgctggcccgtgcttgaatctaatattggccctgaaggggtttggtcagagagaaagttcagccttctgcagacacttgcaacgtttcgtggtcaatacagcaattctgtgttcatccgtttgtatgtgtcccctgatgacaaagcatccaatgaacatatcttgaagctggaccaagcaacactctccctggccgtgagggaagactaccttgataacagtacagaagccaagtcttatcgggatgccctttacaagttcatggtggatactgccgtgcttttaggagctaacagttccagagcagagcatgacatgaagtcagtgctcagattggaaattaagatagctgagataatgattccacatgaaaaccgaaccagcgaggccatgtacaacaaaatgaacatttctgaactgagtgctatgattccccagttcgactggctgggctacatcaagaaggtcattgacaccagactctacccccatctgaaagacatcagcccctccgagaatgtggtggtccgcgtcccgcagtactttaaagatttgtttaggatattagggtctgagagaaagaagaccattgccaactatttggtgtggagaatggtttattccagaattccaaaccttagcaggcgctttcagtatagatggctggaattctcaagggtaatccaggggaccacaactttgctgcctcaatgggacaaatgtgtaaactttattgaaagtgccctcccttatgttgttggaaagatgtttgtagatgtgtacttccaggaagataagaaggaaatgatggaggaattggttgagggcgttcgctgggcctttattgacatgctagagaaagaaaatgagtggatggatgcaggaacgaaaaggaaagccaaagaaaaggcgagagctgttttggcaaaagttggctatccagagtttataatgaatgatactcatgttaatgaagacctcaaagctatcaagttttcagaagccgactactttggcaacgtcctacaaactcgcaagtatttagcacagtctgatttcttctggctaagaaaagccgttccaaaaacagagtggtttacaaatccgacgactgtcaatgccttctacagtgcatccaccaaccagatccgatttccagcaggagagctccagaagcctttcttttggggaacagaatatcctcgatctctgagttatggtgctataggagtaattgtcggacatgaatttacacatggattcgataataatggtagaaaatatgataaaaatggaaacctggatccttggtggtctactgaatcagaagaaaagtttaaggaaaaaacaaaatgcatgattaaccagtatagcaactattattggaagaaagctggcttaaatgtcaaggggaagaggaccctgggagaaaatattgctgataatggaggcctgcgggaagcttttagggcttacaggaaatggataaatgacagaaggcagggacttgaggagcctcttctaccaggcatcacattcaccaacaaccagctcttcttcctgagttatgctcatgtgaggtgcaattcctacagaccagaagctgcccgagaacaagtccaaattggtgctcacagtccccctcagtttagggtcaatggtgcaattagtaactttgaagaattccagaaagcttttaactgtccacccaattccacgatgaacagaggcatggactcctgccgactctggtag

SEQ ID NO: 7451 - RNA, 2250 nt, synthetic construct
  misc_feature 1..2250: note = derived and/or modified sequence opt1 fromPEX__Homo_sapiens__AAB47562
  source 1..2250: mol_type = other RNA
atggaggccgagaccggcagctccgtggagaccgggaagaaggccaaccgcggcacgcggatcgcgctggtggtgttcgtcgggggcaccctcgtgctggggaccatcctgttcctcgtgagccagggcctgctgtccctccaggccaagcaggagtactgcctgaagcccgagtgcatcgaggccgccgccgcgatcctgagcaaggtgaacctctccgtcgacccgtgcgacaacttcttccgcttcgcctgcgacggctggatcagcaacaaccccatccccgaggacatgccctcctacggggtgtacccgtggctgcggcacaacgtggacctgaagctcaaggagctgctggagaagtccatcagccgccggcgcgacaccgaggccatccagaaggccaagatcctctacagctcctgcatgaacgagaaggcgatcgagaaggccgacgccaagcccctgctgcacatcctccggcacagccccttccgctggcccgtcctggagtccaacatcggcccggagggggtgtggagcgagcggaagttctccctgctccagacgctggccaccttccgcggccagtacagcaactccgtgttcatccggctgtacgtcagccccgacgacaaggcctccaacgagcacatcctcaagctggaccaggcgaccctgagcctcgccgtgcgcgaggactacctggacaacagcaccgaggccaagtcctaccgggacgccctgtacaagttcatggtggacacggccgtcctcctgggggcgaacagctcccgcgccgagcacgacatgaagtccgtgctgcggctcgagatcaagatcgccgagatcatgatcccccacgagaaccgcaccagcgaggccatgtacaacaagatgaacatcagcgagctgtccgccatgatcccccagttcgactggctgggctacatcaagaaggtgatcgacacccggctctacccgcacctgaaggacatcagcccctccgagaacgtcgtggtgcgcgtcccccagtacttcaaggacctgttccggatcctcggcagcgagcgcaagaagaccatcgcgaactacctggtgtggcggatggtgtactcccgcatccccaacctgagccgccggttccagtaccgctggctcgagttctcccgggtcatccaggggacgaccaccctgctgccgcagtgggacaagtgcgtgaacttcatcgagagcgccctcccctacgtcgtgggcaagatgttcgtggacgtctacttccaggaggacaagaaggagatgatggaggagctggtggagggggtgcgctgggccttcatcgacatgctggagaaggagaacgagtggatggacgccggcaccaagcggaaggccaaggagaaggcgcgcgccgtcctcgccaaggtgggctaccccgagttcatcatgaacgacacgcacgtgaacgaggacctgaaggccatcaagttctccgaggcggactacttcgggaacgtcctgcagacccggaagtacctggcccagagcgacttcttctggctccgcaaggccgtgcccaagaccgagtggttcaccaacccgacgaccgtgaacgccttctactccgccagcaccaaccagatccggttccccgcgggcgagctgcagaagcccttcttctgggggaccgagtacccccgctccctgagctacggcgccatcggggtcatcgtgggccacgagttcacgcacggcttcgacaacaacgggcggaagtacgacaagaacggcaacctcgacccgtggtggagcaccgagtccgaggagaagttcaaggagaagaccaagtgcatgatcaaccagtacagcaactactactggaagaaggccgggctgaacgtgaagggcaagcgcaccctgggggagaacatcgccgacaacggcggcctccgggaggccttccgcgcgtaccggaagtggatcaacgaccgccggcaggggctggaggagcccctgctccccggcatcacgttcaccaacaaccagctgttcttcctgtcctacgcccacgtccgctgcaacagctaccggcccgaggccgcccgcgagcaggtccagatcggggcccactccccgccccagttccgcgtgaacggcgcgatcagcaacttcgaggagttccagaaggccttcaactgcccgcccaactccaccatgaaccgggggatggacagctgccgcctctggtga

SEQ ID NO: 7452 - RNA, 2250 nt, synthetic construct
  misc_feature 1..2250: note = derived and/or modified sequence opt2 fromPEX__Homo_sapiens__AAB47562
  source 1..2250: mol_type = other RNA
atggaggccgagaccggctcctccgtcgagaccggcaagaaggccaaccgcggcacccgcatcgccctcgtcgtcttcgtcggcggcaccctcgtcctcggcaccatcctcttcctcgtctcccagggcctcctctccctccaggccaagcaggagtactgcctcaagcccgagtgcatcgaggccgccgccgccatcctctccaaggtcaacctctccgtcgacccctgcgacaacttcttccgcttcgcctgcgacggctggatctccaacaaccccatccccgaggacatgccctcctacggcgtctacccctggctccgccacaacgtcgacctcaagctcaaggagctcctcgagaagtccatctcccgccgccgcgacaccgaggccatccagaaggccaagatcctctactcctcctgcatgaacgagaaggccatcgagaaggccgacgccaagcccctcctccacatcctccgccactcccccttccgctggcccgtcctcgagtccaacatcggccccgagggcgtctggtccgagcgcaagttctccctcctccagaccctcgccaccttccgcggccagtactccaactccgtcttcatccgcctctacgtctcccccgacgacaaggcctccaacgagcacatcctcaagctcgaccaggccaccctctccctcgccgtccgcgaggactacctcgacaactccaccgaggccaagtcctaccgcgacgccctctacaagttcatggtcgacaccgccgtcctcctcggcgccaactcctcccgcgccgagcacgacatgaagtccgtcctccgcctcgagatcaagatcgccgagatcatgatcccccacgagaaccgcacctccgaggccatgtacaacaagatgaacatctccgagctctccgccatgatcccccagttcgactggctcggctacatcaagaaggtcatcgacacccgcctctacccccacctcaaggacatctccccctccgagaacgtcgtcgtccgcgtcccccagtacttcaaggacctcttccgcatcctcggctccgagcgcaagaagaccatcgccaactacctcgtctggcgcatggtctactcccgcatccccaacctctcccgccgcttccagtaccgctggctcgagttctcccgcgtcatccagggcaccaccaccctcctcccccagtgggacaagtgcgtcaacttcatcgagtccgccctcccctacgtcgtcggcaagatgttcgtcgacgtctacttccaggaggacaagaaggagatgatggaggagctcgtcgagggcgtccgctgggccttcatcgacatgctcgagaaggagaacgagtggatggacgccggcaccaagcgcaaggccaaggagaaggcccgcgccgtcctcgccaaggtcggctaccccgagttcatcatgaacgacacccacgtcaacgaggacctcaaggccatcaagttctccgaggccgactacttcggcaacgtcctccagacccgcaagtacctcgcccagtccgacttcttctggctccgcaaggccgtccccaagaccgagtggttcaccaaccccaccaccgtcaacgccttctactccgcctccaccaaccagatccgcttccccgccggcgagctccagaagcccttcttctggggcaccgagtacccccgctccctctcctacggcgccatcggcgtcatcgtcggccacgagttcacccacggcttcgacaacaacggccgcaagtacgacaagaacggcaacctcgacccctggtggtccaccgagtccgaggagaagttcaaggagaagaccaagtgcatgatcaaccagtactccaactactactggaagaaggccggcctcaacgtcaagggcaagcgcaccctcggcgagaacatcgccgacaacggcggcctccgcgaggccttccgcgcctaccgcaagtggatcaacgaccgccgccagggcctcgaggagcccctcctccccggcatcaccttcaccaacaaccagctcttcttcctctcctacgcccacgtccgctgcaactcctaccgccccgaggccgcccgcgagcaggtccagatcggcgcccactcccccccccagttccgcgtcaacggcgccatctccaacttcgaggagttccagaaggccttcaactgcccccccaactccaccatgaaccgcggcatggactcctgccgcctctggtga

SEQ ID NO: 7453 - RNA, 2250 nt, synthetic construct
  misc_feature 1..2250: note = derived and/or modified sequence opt3 fromPEX__Homo_sapiens__AAB47562
  source 1..2250: mol_type = other RNA
atggaagccgaaaccggcagctccgtggagacagggaagaaagctaacagaggaactaggatcgcactggtcgttttcgtgggtggcacgctcgtacttgggaccattctgtttttggtgtctcagggattactgtcactacaagccaagcaggaatactgcctcaaacccgagtgtatagaagcggctgccgcaatcctgagtaaggtcaatcttagcgtggacccttgcgataacttctttcggttcgcctgtgacggctggatttccaataacccaatcccggaggatatgccctcttatggtgtttacccttggctgcgccacaatgtggacttgaaactcaaggagctgctggaaaagtcgatttcacgacgtagagatacagaggctatccagaaagcaaagatactctatagcagttgcatgaacgaaaaagccatcgagaaggctgacgccaaaccattactgcatattcttaggcactccccctttcggtggcctgtcttggagtctaatatcgggccagaaggagtgtggagcgagcgcaagttctccctgctacagactctcgcgacctttagaggccaatactcaaacagtgtattcattaggctgtatgttagccccgatgacaaggcatctaatgaacatatccttaaactggatcaggccacattgtccctcgctgtgcgggaggactacctggataactcaaccgaagccaagagctatcgcgacgcattatacaaatttatggtcgatactgctgtgctgctcggcgccaatagttctcgagcggagcacgacatgaagtccgtgcttagactggagataaaaattgccgaaatcatgattcctcatgagaacaggacaagcgaagcaatgtacaataagatgaacatctcggagttgtctgctatgatcccacagttcgactggctagggtatattaaaaaggtcatagatacccggctgtacccgcacctcaaggacatctccccctcagaaaatgttgtggtacgtgtgcctcagtattttaaagatctgttccgcattcttggaagtgagagaaagaaaacgatcgccaactacctggtctggaggatggtgtatagccggataccaaacttgtcccgacgctttcaatacagatggctcgagttctctagggttattcagggtactaccacactgttaccccagtgggacaagtgtgtgaatttcatcgaaagcgctctgccttatgtcgtgggcaaaatgtttgtagatgtttacttccaggaggacaagaaggaaatgatggaggaactcgtggagggggtccggtgggcctttatcgatatgctcgagaaagaaaacgagtggatggacgcaggaactaagcgcaaagccaaggaaaaagctagagcggtgctggcaaaggtcggctacccagagttcattatgaatgatacccacgtgaacgaggaccttaaggccatcaaattttcagaagctgattatttcggtaatgttttgcaaacaaggaagtacctggcccagagtgactttttctggctccgtaaagcagtgcccaagaccgagtggtttacgaacccgactacagtaaatgccttctattccgctagcaccaaccagattcggtttcctgccggggaactgcaaaaacccttcttttggggaactgagtacccacgatctctttcatatggcgcaataggcgtcatcgtggggcatgagttcacacacggattcgacaataacggtagaaagtacgataagaatggcaacctggacccttggtggagtaccgagagcgaggaaaaatttaaggagaaaacgaagtgcatgattaatcagtattccaactactactggaaaaaggcggggttgaatgttaaaggaaagaggaccctcggcgaaaacatcgctgataacggtgggctgcgcgaggccttccgggcatatagaaagtggatcaatgacaggcgccagggcttagaagaacccctgctaccaggaattacatttactaacaatcagctattctttctgtcttacgcccatgtgcgatgtaactcgtatcggcccgaggctgcccgtgaacaagtccagataggcgcacacagccctccacagttcagagtgaatggggctatctccaactttgaggagttccagaaagcctttaattgcccgcccaactcaaccatgaataggggaatggatagttgtcgcctttggtga

SEQ ID NO: 7454 - RNA, 2250 nt, synthetic construct
  misc_feature 1..2250: note = derived and/or modified sequence opt4 fromPEX__Homo_sapiens__AAB47562
  source 1..2250: mol_type = other RNA
atggaggccgagaccggcagcagcgtggagaccggcaagaaggccaacagaggcaccagaatcgccctggtggtgttcgtgggcggcaccctggtgctgggcaccatcctgttcctggtgagccagggcctgctgagcctgcaggccaagcaggagtactgcctgaagcccgagtgcatcgaggccgccgccgccatcctgagcaaggtgaacctgagcgtggacccctgcgacaacttcttcagattcgcctgcgacggctggatcagcaacaaccccatccccgaggacatgcccagctacggcgtgtacccctggctgagacacaacgtggacctgaagctgaaggagctgctggagaagagcatcagcagaagaagagacaccgaggccatccagaaggccaagatcctgtacagcagctgcatgaacgagaaggccatcgagaaggccgacgccaagcccctgctgcacatcctgagacacagccccttcagatggcccgtgctggagagcaacatcggccccgagggcgtgtggagcgagagaaagttcagcctgctgcagaccctggccaccttcagaggccagtacagcaacagcgtgttcatcagactgtacgtgagccccgacgacaaggccagcaacgagcacatcctgaagctggaccaggccaccctgagcctggccgtgagagaggactacctggacaacagcaccgaggccaagagctacagagacgccctgtacaagttcatggtggacaccgccgtgctgctgggcgccaacagcagcagagccgagcacgacatgaagagcgtgctgagactggagatcaagatcgccgagatcatgatcccccacgagaacagaaccagcgaggccatgtacaacaagatgaacatcagcgagctgagcgccatgatcccccagttcgactggctgggctacatcaagaaggtgatcgacaccagactgtacccccacctgaaggacatcagccccagcgagaacgtggtggtgagagtgccccagtacttcaaggacctgttcagaatcctgggcagcgagagaaagaagaccatcgccaactacctggtgtggagaatggtgtacagcagaatccccaacctgagcagaagattccagtacagatggctggagttcagcagagtgatccagggcaccaccaccctgctgccccagtgggacaagtgcgtgaacttcatcgagagcgccctgccctacgtggtgggcaagatgttcgtggacgtgtacttccaggaggacaagaaggagatgatggaggagctggtggagggcgtgagatgggccttcatcgacatgctggagaaggagaacgagtggatggacgccggcaccaagagaaaggccaaggagaaggccagagccgtgctggccaaggtgggctaccccgagttcatcatgaacgacacccacgtgaacgaggacctgaaggccatcaagttcagcgaggccgactacttcggcaacgtgctgcagaccagaaagtacctggcccagagcgacttcttctggctgagaaaggccgtgcccaagaccgagtggttcaccaaccccaccaccgtgaacgccttctacagcgccagcaccaaccagatcagattccccgccggcgagctgcagaagcccttcttctggggcaccgagtaccccagaagcctgagctacggcgccatcggcgtgatcgtgggccacgagttcacccacggcttcgacaacaacggcagaaagtacgacaagaacggcaacctggacccctggtggagcaccgagagcgaggagaagttcaaggagaagaccaagtgcatgatcaaccagtacagcaactactactggaagaaggccggcctgaacgtgaagggcaagagaaccctgggcgagaacatcgccgacaacggcggcctgagagaggccttcagagcctacagaaagtggatcaacgacagaagacagggcctggaggagcccctgctgcccggcatcaccttcaccaacaaccagctgttcttcctgagctacgcccacgtgagatgcaacagctacagacccgaggccgccagagagcaggtgcagatcggcgcccacagccccccccagttcagagtgaacggcgccatcagcaacttcgaggagttccagaaggccttcaactgcccccccaacagcaccatgaacagaggcatggacagctgcagactgtggtga

SEQ ID NO: 7455 - RNA, 2250 nt, synthetic construct
  misc_feature 1..2250: note = derived and/or modified sequence opt5 fromPEX__Homo_sapiens__AAB47562
  source 1..2250: mol_type = other RNA
atggaagccgaaaccggcagctccgtggagacagggaagaaagctaacagaggaacgcggatcgccctggtcgttttcgtgggcgggaccctcgtgctgggaacaattctttttctggtctctcagggcctcctgagccttcaagcgaagcaggaatactgcctgaaacccgagtgtatcgaagctgccgccgctattctctccaaggtgaatctgtctgttgacccttgcgataacttctttcgcttcgcctgtgacgggtggatcagcaataacccgattcccgaggatatgccttcctatggagtgtacccctggctgagacacaatgtcgacctcaaactgaaggagcttctggaaaagtctatcagccggcgcagagataccgaggctatccagaaagccaagattctctattccagctgcatgaacgaaaaagcgatcgagaaggccgacgctaaacctctgcttcatattctgcggcactctccctttcgctggcctgtgctcgagtccaatatcggcccggaaggcgtttggagcgagagaaagttctctctgctgcagacactcgccacctttcgggggcaatactccaacagcgtgttcattcgcctgtatgtctctcccgatgacaaggcttccaatgaacatatccttaaactggatcaggccacactcagcctggcggtgagagaggactaccttgataactccaccgaagccaagtcttatcgggacgctctgtacaaatttatggtggatacggccgtcctcctgggagctaatagctcccgcgccgagcacgacatgaaaagcgttctgagactcgagattaagatcgccgaaatcatgattcctcatgagaaccggacctctgaagctatgtacaataagatgaacatctccgagctgagcgcgatgattccccagttcgactggcttggctatatcaaaaaggtgattgatacacgcctgtaccctcacctcaaggacatctctcccagcgaaaatgtggtcgtgagagttccgcagtattttaaagatctgttccggatccttgggtccgagagaaagaaaaccattgccaactacctggtgtggcgcatggtctattctcggatccctaacctcagcagacgctttcaataccggtggctggagttctccagagtgattcagggaacaaccacgctgctcccccagtgggacaagtgtgttaatttcatcgaaagcgctctgccttatgtggtcggcaaaatgtttgtggatgtctacttccaggaggacaagaaggaaatgatggaggaacttgtggagggggttcgctgggcctttattgatatgctggagaaagaaaacgagtggatggacgccggaacaaagcggaaagctaaggaaaaagccagagcggtgctcgctaaggtcggctaccccgagttcatcatgaatgatacccacgtgaacgaggacctgaaggccatcaaattttctgaagccgattatttcggcaatgttctgcaaacacgcaagtaccttgctcagtccgactttttctggctccggaaagccgtgcccaagaccgagtggtttaccaaccctacaacggtcaatgctttctatagcgcctctaccaaccagattagatttccggcgggggaactgcaaaaacccttcttttggggaacagagtaccctcgctccctgagctatggcgccatcggggtgattgtgggacatgagttcacccacggcttcgacaataacgggcggaagtacgataagaatggaaacctcgacccctggtggtccacagagtctgaggaaaaatttaaggagaaaaccaagtgcatgatcaatcagtatagcaactactactggaaaaaggctggcctgaatgttaaaggcaagagaacgcttggggaaaacattgccgataacggaggcctgcgggaggctttccgcgcctatagaaagtggatcaatgaccggagacaggggctcgaagaacctctgctgcccggaattacatttaccaacaatcagcttttctttctctcctacgcgcatgtccgctgtaactcttatcggccggaggccgctagagaacaagtgcagatcggcgcccacagccctccccagttccgcgtgaatggggctatctccaactttgaggagttccagaaagcctttaattgccctcccaacagcaccatgaatagaggcatggattcttgtcggctgtggtga

SEQ ID NO: 7456 - RNA, 2250 nt, synthetic construct
  misc_feature 1..2250: note = derived and/or modified sequence opt6 fromPEX__Homo_sapiens__AAB47562
  source 1..2250: mol_type = other RNA
atggaagcagaaaccggctcaagcgtagaaacaggtaaaaaagcaaatagaggaacaagaatagcattagtagtattcgtaggaggaacattagtattaggcaccatactattcctagtaagtcagggactccttagccttcaagccaaacaagaatactgtttaaaaccagaatgtattgaagcagcagcagcaatattatcaaaagtaaacttatcagtagacccatgcgacaacttcttccgctttgcatgcgatggatggattagcaataatcccatacccgaagacatgccgagctatggcgtatatccatggcttagacataacgtagacttaaaattaaaagaacttctcgaaaaatcaatatcaagaagaagagacacagaagcaatacaaaaagcaaaaattctctactcttcatgtatgaatgaaaaagctatagaaaaagctgatgcaaaacctttactacacatattaagacattcaccatttcgctggcccgtactagaaagcaacatagggccggaaggcgtatggtcagaaagaaaattttcccttctacaaactttagcaacatttagaggacagtactctaacagcgtatttataagattatacgtttcaccagatgacaaagcatcaaacgaacacatactaaaactagatcaagcaaccttatcattagcagtaagagaagactacttagataactcaacagaagccaaaagctatagagacgcattatataaattcatggtagacacagcagttttgttaggtgcaaatagttcgagagccgaacacgacatgaaatcagtactaagacttgaaatcaaaattgctgaaatcatgataccacacgaaaacagaacttcagaagctatgtataataaaatgaacatctcagaactctctgcaatgataccacaattcgactggttaggttacattaaaaaagtgatagacacccgattataccctcatcttaaagatatcagcccaagcgaaaacgtcgtagtacgtgtacctcaatactttaaagacctgttcaggatattaggaagcgaaagaaaaaaaacgattgcaaattatttagtctggcgtatggtttattcgagaataccaaaccttagcagaagattccaatatagatggctcgaattcagtagagtcatacaaggaacaacaacattactaccacaatgggacaaatgtgtaaatttcatcgaatccgcattaccctatgtagtaggaaaaatgttcgtagatgtatattttcaagaagacaaaaaagaaatgatggaagaactagtcgaaggagtaagatgggcatttatagacatgcttgaaaaagaaaatgaatggatggatgcaggcacaaaacgaaaagcaaaagaaaaagcaagagcagtattagcaaaagtaggatatcctgaattcataatgaacgacacacatgtaaatgaagatctaaaagcaataaaatttagcgaggccgactactttggtaacgtactacaaactagaaaatacttggcacaatcagattttttttggctacgaaaagctgtaccaaaaacggaatggtttaccaatcctacaacagtaaacgctttctattcagcatcaacaaatcaaataaggttcccagccggagaattacaaaaaccatttttctggggtactgaataccccagaagtctttcctatggagccattggagtaatagtaggccacgaattcacacatggcttcgataacaatggtcgaaaatatgacaaaaatggaaatctggatccatggtggtccacagaatctgaagaaaaatttaaagaaaaaacaaaatgtatgataaatcaatactctaactattactggaaaaaagctggattaaatgtaaaaggaaaaagaaccctaggagaaaacatagcagacaatggaggtctcagggaagcttttcgagcttatcgaaaatggattaacgatagaaggcaaggacttgaagaaccactattgccaggaataacatttacaaataatcaattattttttcttagctatgcacacgtaagatgtaattcatacagaccagaagcagcaagagaacaagtacaaataggcgcacacagtccacctcaattcagagtcaacggcgcaatatcaaatttcgaggaatttcaaaaagcattcaactgtcccccgaactcaaccatgaaccgaggtatggactcatgcagactatggtaa

SEQ ID NO: 7457 - protein, 227 aa, synthetic construct
  REGION 1..227: note = PRL__Homo_sapiens__P01236
MNIKGSPWKGSLLLLLVSNLLLCQSVAPLPICPGGAARCQVTLRDLFDRAVVLSHYIHNLSSEMFSEFDKRYTHGRGFITKAINSCHTSSLATPEDKEQAQQMNQKDFLSLIVSILRSWNEPLYHLVTEVRGMQEAPEAILSKAVEIEEQTKRLLEGMELIVSQVHPETKENEIYPVWSGLPSLQMADEESRLSAYYNLLHCLRRDSHKIDNYLKLLKCRIIHNNNC

SEQ ID NO: 7458 - RNA, 684 nt, synthetic construct
  misc_feature 1..684: note = PRL__Homo_sapiens__AAH15850
  source 1..684: mol_type = other RNA
atgaacatcaaaggatcgccatggaaagggtccctcctgctgctgctggtgtcaaacctgctcctgtgccagagcgtggcccccttgcccatctgtcccggcggggctgcccgatgccaggtgacccttcgagacctgtttgaccgcgccgtcgtcctgtcccactacatccataacctctcctcagaaatgttcagcgaattcgataaacggtatacccatggccgggggttcattaccaaggccatcaacagctgccacacttcttcccttgccacccccgaagacaaggagcaagcccaacagatgaatcaaaaagactttctgagcctgatagtcagcatattgcgatcctggaatgagcctctgtatcatctggtcacggaagtacgtggtatgcaagaagccccggaggctatcctatccaaagctgtagagattgaggagcaaaccaaacggcttctagagggcatggagctgatagtcagccaggttcatcctgaaaccaaagaaaatgagatctaccctgtctggtcgggacttccatccctgcagatggctgatgaagagtctcgcctttctgcttattataacctgctccactgcctacgcagggattcacataaaatcgacaattatctcaagctcctgaagtgccgaatcatccacaacaacaactgctaa

SEQ ID NO: 7459 - RNA, 684 nt, synthetic construct
  misc_feature 1..684: note = derived and/or modified sequence opt1 fromPRL__Homo_sapiens__AAH15850
  source 1..684: mol_type = other RNA
atgaacatcaagggcagcccctggaaggggtccctgctcctgctgctcgtgagcaacctgctgctctgccagtccgtcgccccgctgcccatctgccccggcggggccgcgcgctgccaggtgaccctgcgggacctcttcgaccgcgccgtggtcctgagccactacatccacaacctgtccagcgagatgttctccgagttcgacaagcggtacacccacggccgcgggttcatcacgaaggccatcaacagctgccacacctccagcctcgccacccccgaggacaaggagcaggcccagcagatgaaccagaaggacttcctgtccctgatcgtgagcatcctccggtcctggaacgagccgctgtaccacctggtgaccgaggtccgcggcatgcaggaggcgcccgaggccatcctcagcaaggccgtggagatcgaggagcagacgaagcggctgctggagggcatggagctcatcgtgtcccaggtccaccccgagaccaaggagaacgagatctaccccgtgtggagcgggctgccgtccctgcagatggccgacgaggagagccgcctctccgcgtactacaacctgctgcactgcctccggcgcgacagccacaagatcgacaactacctgaagctgctcaagtgccggatcatccacaacaacaactgctga

SEQ ID NO: 7460 - RNA, 684 nt, synthetic construct
  misc_feature 1..684: note = derived and/or modified sequence opt2 fromPRL__Homo_sapiens__AAH15850
  source 1..684: mol_type = other RNA
atgaacatcaagggctccccctggaagggctccctcctcctcctcctcgtctccaacctcctcctctgccagtccgtcgcccccctccccatctgccccggcggcgccgcccgctgccaggtcaccctccgcgacctcttcgaccgcgccgtcgtcctctcccactacatccacaacctctcctccgagatgttctccgagttcgacaagcgctacacccacggccgcggcttcatcaccaaggccatcaactcctgccacacctcctccctcgccacccccgaggacaaggagcaggcccagcagatgaaccagaaggacttcctctccctcatcgtctccatcctccgctcctggaacgagcccctctaccacctcgtcaccgaggtccgcggcatgcaggaggcccccgaggccatcctctccaaggccgtcgagatcgaggagcagaccaagcgcctcctcgagggcatggagctcatcgtctcccaggtccaccccgagaccaaggagaacgagatctaccccgtctggtccggcctcccctccctccagatggccgacgaggagtcccgcctctccgcctactacaacctcctccactgcctccgccgcgactcccacaagatcgacaactacctcaagctcctcaagtgccgcatcatccacaacaacaactgctga

SEQ ID NO: 7461 - RNA, 684 nt, synthetic construct
  misc_feature 1..684: note = derived and/or modified sequence opt3 fromPRL__Homo_sapiens__AAH15850
  source 1..684: mol_type = other RNA
atgaacatcaagggcagcccctggaaagggtccctgctccttctgttggtgtctaatttactgctatgccagtcagtcgcccctctcccaatttgtccgggaggtgctgcaagatgccaagttaccctgagggaccttttcgatcgggccgtggtactgagtcactacatacataacttgagctccgagatgttttctgagttcgacaagcgctatacacacggccgagggtttatcactaaagcgattaattcgtgtcatacgtcaagcctcgctacccccgaagataaggaacaggcccagcagatgaaccaaaaagacttcctgagtctgatcgtgtccattctccgttcttggaatgagcctttataccacctggtcacagaagtgagaggaatgcaggaggcaccagaggccatccttagcaaggctgttgaaatagaggaacagactaagaggttgctggagggcatggagctaatcgtgtcccaggtccatcccgaaaccaaagagaacgaaatttatcctgtgtggtcaggtctcccaagtctgcaaatggcagatgaggaaagccggctttctgcctactataatctgttgcactgcctccgcagagactcccacaagatcgataactacctgaaattactgaagtgtaggattatccataataacaattgctga

SEQ ID NO: 7462 - RNA, 684 nt, synthetic construct
  misc_feature 1..684: note = derived and/or modified sequence opt4 fromPRL__Homo_sapiens__AAH15850
  source 1..684: mol_type = other RNA
atgaacatcaagggcagcccctggaagggcagcctgctgctgctgctggtgagcaacctgctgctgtgccagagcgtggcccccctgcccatctgccccggcggcgccgccagatgccaggtgaccctgagagacctgttcgacagagccgtggtgctgagccactacatccacaacctgagcagcgagatgttcagcgagttcgacaagagatacacccacggcagaggcttcatcaccaaggccatcaacagctgccacaccagcagcctggccacccccgaggacaaggagcaggcccagcagatgaaccagaaggacttcctgagcctgatcgtgagcatcctgagaagctggaacgagcccctgtaccacctggtgaccgaggtgagaggcatgcaggaggcccccgaggccatcctgagcaaggccgtggagatcgaggagcagaccaagagactgctggagggcatggagctgatcgtgagccaggtgcaccccgagaccaaggagaacgagatctaccccgtgtggagcggcctgcccagcctgcagatggccgacgaggagagcagactgagcgcctactacaacctgctgcactgcctgagaagagacagccacaagatcgacaactacctgaagctgctgaagtgcagaatcatccacaacaacaactgctga

SEQ ID NO: 7463 - RNA, 684 nt, synthetic construct
  misc_feature 1..684: note = derived and/or modified sequence opt5 fromPRL__Homo_sapiens__AAH15850
  source 1..684: mol_type = other RNA
atgaacatcaagggcagcccctggaaagggtccctgctcctgcttctggtgtctaatctcctgctttgccagagcgtcgcccctctgccgatttgtcccggaggcgctgccagatgccaagttaccctccgggacctgttcgatcgcgcggtggtgctgtcccactacatccataacctctctagcgagatgttttccgagttcgacaagagatatacacacgggcggggatttattacgaaagctatcaattcttgtcataccagctccctggccacacctgaagataaggaacaggcccagcagatgaaccaaaaagacttccttagcctgattgtctctatcctccgctcctggaatgagcccctgtaccaccttgtgaccgaagttagaggcatgcaggaggctcctgaggccatcctgagcaaggctgtggaaattgaggaacagacaaagcggctcctggaggggatggagctgatcgtctctcaggtgcatcccgaaaccaaagagaacgaaatttatcctgtttggtccggactcccgagcctgcaaatggccgatgaggaatctcgcctttccgcgtactataatctgctccactgcctgagacgggacagccacaagatcgataactaccttaaactgctcaagtgtcgcattatccataataacaattgctga

SEQ ID NO: 7464 - RNA, 684 nt, synthetic construct
  misc_feature 1..684: note = derived and/or modified sequence opt6 fromPRL__Homo_sapiens__AAH15850
  source 1..684: mol_type = other RNA
atgaatataaaaggatcaccatggaaaggatcactactactactactagtatcaaacctactactatgccaatcagtagcaccactaccaatctgcccaggaggagcagcaagatgccaagtaacactaagagacctattcgacagagcagtagtactatcacactacatacacaacctatcatcagaaatgttctcagaattcgacaaaagatacacacacggaagaggattcataacaaaagcaataaactcatgtcatacatcatcactagctacaccagaagacaaagaacaagcacaacaaatgaaccaaaaagacttcctatcattaatagtatcaatactaagatcatggaacgaacctctataccatctagtaacagaagtccgaggaatgcaagaagcaccagaagcaatactatcaaaagcagtagaaatagaagaacaaacaaaaagactattagaaggaatggaattaatagtatcacaagtacatccagaaacaaaagaaaacgaaatatacccagtatggtcaggcctacctagccttcaaatggcagacgaagaatcacgactatcagcatactataacctactacactgtctaagaagagactcacacaaaatagacaactacctaaaactattaaaatgcagaataatacacaataacaactgctaa

SEQ ID NO: 7465 - protein, 375 aa, synthetic construct
  REGION 1..375: note = SERPINB5__Homo_sapiens__P36952
MDALQLANSAFAVDLFKQLCEKEPLGNVLFSPICLSTSLSLAQVGAKGDTANEIGQVLHFENVKDVPFGFQTVTSDVNKLSSFYSLKLIKRLYVDKSLNLSTEFISSTKRPYAKELETVDFKDKLEETKGQINNSIKDLTDGHFENILADNSVNDQTKILVVNAAYFVGKWMKKFSESETKECPFRVNKTDTKPVQMMNMEATFCMGNIDSINCKIIELPFQNKHLSMFILLPKDVEDESTGLEKIEKQLNSESLSQWTNPSTMANAKVKLSIPKFKVEKMIDPKACLENLGLKHIFSEDTSDFSGMSETKGVALSNVIHKVCLEITEDGGDSIEVPGARILQHKDELNADHPFIYIIRHNKTRNIIFFGKFCSP

SEQ ID NO: 7466 - RNA, 1128 nt, synthetic construct
  misc_feature 1..1128: note = SERPINB5__Homo_sapiens__CCDS32839.1
  source 1..1128: mol_type = other RNA
atggatgccctgcaactagcaaattcggcttttgccgttgatctgttcaaacaactatgtgaaaaggagccactgggcaatgtcctcttctctccaatctgtctctccacctctctgtcacttgctcaagtgggtgctaaaggtgacactgcaaatgaaattggacaggttcttcattttgaaaatgtcaaagatgtaccctttggatttcaaacagtaacatcggatgtaaacaaacttagttccttttactcactgaaactaatcaagcggctctacgtagacaaatctctgaatctttctacagagttcatcagctctacgaagagaccgtatgcaaaggaattggaaactgttgacttcaaagataaattggaagaaacgaaaggtcagatcaacaactcaattaaggatctcacagatggccactttgagaacattttagctgacaacagtgtgaacgaccagaccaaaatccttgtggttaatgctgcctactttgttggcaagtggatgaagaaattttctgaatcagaaacaaaagaatgtcctttcagagtcaacaagacagacaccaaaccagtgcagatgatgaacatggaggccacgttctgtatgggaaacattgacagtatcaattgtaagatcatagagcttccttttcaaaataagcatctcagcatgttcatcctactacccaaggatgtggaggatgagtccacaggcttggagaagattgaaaaacaactcaactcagagtcactgtcacagtggactaatcccagcaccatggccaatgccaaggtcaaactctccattccaaaatttaaggtggaaaagatgattgatcccaaggcttgtctggaaaatctagggctgaaacatatcttcagtgaagacacatctgatttctctggaatgtcagagaccaagggagtggccctatcaaatgttatccacaaagtgtgcttagaaataactgaagatggtggggattccatagaggtgccaggagcacggatcctgcagcacaaggatgaattgaatgctgaccatccctttatttacatcatcaggcacaacaaaactcgaaacattattttctttggcaaattctgttctccttaa

SEQ ID NO: 7467 - RNA, 1128 nt, synthetic construct
  misc_feature 1..1128: note = derived and/or modified sequence opt1 fromSERPINB5__Homo_sapiens__CCDS32839.1
  source 1..1128: mol_type = other RNA
atggacgccctgcagctcgccaacagcgcgttcgccgtggacctgttcaagcagctgtgcgagaaggagcccctcggcaacgtcctgttctccccgatctgcctgagcacctccctcagcctggcccaggtgggggccaagggcgacaccgccaacgagatcggccaggtgctgcacttcgagaacgtcaaggacgtgcccttcgggttccagacggtgacctccgacgtcaacaagctcagctccttctacagcctgaagctgatcaagcgcctctacgtggacaagtccctgaacctgagcaccgagttcatctccagcaccaagcggccctacgcgaaggagctcgagacggtggacttcaaggacaagctggaggagaccaaggggcagatcaacaactccatcaaggacctgaccgacggccacttcgagaacatcctcgccgacaacagcgtcaacgaccagaccaagatcctggtggtgaacgccgcctacttcgtcggcaagtggatgaagaagttctccgagagcgagacgaaggagtgccccttccgcgtgaacaagaccgacaccaagccggtgcagatgatgaacatggaggcgaccttctgcatggggaacatcgactccatcaactgcaagatcatcgagctgcccttccagaacaagcacctcagcatgttcatcctgctgcccaaggacgtcgaggacgagtccacgggcctcgagaagatcgagaagcagctgaacagcgagagcctgtcccagtggaccaaccccagcaccatggccaacgccaaggtgaagctctccatcccgaagttcaaggtggagaagatgatcgaccccaaggcctgcctggagaacctggggctcaagcacatcttcagcgaggacacctccgacttcagcggcatgtccgagacgaagggggtcgccctgagcaacgtgatccacaaggtgtgcctggagatcaccgaggacggcggcgactccatcgaggtccccggggcgcggatcctccagcacaaggacgagctgaacgccgaccaccccttcatctacatcatccgccacaacaagacccggaacatcatcttcttcggcaagttctgcagcccgtga

SEQ ID NO: 7468 - RNA, 1128 nt, synthetic construct
  misc_feature 1..1128: note = derived and/or modified sequence opt2 fromSERPINB5__Homo_sapiens__CCDS32839.1
  source 1..1128: mol_type = other RNA
atggacgccctccagctcgccaactccgccttcgccgtcgacctcttcaagcagctctgcgagaaggagcccctcggcaacgtcctcttctcccccatctgcctctccacctccctctccctcgcccaggtcggcgccaagggcgacaccgccaacgagatcggccaggtcctccacttcgagaacgtcaaggacgtccccttcggcttccagaccgtcacctccgacgtcaacaagctctcctccttctactccctcaagctcatcaagcgcctctacgtcgacaagtccctcaacctctccaccgagttcatctcctccaccaagcgcccctacgccaaggagctcgagaccgtcgacttcaaggacaagctcgaggagaccaagggccagatcaacaactccatcaaggacctcaccgacggccacttcgagaacatcctcgccgacaactccgtcaacgaccagaccaagatcctcgtcgtcaacgccgcctacttcgtcggcaagtggatgaagaagttctccgagtccgagaccaaggagtgccccttccgcgtcaacaagaccgacaccaagcccgtccagatgatgaacatggaggccaccttctgcatgggcaacatcgactccatcaactgcaagatcatcgagctccccttccagaacaagcacctctccatgttcatcctcctccccaaggacgtcgaggacgagtccaccggcctcgagaagatcgagaagcagctcaactccgagtccctctcccagtggaccaacccctccaccatggccaacgccaaggtcaagctctccatccccaagttcaaggtcgagaagatgatcgaccccaaggcctgcctcgagaacctcggcctcaagcacatcttctccgaggacacctccgacttctccggcatgtccgagaccaagggcgtcgccctctccaacgtcatccacaaggtctgcctcgagatcaccgaggacggcggcgactccatcgaggtccccggcgcccgcatcctccagcacaaggacgagctcaacgccgaccaccccttcatctacatcatccgccacaacaagacccgcaacatcatcttcttcggcaagttctgctccccctga

SEQ ID NO: 7469 - RNA, 1128 nt, synthetic construct
  misc_feature 1..1128: note = derived and/or modified sequence opt3 fromSERPINB5__Homo_sapiens__CCDS32839.1
  source 1..1128: mol_type = other RNA
atggacgccctgcagctcgctaacagcgcattcgccgtggatctttttaagcaactgtgcgagaaagaacccttgggcaatgtcttattctcccctatctgtctgtctacctcactaagtctcgcgcaggttggggctaagggagacacagccaacgagattggtcaggtgctgcactttgaaaatgtaaaagatgtgccattcggctttcagactgtcacgagcgacgtgaacaaactttcctctttctactcgctgaaattgataaagagactctatgttgataagtcactgaatctgagcaccgagtttatcagttccacaaaaaggccgtacgcaaaggaactcgagactgtggacttcaaagataagttagaggaaaccaaagggcaaattaacaattctatcaaggacctgacagatggacattttgagaacattcttgccgacaatagcgtcaacgatcagaccaagatcttggtggtaaatgctgcatatttcgttggcaaatggatgaagaaattttccgaatcagagactaaggagtgccccttccgggtgaacaaaacagacaccaagcctgtccagatgatgaatatggaagccacgttttgtatgggtaacatagatagtatcaattgcaaaattatcgagctgccattccagaacaagcacctaagcatgttcattctcctgcccaaggacgtggaagacgagtctactgggcttgaaaagatcgagaagcaactgaactccgagtcattgagccagtggaccaatcctagtacaatggctaacgccaaagtgaagctctctataccaaaatttaaggtcgaaaagatgattgatcccaaagcgtgtctggagaatttaggactgaagcatatcttctccgaagacactagcgatttttcgggcatgtctgagaccaaaggcgttgcactctccaacgtgattcacaaggtatgccttgaaatcacagaggacgggggagattcaatcgaggtgcctggtgcccgcattctgcagcataaagacgaattgaatgctgatcacccattcatatacatcattcgacacaacaagacccgtaatatcatatttttcggcaagttttgtagtccgtga

SEQ ID NO: 7470 - RNA, 1128 nt, synthetic construct
  misc_feature 1..1128: note = derived and/or modified sequence opt4 fromSERPINB5__Homo_sapiens__CCDS32839.1
  source 1..1128: mol_type = other RNA
atggacgccctgcagctggccaacagcgccttcgccgtggacctgttcaagcagctgtgcgagaaggagcccctgggcaacgtgctgttcagccccatctgcctgagcaccagcctgagcctggcccaggtgggcgccaagggcgacaccgccaacgagatcggccaggtgctgcacttcgagaacgtgaaggacgtgcccttcggcttccagaccgtgaccagcgacgtgaacaagctgagcagcttctacagcctgaagctgatcaagagactgtacgtggacaagagcctgaacctgagcaccgagttcatcagcagcaccaagagaccctacgccaaggagctggagaccgtggacttcaaggacaagctggaggagaccaagggccagatcaacaacagcatcaaggacctgaccgacggccacttcgagaacatcctggccgacaacagcgtgaacgaccagaccaagatcctggtggtgaacgccgcctacttcgtgggcaagtggatgaagaagttcagcgagagcgagaccaaggagtgccccttcagagtgaacaagaccgacaccaagcccgtgcagatgatgaacatggaggccaccttctgcatgggcaacatcgacagcatcaactgcaagatcatcgagctgcccttccagaacaagcacctgagcatgttcatcctgctgcccaaggacgtggaggacgagagcaccggcctggagaagatcgagaagcagctgaacagcgagagcctgagccagtggaccaaccccagcaccatggccaacgccaaggtgaagctgagcatccccaagttcaaggtggagaagatgatcgaccccaaggcctgcctggagaacctgggcctgaagcacatcttcagcgaggacaccagcgacttcagcggcatgagcgagaccaagggcgtggccctgagcaacgtgatccacaaggtgtgcctggagatcaccgaggacggcggcgacagcatcgaggtgcccggcgccagaatcctgcagcacaaggacgagctgaacgccgaccaccccttcatctacatcatcagacacaacaagaccagaaacatcatcttcttcggcaagttctgcagcccctga

SEQ ID NO: 7471 - RNA, 1128 nt, synthetic construct
  misc_feature 1..1128: note = derived and/or modified sequence opt5 fromSERPINB5__Homo_sapiens__CCDS32839.1
  source 1..1128: mol_type = other RNA
atggacgccctgcagctcgctaacagcgccttcgcggtggatctgtttaagcaactttgcgagaaagaacccctgggcaatgtcctcttctcccctatctgtctgtctaccagcctttccctggctcaggttggggccaagggagacacagccaacgagattggccaggtgctccactttgaaaatgtgaaagatgtcccgttcgggtttcagacggtgacctctgacgttaacaagctgagctccttctactctctgaaactcatcaagagactgtatgtggataagagccttaatctgtccacagagtttattagctctaccaaacggccctacgctaaggaactcgagacagtcgacttcaaagataagctggaggaaaccaaaggacaaatcaacaattccattaaggaccttacagatggccattttgagaacatcctggccgacaatagcgtgaacgatcagaccaagatcctcgttgtgaatgctgcctatttcgtcgggaaatggatgaagaaattttctgaatccgagacgaaggagtgccctttccgcgtgaacaaaaccgacacaaagcccgtgcagatgatgaatatggaagcgaccttttgtatgggaaacattgatagcatcaattgcaaaattatcgagctgcctttccagaacaagcacctgtctatgttcattctcctgcccaaggacgtcgaagacgagtccacaggccttgagaaaatcgaaaagcaactgaacagcgagtccctctctcagtggaccaatcctagcacgatggccaacgctaaagttaagctgtccattccgaaatttaaggtggaaaagatgatcgatcccaaagcctgtcttgagaatctgggcctcaagcatatcttcagcgaagacacatctgatttttccgggatgagcgagaccaaaggagtggctctgtctaacgtcattcacaaggtgtgcctggaaatcacagaggacggcggggatagcattgaggttcctggagccagaatcctccagcataaagacgaactgaatgcggatcaccccttcatttacatcatccggcacaacaagacccgcaatattatctttttcggcaagttttgttccccttga

SEQ ID NO: 7472 - RNA, 1128 nt, synthetic construct
  misc_feature 1..1128: note = derived and/or modified sequence opt6 fromSERPINB5__Homo_sapiens__CCDS32839.1
  source 1..1128: mol_type = other RNA
atggacgcacttcaactcgcaaactcagcattcgccgtagacctattcaaacaattatgcgaaaaagaaccattaggcaacgtcctattctcaccaatatgcctaagtacaagcctatccctcgcccaagtcggagccaaaggagatacagcaaatgaaataggacaagtactccacttcgaaaacgtaaaagatgtcccattcggatttcaaacagtcacatcagacgtcaacaaactatcatcattctactcactcaaactaataaaaagactatacgtcgataaatccctaaacctatccacagaattcatatcatcaacaaaaagaccatatgcaaaagaactagaaactgttgatttcaaagacaaattagaagaaacaaaaggacaaataaacaactcaatcaaagacctaacagacggacactttgaaaacatactcgccgacaatagcgtaaatgaccaaacaaaaatattagtagtcaacgcagcatacttcgtaggtaaatggatgaaaaaattctcagaatcagaaacaaaagaatgcccattcagagtaaacaaaaccgatacaaaaccagtccaaatgatgaacatggaagcaacattctgtatgggaaacatagactcaataaactgcaaaataatagaactaccattccaaaataaacatctcagtatgttcatactactaccaaaagacgtcgaagacgaatccacaggactagaaaaaatcgaaaaacaactaaactcagaatcactctcccaatggacaaacccatcaacaatggcaaatgcaaaagtaaaactatcaataccaaaattcaaagtagaaaaaatgatagacccaaaagcttgcctagaaaacctaggactaaaacacattttctctgaagacacttcagacttctcaggaatgtcagaaacaaaaggagtagcactaagcaatgtaattcacaaagtctgcttagaaataacagaagacggaggagactcaatagaagtacctggagccagaatactccaacacaaagacgaactaaatgcagatcacccattcatatacataatacgacataacaaaactagaaacataatattcttcggcaaattctgttcaccataa

SEQ ID NO: 7473 - protein, 433 aa, synthetic construct
  REGION 1..433: note = sFLT-1__Homo_sapiens__H9N1E7
MVIVEYCKYGNLSNYLKSKRDLFFLNKDAALHMEPKKEKMEPGLEQGKKPRLDSVTSSESFASSGFQEDKSLSDVEEEEDSDGFYKEPITMEDLISYSFQVARGMEFLSSRKCIHRDLAARNILLSENNVVKICDFGLARDIYKNPDYVRKGDTRLPLKWMAPESIFDKIYSTKSDVWSYGVLLWEIFSLGGSPYPGVQMDEDFCSRLREGMRMRAPEYSTPEIYQIMLDCWHRDPKERPRFAELVEKLGDLLQANVQQDGKDYIPINAILTGNSGFTYSTPAFSEDFFKESISAPKFNSGSSDDVRYVNAFKFMSLERIKTFEELLPNATSMFDDYQGDSSTLLASPMLKRFTWTDSKPKASLKIDLRVTSKSKESGLSDVSRPSFCHSSCGHVSEGKRRFTYDHAELERKIACCSPPPDYNSVVLYSTPPI

SEQ ID NO: 7474 - RNA, 1302 nt, synthetic construct
  misc_feature 1..1302: note = sFLT-1__Homo_sapiens__AFC77954
  source 1..1302: mol_type = other RNA
atggtgattgttgaatactgcaaatatggaaatctctccaactacctcaagagcaaacgtgacttattttttctcaacaaggatgcagcactacacatggagcctaagaaagaaaaaatggagccaggcctggaacaaggcaagaaaccaagactagatagcgtcaccagcagcgaaagctttgcgagctccggctttcaggaagataaaagtctgagtgatgttgaggaagaggaggattctgacggtttctacaaggagcccatcactatggaagatctgatttcttacagttttcaagtggccagaggcatggagttcctgtcttccagaaagtgcattcatcgggacctggcagcgagaaacattcttttatctgagaacaacgtggtgaagatttgtgattttggccttgcccgggatatttataagaaccccgattatgtgagaaaaggagatactcgacttcctctgaaatggatggctcctgaatctatctttgacaaaatctacagcaccaagagcgacgtgtggtcttacggagtattgctgtgggaaatcttctccttaggtgggtctccatacccaggagtacaaatggatgaggacttttgcagtcgcctgagggaaggcatgaggatgagagctcctgagtactctactcctgaaatctatcagatcatgctggactgctggcacagagacccaaaagaaaggccaagatttgcagaacttgtggaaaaactaggtgatttgcttcaagcaaatgtacaacaggatggtaaagactacatcccaatcaatgccatactgacaggaaatagtgggtttacatactcaactcctgccttctctgaggacttcttcaaggaaagtatttcagctccgaagtttaattcaggaagctctgatgatgtcagatatgtaaatgctttcaagttcatgagcctggaaagaatcaaaacctttgaagaacttttaccgaatgccacctccatgtttgatgactaccagggcgacagcagcactctgttggcctctcccatgctgaagcgcttcacctggactgacagcaaacccaaggcctcgctcaagattgacttgagagtaaccagtaaaagtaaggagtcggggctgtctgatgtcagcaggcccagtttctgccattccagctgtgggcacgtcagcgaaggcaagcgcaggttcacctacgaccacgctgagctggaaaggaaaatcgcgtgctgctccccgcccccagactacaactcggtggtcctgtactccaccccacccatctag

SEQ ID NO: 7475 - RNA, 1302 nt, synthetic construct
  misc_feature 1..1302: note = derived and/or modified sequence opt1 fromsFLT-1__Homo_sapiens__AFC77954
  source 1..1302: mol_type = other RNA
atggtgatcgtcgagtactgcaagtacggcaacctgagcaactacctcaagtccaagcgcgacctgttcttcctgaacaaggacgccgccctccacatggagcccaagaaggagaagatggagcccgggctggagcagggcaagaagccccggctggacagcgtgacctccagcgagtccttcgcgagctccgggttccaggaggacaagagcctctccgacgtggaggaggaggaggacagcgacggcttctacaaggagcccatcaccatggaggacctgatctcctacagcttccaggtcgcccgcgggatggagttcctgtccagccggaagtgcatccaccgcgacctcgccgcccggaacatcctgctgtccgagaacaacgtggtgaagatctgcgacttcggcctcgcccgcgacatctacaagaaccccgactacgtccggaagggcgacacgcgcctgcccctgaagtggatggcgcccgagagcatcttcgacaagatctactccaccaagagcgacgtgtggtcctacggggtgctcctgtgggagatcttcagcctgggcgggagcccctaccccggcgtccagatggacgaggacttctgctcccggctccgcgaggggatgcggatgcgcgccccggagtacagcacccccgagatctaccagatcatgctggactgctggcaccgggaccccaaggagcgcccccggttcgccgagctggtggagaagctcggcgacctgctgcaggccaacgtgcagcaggacggcaaggactacatcccgatcaacgcgatcctcaccgggaactccggcttcacgtacagcacccccgccttctccgaggacttcttcaaggagagcatctccgcccccaagttcaacagcgggtccagcgacgacgtccgctacgtgaacgccttcaagttcatgtccctggagcggatcaagaccttcgaggagctgctccccaacgccaccagcatgttcgacgactaccagggcgactccagcacgctgctggcgtccccgatgctcaagcgcttcacctggaccgacagcaagcccaaggcctccctgaagatcgacctgcgggtgaccagcaagtccaaggagagcggcctcagcgacgtctcccgccccagcttctgccactccagctgcgggcacgtgtccgagggcaagcggcgcttcacgtacgaccacgccgagctggagcgcaagatcgcctgctgcagcccgccgcccgactacaactccgtggtcctgtacagcaccccgcccatctga

SEQ ID NO: 7476 - RNA, 1302 nt, synthetic construct
  misc_feature 1..1302: note = derived and/or modified sequence opt2 fromsFLT-1__Homo_sapiens__AFC77954
  source 1..1302: mol_type = other RNA
atggtcatcgtcgagtactgcaagtacggcaacctctccaactacctcaagtccaagcgcgacctcttcttcctcaacaaggacgccgccctccacatggagcccaagaaggagaagatggagcccggcctcgagcagggcaagaagccccgcctcgactccgtcacctcctccgagtccttcgcctcctccggcttccaggaggacaagtccctctccgacgtcgaggaggaggaggactccgacggcttctacaaggagcccatcaccatggaggacctcatctcctactccttccaggtcgcccgcggcatggagttcctctcctcccgcaagtgcatccaccgcgacctcgccgcccgcaacatcctcctctccgagaacaacgtcgtcaagatctgcgacttcggcctcgcccgcgacatctacaagaaccccgactacgtccgcaagggcgacacccgcctccccctcaagtggatggcccccgagtccatcttcgacaagatctactccaccaagtccgacgtctggtcctacggcgtcctcctctgggagatcttctccctcggcggctccccctaccccggcgtccagatggacgaggacttctgctcccgcctccgcgagggcatgcgcatgcgcgcccccgagtactccacccccgagatctaccagatcatgctcgactgctggcaccgcgaccccaaggagcgcccccgcttcgccgagctcgtcgagaagctcggcgacctcctccaggccaacgtccagcaggacggcaaggactacatccccatcaacgccatcctcaccggcaactccggcttcacctactccacccccgccttctccgaggacttcttcaaggagtccatctccgcccccaagttcaactccggctcctccgacgacgtccgctacgtcaacgccttcaagttcatgtccctcgagcgcatcaagaccttcgaggagctcctccccaacgccacctccatgttcgacgactaccagggcgactcctccaccctcctcgcctcccccatgctcaagcgcttcacctggaccgactccaagcccaaggcctccctcaagatcgacctccgcgtcacctccaagtccaaggagtccggcctctccgacgtctcccgcccctccttctgccactcctcctgcggccacgtctccgagggcaagcgccgcttcacctacgaccacgccgagctcgagcgcaagatcgcctgctgctcccccccccccgactacaactccgtcgtcctctactccaccccccccatctga

SEQ ID NO: 7477 - RNA, 1302 nt, synthetic construct
  misc_feature 1..1302: note = derived and/or modified sequence opt3 fromsFLT-1__Homo_sapiens__AFC77954
  source 1..1302: mol_type = other RNA
atggtgatcgtcgagtactgcaagtatggcaacctgagcaattacctcaaatccaagagagaccttttctttctgaacaaagatgccgctttgcacatggaacccaagaaagagaagatggaacctgggttagagcagggaaagaaaccaaggctggactctgttacctcaagtgagagcttcgcatcctctggttttcaagaagataagtcgctatcagacgtggaggaagaggaagatagcgacggcttctataaagagccgattaccatggaggatctcataagttactcctttcaggtagcccgggggatggagttcctgtctagccgcaagtgtatccatcgagaccttgcggctcgtaatattctgttgtccgaaaacaatgtggtcaaaatctgcgattttggactcgccagagacatttataagaaccccgattacgtgaggaagggcgacactcggctgcctctgaaatggatggcaccagaatcaatcttcgataagatatatagtacgaaaagcgacgtttggtcttacggtgtgctcttatgggagatcttttcccttgggggatcaccctaccctggcgtccagatggacgaagatttctgtagccgcctgagagagggcatgaggatgcgggccccagagtatagtacccccgaaatttaccagatcatgttggactgctggcaccgcgatcctaaggagcgaccaagatttgctgaactggtggagaaactaggggacctcctgcaagcaaatgtacagcaggatggaaaggactatattccgatcaacgccatacttacaggtaattctggcttcacttactccacccccgcttttagcgaagatttcttcaaagagtcgatttctgcccctaagtttaactccgggtcaagtgacgatgttaggtatgtgaatgcgttcaagtttatgagcctggagcggatcaaaacattcgaagagttgctcccaaacgcaacctccatgtttgacgattaccagggagactctagcactctgttagcctcacccatgctgaagcgtttcacatggaccgacagtaaacctaaggcttccctcaaaattgatcttcgcgtcacgagcaagtctaaggaatcaggcctgagtgacgtgagcagaccatccttttgtcattcttcgtgcggtcacgtgagcgaggggaaaaggcggttcacttatgatcatgccgaattggagcgaaagatcgcatgttgctcacccccgcctgactacaattccgtcgttctatacagtacacccccaatctga

SEQ ID NO: 7478 - RNA, 1302 nt, synthetic construct
  misc_feature 1..1302: note = derived and/or modified sequence opt4 fromsFLT-1__Homo_sapiens__AFC77954
  source 1..1302: mol_type = other RNA
atggtgatcgtggagtactgcaagtacggcaacctgagcaactacctgaagagcaagagagacctgttcttcctgaacaaggacgccgccctgcacatggagcccaagaaggagaagatggagcccggcctggagcagggcaagaagcccagactggacagcgtgaccagcagcgagagcttcgccagcagcggcttccaggaggacaagagcctgagcgacgtggaggaggaggaggacagcgacggcttctacaaggagcccatcaccatggaggacctgatcagctacagcttccaggtggccagaggcatggagttcctgagcagcagaaagtgcatccacagagacctggccgccagaaacatcctgctgagcgagaacaacgtggtgaagatctgcgacttcggcctggccagagacatctacaagaaccccgactacgtgagaaagggcgacaccagactgcccctgaagtggatggcccccgagagcatcttcgacaagatctacagcaccaagagcgacgtgtggagctacggcgtgctgctgtgggagatcttcagcctgggcggcagcccctaccccggcgtgcagatggacgaggacttctgcagcagactgagagagggcatgagaatgagagcccccgagtacagcacccccgagatctaccagatcatgctggactgctggcacagagaccccaaggagagacccagattcgccgagctggtggagaagctgggcgacctgctgcaggccaacgtgcagcaggacggcaaggactacatccccatcaacgccatcctgaccggcaacagcggcttcacctacagcacccccgccttcagcgaggacttcttcaaggagagcatcagcgcccccaagttcaacagcggcagcagcgacgacgtgagatacgtgaacgccttcaagttcatgagcctggagagaatcaagaccttcgaggagctgctgcccaacgccaccagcatgttcgacgactaccagggcgacagcagcaccctgctggccagccccatgctgaagagattcacctggaccgacagcaagcccaaggccagcctgaagatcgacctgagagtgaccagcaagagcaaggagagcggcctgagcgacgtgagcagacccagcttctgccacagcagctgcggccacgtgagcgagggcaagagaagattcacctacgaccacgccgagctggagagaaagatcgcctgctgcagccccccccccgactacaacagcgtggtgctgtacagcaccccccccatctga

SEQ ID NO: 7479 - RNA, 1302 nt, synthetic construct
  misc_feature 1..1302: note = derived and/or modified sequence opt5 fromsFLT-1__Homo_sapiens__AFC77954
  source 1..1302: mol_type = other RNA
atggtgatcgtcgagtactgcaagtatggcaacctgagcaattacctcaaatccaagagagacctgttctttcttaacaaagatgccgctctgcacatggaacccaagaaagagaagatggaacctgggctcgagcagggaaagaaaccgcggctggactctgttaccagctccgaatctttcgccagctccggctttcaagaggataagtctcttagcgacgtggaggaagaggaagattccgacgggttctataaagagcccattaccatggaggatctgatcagctactcttttcaggtggcgcgcggaatggagttcctctccagcagaaagtgtattcatcgggacctggctgcccgcaatatcctgctctctgagaacaatgtcgtgaaaatttgcgattttggcctggccagagacatctataagaaccctgattacgttcggaagggggacacgcgccttcccctgaaatggatggctcctgaatccatcttcgataagatttatagcaccaaatctgacgtgtggtcctacggagtcctcctgtgggagatctttagccttggcggctccccctaccctggggtgcagatggacgaagatttctgttctagactgcgggagggaatgcgcatgagagccccggagtatagcacacccgaaatttaccagatcatgctcgactgctggcaccgggatcctaaggagcgccccagatttgctgaactggttgagaaactgggcgacctcctgcaagccaatgtgcagcaggatgggaaggactatattcctatcaacgcgattcttaccggaaattccggcttcacatacagcacccccgccttttctgaagatttcttcaaagagtccatcagcgctccgaagtttaactctgggagctccgacgatgtccggtatgtgaatgccttcaagtttatgtctctggagcgcatcaaaacattcgaagaactcctgcctaacgctaccagcatgtttgacgattaccagggagactccagcacgcttctggcctctcccatgctcaagagattcacctggacagactccaaacctaaggcgagcctgaaaattgatctgcgggtgacctctaagtccaaggaaagcggcctctccgacgtctctagacccagcttttgtcattcctcttgcggccacgttagcgaggggaaacgccggttcacatatgatcatgccgaactggagagaaagatcgcttgttgctcccctcccccggactacaatagcgtggtgctttactctacaccccctatttga

SEQ ID NO: 7480 - RNA, 1302 nt, synthetic construct
  misc_feature 1..1302: note = derived and/or modified sequence opt6 fromsFLT-1__Homo_sapiens__AFC77954
  source 1..1302: mol_type = other RNA
atggtaatagtagaatattgcaaatatggaaacttatccaactacctaaaaagtaaaagagatctatttttcctaaataaagacgcagctttacatatggaaccaaaaaaagaaaaaatggaaccaggactagaacaaggaaaaaaaccaagactcgatagtgttacatcatccgaatcattcgcaagctcaggatttcaggaagataaatcattaagcgacgtagaagaagaagaagactccgacggtttctacaaagaaccaataactatggaagacttaatatcatactcattccaagtcgcgagaggcatggaattcttatcaagccgaaaatgcatacacagagacctagcagcaagaaacatactactttcagaaaataacgtagtaaaaatatgtgacttcggactagcaagagatatatacaaaaatccagactatgtaaggaaaggagacacaagactaccactaaaatggatggcacccgaaagcatattcgacaaaatatattcaacaaaatcagatgtatggtcatacggagtactactatgggaaatatttagcttaggaggctcaccataccccggagtacaaatggacgaagacttttgttcaagattaagagaaggaatgagaatgagagcaccagaatacagtactccagaaatataccaaataatgctagactgttggcacagagatcctaaagaacgaccaagatttgcagaacttgtagaaaaattaggagatctcctacaagcaaatgtccaacaagacggaaaagactacataccaataaacgcaatcctaacaggcaacagcggattcacatacagcacaccagcattctcagaagacttcttcaaagaatcaatatcagcaccaaaattcaactcaggaagttcagacgacgtcagatatgtcaacgcatttaaattcatgtcactagaacgaataaaaacatttgaagagttactaccaaacgcaacatcaatgtttgacgattaccaaggagactcatcaacattactagcctcaccaatgctcaaaagattcacatggacagactcaaaaccaaaagcatcactaaaaatcgatttaagagttacatcaaaatccaaagaatcaggcctatcagacgtatcaagaccaagcttttgccattcatcatgcggacatgtatcagaaggaaaaagaagatttacctacgaccacgcagaactcgaacgcaaaatagcatgctgctcaccaccaccagactacaacagtgtagtattatactcaacaccaccaatataa

SEQ ID NO: 7481 - protein, 85 aa, synthetic construct
  REGION 1..85: note = sFLT-1__Homo_sapiens__H9N1E8
MLKRFTWTDSKPKASLKIDLRVTSKSKESGLSDVSRPSFCHSSCGHVSEGKRRFTYDHAELERKIACCSPPPDYNSVVLYSTPPI

SEQ ID NO: 7482 - RNA, 258 nt, synthetic construct
  misc_feature 1..258: note = sFLT-1__Homo_sapiens__AFC77955
  source 1..258: mol_type = other RNA
atgctgaagcgcttcacctggactgacagcaaacccaaggcctcgctcaagattgacttgagagtaaccagtaaaagtaaggagtcggggctgtctgatgtcagcaggcccagtttctgccattccagctgtgggcacgtcagcgaaggcaagcgcaggttcacctacgaccacgctgagctggaaaggaaaatcgcgtgctgctccccgcccccagactacaactcggtggtcctgtactccaccccacccatctag

SEQ ID NO: 7483 - RNA, 258 nt, synthetic construct
  misc_feature 1..258: note = derived and/or modified sequence opt1 fromsFLT-1__Homo_sapiens__AFC77955
  source 1..258: mol_type = other RNA
atgctgaagcgcttcacctggaccgacagcaagcccaaggcctccctcaagatcgacctgcgggtgacgagcaagtccaaggagagcggcctgtccgacgtcagccgcccgtccttctgccacagctcctgcgggcacgtgagcgagggcaagcggcgcttcacctacgaccacgccgagctcgagcggaagatcgcgtgctgctcccccccccccgactacaacagcgtggtcctgtactccaccccgcccatctga

SEQ ID NO: 7484 - RNA, 258 nt, synthetic construct
  misc_feature 1..258: note = derived and/or modified sequence opt2 fromsFLT-1__Homo_sapiens__AFC77955
  source 1..258: mol_type = other RNA
atgctcaagcgcttcacctggaccgactccaagcccaaggcctccctcaagatcgacctccgcgtcacctccaagtccaaggagtccggcctctccgacgtctcccgcccctccttctgccactcctcctgcggccacgtctccgagggcaagcgccgcttcacctacgaccacgccgagctcgagcgcaagatcgcctgctgctcccccccccccgactacaactccgtcgtcctctactccaccccccccatctga

SEQ ID NO: 7485 - RNA, 258 nt, synthetic construct
  misc_feature 1..258: note = derived and/or modified sequence opt3 fromsFLT-1__Homo_sapiens__AFC77955
  source 1..258: mol_type = other RNA
atgctgaagagattcacctggacagacagcaaacccaaggcctccctcaaaatcgatcttagggtgacttctaagtcaaaagagagtggcctgagcgacgtctcccggccttctttttgccactcgtcatgtgggcatgttagcgaaggaaagcgccgattcacgtacgatcacgctgagttggaacgtaagattgcatgctgtagtccaccgcccgactataactccgtggtattatactctacccctccaatatga

SEQ ID NO: 7486 - RNA, 258 nt, synthetic construct
  misc_feature 1..258: note = derived and/or modified sequence opt4 fromsFLT-1__Homo_sapiens__AFC77955
  source 1..258: mol_type = other RNA
atgctgaagagattcacctggaccgacagcaagcccaaggccagcctgaagatcgacctgagagtgaccagcaagagcaaggagagcggcctgagcgacgtgagcagacccagcttctgccacagcagctgcggccacgtgagcgagggcaagagaagattcacctacgaccacgccgagctggagagaaagatcgcctgctgcagccccccccccgactacaacagcgtggtgctgtacagcaccccccccatctga

SEQ ID NO: 7487 - RNA, 258 nt, synthetic construct
  misc_feature 1..258: note = derived and/or modified sequence opt5 fromsFLT-1__Homo_sapiens__AFC77955
  source 1..258: mol_type = other RNA
atgctgaagagattcacctggacagacagcaaacccaaggcctccctcaaaatcgatctgcgggtgacgtctaagagcaaagagtccggcctttctgacgtcagccgcccttccttttgccactctagctgtgggcatgtttccgaaggaaagagacggttcacctacgatcacgctgagctggaacgcaagattgcctgctgtagcccgccccctgactataactctgtggtgctctactccacaccccctatctga

SEQ ID NO: 7488 - RNA, 258 nt, synthetic construct
  misc_feature 1..258: note = derived and/or modified sequence opt6 fromsFLT-1__Homo_sapiens__AFC77955
  source 1..258: mol_type = other RNA
atgctaaaaagattcacatggacagactcaaaaccaaaagcatcactaaaaatagacctaagagtaacatcaaaatcaaaagaatcaggactatcagacgtatcaagaccatcattctgccactcatcatgcggacacgtatcagaaggaaaaagaagattcacatacgaccacgcagaactagaaagaaaaatagcatgctgctcaccaccaccagactacaactcagtagtactatactcaacaccaccaatataa

SEQ ID NO: 7489 - protein, 1338 aa, synthetic construct
  REGION 1..1338: note = sFLT-1__Homo_sapiens__L7RSL3
MVSYWDTGVLLCALLSCLLLTGSSSGSKLKDPELSLKGTQHIMQAGQTLHLQCRGEAAHKWSLPEMVSKESERLSITKSACGRNGKQFCSTLTLNTAQANHTGFYSCKYLAVPTSKKKETESAIYIFISDTGRPFVEMYSEIPEIIHMTEGRELVIPCRVTSPNITVTLKKFPLDTLIPDGKRIIWDSRKGFIISNATYKEIGLLTCEATVNGHLYKTNYLTHRQTNTIIDVQISTPRPVKLLRGHTLVLNCTATTPLNTRVQMTWSYPDEKNKRASVRRRIDQSNSHANIFYSVLTIDKMQNKDKGLYTCRVRSGPSFKSVNTSVHIYDKAFITVKHRKQQVLETVAGKRSYRLSMKVKAFPSPEVVWLKDGLPATEKSARYLTRGYSLIIKDVTEEDAGNYTILLSIKQSNVFKNLTATLIVNVKPQIYEKAVSSFPDPALYPLGSRQILTCTAYGIPQPTIKWFWHPCNHNHSEARCDFCSNNEESFILDADSNMGNRIESITQRMAIIEGKNKMASTLVVADSRISGIYICIASNKVGTVGRNISFYITDVPNGFHVNLEKMPTEGEDLKLSCTVNKFLYRDVTWILLRTVNNRTMHYSISKQKMAITKEHSITLNLTIMNVSLQDSGTYACRARNVYTGEEILQKKEITIRDQEAPYLLRNLSDHTVAISSSTTLDCHANGVPEPQITWFKNNHKIQQEPGIILGPGSSTLFIERVTEEDEGVYHCKATNQKGSVESSAYLTVQGTSDKSNLELITLTCTCVAATLFWLLLTLFIRKMKRSSSEIKTDYLSIIMDPDEVPLDEQCERLPYDASKWEFARERLKLGKSLGRGAFGKVVQASAFGIKKSPTCRTVAVKMLKEGATASEYKALMTELKILTHIGHHLNVVNLLGACTKQGGPLMVIVEYCKYGNLSNYLKSKRDLFFLNKDAALHMEPKKEKMEPGLEQGKKPRLDSVTSSESFASSGFQEDKSLSDVEEEEDSDGFYKEPITMEDLISYSFQVARGMEFLSSRKCIHRDLAARNILLSENNVVKICDFGLARDIYKNPDYVRKGDTRLPLKWMAPESIFDKIYSTKSDVWSYGVLLWEIFSLGGSPYPGVQMDEDFCSRLREGMRMRAPEYSTPEIYQIMLDCWHRDPKERPRFAELVEKLGDLLQANVQQDGKDYIPINAILTGNSGFTYSTPAFSEDFFKESISAPKFNSGSSDDVRYVNAFKFMSLERIKTFEELLPNATSMFDDYQGDSSTLLASPMLKRFTWTDSKPKASLKIDLRVTSKSKESGLSDVSRPSFCHSSCGHVSEGKRRFTYDHAELERKIACCSPPPDYNSVVLYSTPPI

SEQ ID NO: 7490 - RNA, 4017 nt, synthetic construct
  misc_feature 1..4017: note = sFLT-1__Homo_sapiens__AGC09589
  source 1..4017: mol_type = other RNA
atggtcagctactgggacaccggggtcctgctgtgcgcgctgctcagctgtctgcttctcacaggatctagttcaggttcaaaattaaaagatcctgaactgagtttaaaaggcacccagcacatcatgcaagcaggccagacactgcatctccaatgcaggggggaagcagcccataaatggtctttgcctgaaatggtgagtaaggaaagcgaaaggctgagcataactaaatctgcctgtggaagaaatggcaaacaattctgcagtactttaaccttgaacacagctcaagcaaaccacactggcttctacagctgcaaatatctagctgtacctacttcaaagaagaaggaaacagaatctgcaatctatatatttattagtgatacaggtagacctttcgtagagatgtacagtgaaatccccgaaattatacacatgactgaaggaagggagctcgtcattccctgccgggttacgtcacctaacatcactgttactttaaaaaagtttccacttgacactttgatccctgatggaaaacgcataatctgggacagtagaaagggcttcatcatatcaaatgcaacgtacaaagaaatagggcttctgacctgtgaagcaacagtcaatgggcatttgtataagacaaactatctcacacatcgacaaaccaatacaatcatagatgtccaaataagcacaccacgcccagtcaaattacttagaggccatactcttgtcctcaattgtactgctaccactcccttgaacacgagagttcaaatgacctggagttaccctgatgaaaaaaataagagagcttccgtaaggcgacgaattgaccaaagcaattcccatgccaacatattctacagtgttcttactattgacaaaatgcagaacaaagacaaaggactttatacttgtcgtgtaaggagtggaccatcattcaaatctgttaacacctcagtgcatatatatgataaagcattcatcactgtgaaacatcgaaaacagcaggtgcttgaaaccgtagctggcaagcggtcttaccggctctctatgaaagtgaaggcatttccctcgccggaagttgtatggttaaaagatgggttacctgcgactgagaaatctgctcgctatttgactcgtggctactcgttaattatcaaggacgtaactgaagaggatgcagggaattatacaatcttgctgagcataaaacagtcaaatgtgtttaaaaacctcactgccactctaattgtcaatgtgaaaccccagatttacgaaaaggccgtgtcatcgtttccagacccggctctctacccactgggcagcagacaaatcctgacttgtaccgcatatggtatccctcaacctacaatcaagtggttctggcacccctgtaaccataatcattccgaagcaaggtgtgacttttgttccaataatgaagagtcctttatcctggatgctgacagcaacatgggaaacagaattgagagcatcactcagcgcatggcaataatagaaggaaagaataagatggctagcaccttggttgtggctgactctagaatttctggaatctacatttgcatagcttccaataaagttgggactgtgggaagaaacataagcttttatatcacagatgtgccaaatgggtttcatgttaacttggaaaaaatgccgacggaaggagaggacctgaaactgtcttgcacagttaacaagttcttatacagagacgttacttggattttactgcggacagttaataacagaacaatgcactacagtattagcaagcaaaaaatggccatcactaaggagcactccatcactcttaatcttaccatcatgaatgtttccctgcaagattcaggcacctatgcctgcagagccaggaatgtatacacaggggaagaaatcctccagaagaaagaaattacaatcagagatcaggaagcaccatacctcctgcgaaacctcagtgatcacacagtggccatcagcagttccaccactttagactgtcatgctaatggtgtccccgagcctcagatcacttggtttaaaaacaaccacaaaatacaacaagagcctggaattattttaggaccaggaagcagcacgctgtttattgaaagagtcacagaagaggatgaaggtgtctatcactgcaaagccaccaaccagaagggctctgtggaaagttcagcatacctcactgttcaaggaacctcggacaagtctaatctggagctgatcactctaacatgcacctgtgtggctgcgactctcttctggctcctattaaccctctttatccgaaaaatgaaaaggtcttcttctgaaataaagactgactacctatcaattataatggacccagatgaagttcctttggatgagcagtgtgagcggctcccttatgatgccagcaagtgggagtttgcccgggagagacttaaactgggcaaatcacttggaagaggggcttttggaaaagtggttcaagcatcagcatttggcattaagaaatcacctacgtgccggactgtggctgtgaaaatgctgaaagagggggccacggccagcgagtacaaagctctgatgactgagctaaaaatcttgacccacattggccaccatctgaacgtggttaacctgctgggagcctgcaccaagcaaggagggcctctgatggtgattgttgaatactgcaaatatggaaatctctccaactacctcaagagcaaacgtgacttattttttctcaacaaggatgcagcactacacatggagcctaagaaagaaaaaatggagccaggcctggaacaaggcaagaaaccaagactagatagcgtcaccagcagcgaaagctttgcgagctccggctttcaggaagataaaagtctgagtgatgttgaggaagaggaggattctgacggtttctacaaggagcccatcactatggaagatctgatttcttacagttttcaagtggccagaggcatggagttcctgtcttccagaaagtgcattcatcgggacctggcagcgagaaacattcttttatctgagaacaacgtggtgaagatttgtgattttggccttgcccgggatatttataagaaccccgattatgtgagaaaaggagatactcgacttcctctgaaatggatggctcctgaatctatctttgacaaaatctacagcaccaagagcgacgtgtggtcttacggagtattgctgtgggaaatcttctccttaggtgggtctccatacccaggagtacaaatggatgaggacttttgcagtcgcctgagggaaggcatgaggatgagagctcctgagtactctactcctgaaatctatcagatcatgctggactgctggcacagagacccaaaagaaaggccaagatttgcagaacttgtggaaaaactaggtgatttgcttcaagcaaatgtacaacaggatggtaaagactacatcccaatcaatgccatactgacaggaaatagtgggtttacatactcaactcctgccttctctgaggacttcttcaaggaaagtatttcagctccgaagtttaattcaggaagctctgatgatgtcagatacgtaaatgctttcaagttcatgagcctggaaagaatcaaaacctttgaagaacttttaccgaatgccacctccatgtttgatgactaccagggcgacagcagcactctgttggcctctcccatgctgaagcgcttcacctggactgacagcaaacccaaggcctcgctcaagattgacttgagagtaaccagtaaaagtaaggagtcggggctgtctgatgtcagcaggcccagtttctgccattccagctgtgggcacgtcagcgaaggcaagcgcaggttcacctacgaccacgctgagctggaaaggaaaatcgcgtgctgctccccgcccccagactacaactcggtggtcctgtactccaccccacccatctag

SEQ ID NO: 7491 - RNA, 4017 nt, synthetic construct
  misc_feature 1..4017: note = derived and/or modified sequence opt1 fromsFLT-1__Homo_sapiens__AGC09589
  source 1..4017: mol_type = other RNA
atggtgagctactgggacaccggcgtcctgctctgcgccctgctgtcctgcctcctgctgaccgggagctccagcggctccaagctcaaggaccccgagctgagcctgaaggggacgcagcacatcatgcaggccggccagaccctccacctccagtgccgcggggaggcggcccacaagtggtccctgcccgagatggtgagcaaggagtccgagcggctgagcatcaccaagtccgcctgcggccgcaacggcaagcagttctgcagcaccctgacgctgaacaccgcccaggccaaccacaccgggttctactcctgcaagtacctcgcggtgcccaccagcaagaagaaggagacggagtccgccatctacatcttcatcagcgacaccggccggcccttcgtcgagatgtactccgagatccccgagatcatccacatgaccgaggggcgcgagctggtgatcccgtgccgggtgaccagccccaacatcacggtcaccctgaagaagttccccctcgacaccctgatccccgacggcaagcgcatcatctgggactcccggaaggggttcatcatcagcaacgccacctacaaggagatcggcctgctcacgtgcgaggccaccgtgaacggccacctgtacaagaccaactacctgacccaccgccagacgaacaccatcatcgacgtgcagatcagcaccccgcggcccgtcaagctcctgcgcgggcacaccctggtgctcaactgcacggcgaccacgcccctgaacacccgggtgcagatgacctggtcctaccccgacgagaagaacaagcgcgccagcgtccggcgccggatcgaccagtccaacagccacgccaacatcttctactccgtgctgaccatcgacaagatgcagaacaaggacaagggcctctacacgtgccgcgtgcggagcgggccgtccttcaagagcgtcaacacctccgtgcacatctacgacaaggccttcatcaccgtgaagcaccgcaagcagcaggtcctggagaccgtggccggcaagcggagctaccgcctgtccatgaaggtgaaggcgttccccagccccgaggtcgtgtggctcaaggacggcctgcccgccaccgagaagtccgcccggtacctgacccgcgggtacagcctcatcatcaaggacgtgacggaggaggacgccggcaactacaccatcctgctgtccatcaagcagagcaacgtcttcaagaacctcaccgccaccctgatcgtgaacgtcaagccgcagatctacgagaaggcggtgtccagcttccccgaccccgccctgtaccccctcgggtcccgccagatcctgacctgcacggcctacggcatcccgcagcccaccatcaagtggttctggcacccctgcaaccacaaccacagcgaggcccggtgcgacttctgcagcaacaacgaggagtccttcatcctggacgccgacagcaacatggggaaccgcatcgagtccatcacccagcggatggcgatcatcgagggcaagaacaagatggccagcaccctcgtggtcgccgactcccgcatcagcggcatctacatctgcatcgcctccaacaaggtggggacggtgggccggaacatcagcttctacatcaccgacgtccccaacgggttccacgtgaacctggagaagatgccgaccgagggcgaggacctgaagctctcctgcaccgtgaacaagttcctgtaccgcgacgtcacgtggatcctgctgcggaccgtgaacaaccgcaccatgcactacagcatctccaagcagaagatggccatcaccaaggagcacagcatcacgctcaacctgaccatcatgaacgtgtccctgcaggacagcgggacctacgcgtgccgggcccgcaacgtctacaccggcgaggagatcctccagaagaaggagatcacgatccgggaccaggaggccccctacctgctgcgcaacctctccgaccacaccgtggccatcagctccagcaccaccctggactgccacgcgaacggcgtgcccgagccccagatcacgtggttcaagaacaaccacaagatccagcaggagccggggatcatcctgggccccgggagctccaccctcttcatcgagcgggtcaccgaggaggacgagggcgtgtaccactgcaaggccaccaaccagaaggggagcgtggagtccagcgcctacctgacggtccagggcacctccgacaagagcaacctggagctcatcaccctgacctgcacgtgcgtggccgccaccctgttctggctcctgctgaccctcttcatccgcaagatgaagcggtccagctccgagatcaagaccgactacctgagcatcatcatggaccccgacgaggtgccgctggacgagcagtgcgagcgcctcccctacgacgcgtccaagtgggagttcgcccgggagcgcctgaagctgggcaagagcctcgggcggggcgccttcgggaaggtcgtgcaggcctccgccttcggcatcaagaagtcccccacgtgccgcaccgtggcggtcaagatgctgaaggagggcgccaccgccagcgagtacaaggccctgatgaccgagctcaagatcctgacgcacatcgggcaccacctgaacgtggtgaacctcctgggcgcctgcaccaagcagggcgggcccctgatggtcatcgtggagtactgcaagtacgggaacctcagcaactacctgaagtccaagcgcgacctgttcttcctcaacaaggacgcggccctgcacatggagccgaagaaggagaagatggagcccggcctggagcagggcaagaagccccggctcgacagcgtgacctccagcgagagcttcgcctccagcgggttccaggaggacaagtccctgagcgacgtcgaggaggaggaggactccgacggcttctacaaggagcccatcaccatggaggacctgatcagctactccttccaggtggcccgcgggatggagttcctcagctcccggaagtgcatccaccgcgacctggcggcccggaacatcctgctcagcgagaacaacgtggtcaagatctgcgacttcggcctggcccgcgacatctacaagaacccggactacgtgcggaagggggacacccgcctgcccctcaagtggatggcccccgagtccatcttcgacaagatctacagcacgaagtccgacgtgtggagctacggcgtcctgctgtgggagatcttctccctcggcgggagcccctacccgggcgtgcagatggacgaggacttctgctcccggctgcgcgaggggatgcggatgcgcgcccccgagtacagcacccccgagatctaccagatcatgctggactgctggcaccgggaccccaaggagcgcccgcggttcgcggagctcgtggagaagctgggcgacctgctccaggccaacgtccagcaggacgggaaggactacatccccatcaacgccatcctgaccggcaactccggcttcacctacagcacgcccgccttcagcgaggacttcttcaaggagtccatcagcgcccccaagttcaactccgggagctccgacgacgtgcgctacgtgaacgcgttcaagttcatgagcctggagcggatcaagaccttcgaggagctcctgccgaacgccacctccatgttcgacgactaccagggcgacagctccaccctgctcgccagccccatgctgaagcgcttcacgtggaccgactccaagcccaaggccagcctgaagatcgacctccgggtcacctccaagagcaaggagtccgggctgagcgacgtgtcccgccccagcttctgccactccagctgcggccacgtgagcgaggggaagcggcgcttcacctacgaccacgccgagctggagcgcaagatcgcgtgctgctccccgccgcccgactacaacagcgtcgtgctctactccacgccgcccatctga

SEQ ID NO: 7492 - RNA, 4017 nt, synthetic construct
  misc_feature 1..4017: note = derived and/or modified sequence opt2 fromsFLT-1__Homo_sapiens__AGC09589
  source 1..4017: mol_type = other RNA
atggtctcctactgggacaccggcgtcctcctctgcgccctcctctcctgcctcctcctcaccggctcctcctccggctccaagctcaaggaccccgagctctccctcaagggcacccagcacatcatgcaggccggccagaccctccacctccagtgccgcggcgaggccgcccacaagtggtccctccccgagatggtctccaaggagtccgagcgcctctccatcaccaagtccgcctgcggccgcaacggcaagcagttctgctccaccctcaccctcaacaccgcccaggccaaccacaccggcttctactcctgcaagtacctcgccgtccccacctccaagaagaaggagaccgagtccgccatctacatcttcatctccgacaccggccgccccttcgtcgagatgtactccgagatccccgagatcatccacatgaccgagggccgcgagctcgtcatcccctgccgcgtcacctcccccaacatcaccgtcaccctcaagaagttccccctcgacaccctcatccccgacggcaagcgcatcatctgggactcccgcaagggcttcatcatctccaacgccacctacaaggagatcggcctcctcacctgcgaggccaccgtcaacggccacctctacaagaccaactacctcacccaccgccagaccaacaccatcatcgacgtccagatctccaccccccgccccgtcaagctcctccgcggccacaccctcgtcctcaactgcaccgccaccacccccctcaacacccgcgtccagatgacctggtcctaccccgacgagaagaacaagcgcgcctccgtccgccgccgcatcgaccagtccaactcccacgccaacatcttctactccgtcctcaccatcgacaagatgcagaacaaggacaagggcctctacacctgccgcgtccgctccggcccctccttcaagtccgtcaacacctccgtccacatctacgacaaggccttcatcaccgtcaagcaccgcaagcagcaggtcctcgagaccgtcgccggcaagcgctcctaccgcctctccatgaaggtcaaggccttcccctcccccgaggtcgtctggctcaaggacggcctccccgccaccgagaagtccgcccgctacctcacccgcggctactccctcatcatcaaggacgtcaccgaggaggacgccggcaactacaccatcctcctctccatcaagcagtccaacgtcttcaagaacctcaccgccaccctcatcgtcaacgtcaagccccagatctacgagaaggccgtctcctccttccccgaccccgccctctaccccctcggctcccgccagatcctcacctgcaccgcctacggcatcccccagcccaccatcaagtggttctggcacccctgcaaccacaaccactccgaggcccgctgcgacttctgctccaacaacgaggagtccttcatcctcgacgccgactccaacatgggcaaccgcatcgagtccatcacccagcgcatggccatcatcgagggcaagaacaagatggcctccaccctcgtcgtcgccgactcccgcatctccggcatctacatctgcatcgcctccaacaaggtcggcaccgtcggccgcaacatctccttctacatcaccgacgtccccaacggcttccacgtcaacctcgagaagatgcccaccgagggcgaggacctcaagctctcctgcaccgtcaacaagttcctctaccgcgacgtcacctggatcctcctccgcaccgtcaacaaccgcaccatgcactactccatctccaagcagaagatggccatcaccaaggagcactccatcaccctcaacctcaccatcatgaacgtctccctccaggactccggcacctacgcctgccgcgcccgcaacgtctacaccggcgaggagatcctccagaagaaggagatcaccatccgcgaccaggaggccccctacctcctccgcaacctctccgaccacaccgtcgccatctcctcctccaccaccctcgactgccacgccaacggcgtccccgagccccagatcacctggttcaagaacaaccacaagatccagcaggagcccggcatcatcctcggccccggctcctccaccctcttcatcgagcgcgtcaccgaggaggacgagggcgtctaccactgcaaggccaccaaccagaagggctccgtcgagtcctccgcctacctcaccgtccagggcacctccgacaagtccaacctcgagctcatcaccctcacctgcacctgcgtcgccgccaccctcttctggctcctcctcaccctcttcatccgcaagatgaagcgctcctcctccgagatcaagaccgactacctctccatcatcatggaccccgacgaggtccccctcgacgagcagtgcgagcgcctcccctacgacgcctccaagtgggagttcgcccgcgagcgcctcaagctcggcaagtccctcggccgcggcgccttcggcaaggtcgtccaggcctccgccttcggcatcaagaagtcccccacctgccgcaccgtcgccgtcaagatgctcaaggagggcgccaccgcctccgagtacaaggccctcatgaccgagctcaagatcctcacccacatcggccaccacctcaacgtcgtcaacctcctcggcgcctgcaccaagcagggcggccccctcatggtcatcgtcgagtactgcaagtacggcaacctctccaactacctcaagtccaagcgcgacctcttcttcctcaacaaggacgccgccctccacatggagcccaagaaggagaagatggagcccggcctcgagcagggcaagaagccccgcctcgactccgtcacctcctccgagtccttcgcctcctccggcttccaggaggacaagtccctctccgacgtcgaggaggaggaggactccgacggcttctacaaggagcccatcaccatggaggacctcatctcctactccttccaggtcgcccgcggcatggagttcctctcctcccgcaagtgcatccaccgcgacctcgccgcccgcaacatcctcctctccgagaacaacgtcgtcaagatctgcgacttcggcctcgcccgcgacatctacaagaaccccgactacgtccgcaagggcgacacccgcctccccctcaagtggatggcccccgagtccatcttcgacaagatctactccaccaagtccgacgtctggtcctacggcgtcctcctctgggagatcttctccctcggcggctccccctaccccggcgtccagatggacgaggacttctgctcccgcctccgcgagggcatgcgcatgcgcgcccccgagtactccacccccgagatctaccagatcatgctcgactgctggcaccgcgaccccaaggagcgcccccgcttcgccgagctcgtcgagaagctcggcgacctcctccaggccaacgtccagcaggacggcaaggactacatccccatcaacgccatcctcaccggcaactccggcttcacctactccacccccgccttctccgaggacttcttcaaggagtccatctccgcccccaagttcaactccggctcctccgacgacgtccgctacgtcaacgccttcaagttcatgtccctcgagcgcatcaagaccttcgaggagctcctccccaacgccacctccatgttcgacgactaccagggcgactcctccaccctcctcgcctcccccatgctcaagcgcttcacctggaccgactccaagcccaaggcctccctcaagatcgacctccgcgtcacctccaagtccaaggagtccggcctctccgacgtctcccgcccctccttctgccactcctcctgcggccacgtctccgagggcaagcgccgcttcacctacgaccacgccgagctcgagcgcaagatcgcctgctgctcccccccccccgactacaactccgtcgtcctctactccaccccccccatctga

SEQ ID NO: 7493 - RNA, 4017 nt, synthetic construct
  misc_feature 1..4017: note = derived and/or modified sequence opt3 fromsFLT-1__Homo_sapiens__AGC09589
  source 1..4017: mol_type = other RNA
atggtgagctactgggacaccggcgtcctgctctgcgcccttctgtcctgtttgttactgacagggtcttcaagtggaagcaagctaaaagatcccgagctctccctgaagggtactcagcacatcatgcaagctggccagacgcttcatctgcagtgcagaggggaagcagcccacaaatggtctttgcctgagatggtttcgaaggaatcagagaggctcagcattaccaaaagtgcgtgtggacggaacggcaagcagttctgctccacactgactctgaataccgctcaagccaaccatacaggtttttattcttgtaagtacctcgcagtgccaaccagcaaaaagaaagaaactgagtccgccatatatatcttcatttcagacacagggcgcccgtttgtagagatgtacagtgaaatccccgagattatccacatgaccgaaggacgagagttagtgataccttgccgtgtcacgagcccaaatatcactgtgaccctgaagaaattcccccttgatacattgattcctgacggcaagagaatcatttgggattctaggaagggctttatcatatccaacgctacttataaagagattgggctgctaacctgtgaagcaacagttaatggacatctctacaagaccaactatctgacgcaccggcagactaatacaatcattgacgtgcagatctcaaccccacgccccgtcaaacttctgagaggtcacactttggtgctcaactgcacagccaccacgcctctgaataccagggtacagatgacatggagctacccagatgagaagaacaaacgggctagtgttcgccgaagaatcgaccaatctaattcccatgccaacattttctacagcgtgttaactatagataagatgcagaataaagacaagggcctgtatacctgtagggtccggtcggggccgtcttttaagtccgtgaacacatcagtgcacatctacgataaagcgttcattactgtcaagcatcgtaaacagcaggttctcgaaaccgtggcaggaaagcgcagttatagacttagcatgaaagtaaaggcctttccctcccctgaggtggtctggctgaaggacggcttgccagctacagaaaaatctgccaggtacctaacccggggttatagcctgatcataaaggatgtgactgaggaggacgcagggaattacacgattctcctgtcaatcaaacaaagtaacgttttcaagaaccttacagctaccctgatcgtgaatgtcaaaccccagatttatgaaaaggccgtgtccagctttcctgacccagcgttgtaccccctcggatctcgacagatcctgacttgcaccgcctacggcattccgcaacctacaataaagtggttctggcacccctgtaaccacaatcattcagaggcacgctgcgatttttgcagtaacaatgaagagagcttcatcttagacgctgattccaacatgggcaatagaattgaatctatcacccagaggatggccatcattgaggggaaaaacaagatggcttcgactctggtagttgccgacagccggatatccggaatctatatttgtatcgcatcaaataaagtgggtacagtcggccgcaacattagtttctacatcacggatgtgccaaatgggtttcacgtcaacctagagaagatgcctaccgaaggagaggacctcaaactgtcttgcactgtgaataagttcctttatagagatgttacatggatattgctgaggaccgtgaacaatcgtacaatgcattacagcatctccaagcagaaaatggccattactaaggaacactcaatcaccctcaacctgacgattatgaacgtaagccttcaggactctggcacctatgcttgtcgggcgcgaaatgtctacacaggtgaggaaatcctgcagaaaaaggagataactattagagatcaagaggcaccctatttgctcaggaacctgtccgaccataccgtggccatcagtagctctacaactttagattgccacgctaatggggttccagaaccccagattacctggtttaaaaacaatcacaagatccagcaagagcctggcataatcctgggaccaggctcctcaacgctattcattgaacgcgtgacagaggaggacgaaggggtctaccattgtaaagccaccaaccagaagggaagtgtggagagctcggcatacctcactgtacagggtacatccgacaagtctaatctggaacttatcaccttgacttgcacctgtgtggccgctacactgttttggctcctgttaacgctgttcattcggaaaatgaagagaagctcaagtgagatcaaaaccgattatctttccataattatggacccggatgaagttcccttggacgagcagtgcgagaggctcccttacgatgcctctaagtgggaatttgcacgcgagcgactgaaactaggcaagagcctggggcggggagcgttcggcaaggtcgtgcaggcttccgcctttggtatcaaaaagtcaccaacttgtcgtacagtggcagtcaaaatgctcaaggaaggggccaccgctagcgagtataaagccctgatgacagaacttaagatcttgactcacattggccatcacctgaacgttgtgaatttactcggagcatgcaccaagcaaggcgggcccctgatggtgatcgtagagtactgtaaatatggaaaccttagtaattacctgaagtctaaaagagacttgttctttctcaacaaggatgctgccctgcacatggagcctaaaaaggaaaagatggagccaggtctagaacagggcaaaaagcccaggctggactccgtcacgagctcggagtcattcgcgtctagtgggtttcaggaagataaatccctcagcgacgtggaggaggaagaggattctgacggattctataaggaaccgattacaatggaggatctgataagctactccttccaagttgcccgcggcatggagtttctttcaagtcggaaatgcatccatagagacttggctgcaaggaatattctgttaagcgaaaacaatgtggtcaagatctgcgacttcggtctcgcccgagatatttacaaaaaccctgactatgtgcgcaagggggatacccggctgccacttaagtggatggctcccgagtctatctttgacaaaatatactccactaagtcagatgtttggagttatggcgtgctgctatgggaaatcttcagcctcggaggctccccttaccccggggtacagatggacgaggatttttgttctagactgagggaaggaatgcgtatgcgcgccccagagtattcgacccctgagatttaccagatcatgttggactgctggcaccgggatcccaaagaaagaccaaggttcgcagagctggtcgaaaagttaggcgacctcctgcaagcgaacgtgcagcaggatggtaaagactatattccgatcaatgccatacttacagggaacagcggatttacttactcaacccctgctttctccgaggactttttcaaggaaagtatttctgcccccaagtttaatagcggctcctcagatgacgtgcgatacgtcaacgcattcaaatttatgtctctggagcggatcaagacattcgaggaattgctcccaaatgctacgagcatgttcgatgactatcagggtgatagttccaccctgctagccagccccatgctgaaacgctttacttggacagactctaagcctaaagcatcacttaagatcgatctcagagttacctccaagagtaaagagagcggcctgtcggacgtgtctaggccatccttctgtcatagctcatgcgggcacgtaagtgaaggaaagcggcgatttacttacgatcatgccgagttggaaagaaaaattgcttgttgctctccccctccggactataactccgtggtcctgtacagcacaccacccatatga

SEQ ID NO: 7494 - RNA, 4017 nt, synthetic construct
  misc_feature 1..4017: note = derived and/or modified sequence opt4 fromsFLT-1__Homo_sapiens__AGC09589
  source 1..4017: mol_type = other RNA
atggtgagctactgggacaccggcgtgctgctgtgcgccctgctgagctgcctgctgctgaccggcagcagcagcggcagcaagctgaaggaccccgagctgagcctgaagggcacccagcacatcatgcaggccggccagaccctgcacctgcagtgcagaggcgaggccgcccacaagtggagcctgcccgagatggtgagcaaggagagcgagagactgagcatcaccaagagcgcctgcggcagaaacggcaagcagttctgcagcaccctgaccctgaacaccgcccaggccaaccacaccggcttctacagctgcaagtacctggccgtgcccaccagcaagaagaaggagaccgagagcgccatctacatcttcatcagcgacaccggcagacccttcgtggagatgtacagcgagatccccgagatcatccacatgaccgagggcagagagctggtgatcccctgcagagtgaccagccccaacatcaccgtgaccctgaagaagttccccctggacaccctgatccccgacggcaagagaatcatctgggacagcagaaagggcttcatcatcagcaacgccacctacaaggagatcggcctgctgacctgcgaggccaccgtgaacggccacctgtacaagaccaactacctgacccacagacagaccaacaccatcatcgacgtgcagatcagcacccccagacccgtgaagctgctgagaggccacaccctggtgctgaactgcaccgccaccacccccctgaacaccagagtgcagatgacctggagctaccccgacgagaagaacaagagagccagcgtgagaagaagaatcgaccagagcaacagccacgccaacatcttctacagcgtgctgaccatcgacaagatgcagaacaaggacaagggcctgtacacctgcagagtgagaagcggccccagcttcaagagcgtgaacaccagcgtgcacatctacgacaaggccttcatcaccgtgaagcacagaaagcagcaggtgctggagaccgtggccggcaagagaagctacagactgagcatgaaggtgaaggccttccccagccccgaggtggtgtggctgaaggacggcctgcccgccaccgagaagagcgccagatacctgaccagaggctacagcctgatcatcaaggacgtgaccgaggaggacgccggcaactacaccatcctgctgagcatcaagcagagcaacgtgttcaagaacctgaccgccaccctgatcgtgaacgtgaagccccagatctacgagaaggccgtgagcagcttccccgaccccgccctgtaccccctgggcagcagacagatcctgacctgcaccgcctacggcatcccccagcccaccatcaagtggttctggcacccctgcaaccacaaccacagcgaggccagatgcgacttctgcagcaacaacgaggagagcttcatcctggacgccgacagcaacatgggcaacagaatcgagagcatcacccagagaatggccatcatcgagggcaagaacaagatggccagcaccctggtggtggccgacagcagaatcagcggcatctacatctgcatcgccagcaacaaggtgggcaccgtgggcagaaacatcagcttctacatcaccgacgtgcccaacggcttccacgtgaacctggagaagatgcccaccgagggcgaggacctgaagctgagctgcaccgtgaacaagttcctgtacagagacgtgacctggatcctgctgagaaccgtgaacaacagaaccatgcactacagcatcagcaagcagaagatggccatcaccaaggagcacagcatcaccctgaacctgaccatcatgaacgtgagcctgcaggacagcggcacctacgcctgcagagccagaaacgtgtacaccggcgaggagatcctgcagaagaaggagatcaccatcagagaccaggaggccccctacctgctgagaaacctgagcgaccacaccgtggccatcagcagcagcaccaccctggactgccacgccaacggcgtgcccgagccccagatcacctggttcaagaacaaccacaagatccagcaggagcccggcatcatcctgggccccggcagcagcaccctgttcatcgagagagtgaccgaggaggacgagggcgtgtaccactgcaaggccaccaaccagaagggcagcgtggagagcagcgcctacctgaccgtgcagggcaccagcgacaagagcaacctggagctgatcaccctgacctgcacctgcgtggccgccaccctgttctggctgctgctgaccctgttcatcagaaagatgaagagaagcagcagcgagatcaagaccgactacctgagcatcatcatggaccccgacgaggtgcccctggacgagcagtgcgagagactgccctacgacgccagcaagtgggagttcgccagagagagactgaagctgggcaagagcctgggcagaggcgccttcggcaaggtggtgcaggccagcgccttcggcatcaagaagagccccacctgcagaaccgtggccgtgaagatgctgaaggagggcgccaccgccagcgagtacaaggccctgatgaccgagctgaagatcctgacccacatcggccaccacctgaacgtggtgaacctgctgggcgcctgcaccaagcagggcggccccctgatggtgatcgtggagtactgcaagtacggcaacctgagcaactacctgaagagcaagagagacctgttcttcctgaacaaggacgccgccctgcacatggagcccaagaaggagaagatggagcccggcctggagcagggcaagaagcccagactggacagcgtgaccagcagcgagagcttcgccagcagcggcttccaggaggacaagagcctgagcgacgtggaggaggaggaggacagcgacggcttctacaaggagcccatcaccatggaggacctgatcagctacagcttccaggtggccagaggcatggagttcctgagcagcagaaagtgcatccacagagacctggccgccagaaacatcctgctgagcgagaacaacgtggtgaagatctgcgacttcggcctggccagagacatctacaagaaccccgactacgtgagaaagggcgacaccagactgcccctgaagtggatggcccccgagagcatcttcgacaagatctacagcaccaagagcgacgtgtggagctacggcgtgctgctgtgggagatcttcagcctgggcggcagcccctaccccggcgtgcagatggacgaggacttctgcagcagactgagagagggcatgagaatgagagcccccgagtacagcacccccgagatctaccagatcatgctggactgctggcacagagaccccaaggagagacccagattcgccgagctggtggagaagctgggcgacctgctgcaggccaacgtgcagcaggacggcaaggactacatccccatcaacgccatcctgaccggcaacagcggcttcacctacagcacccccgccttcagcgaggacttcttcaaggagagcatcagcgcccccaagttcaacagcggcagcagcgacgacgtgagatacgtgaacgccttcaagttcatgagcctggagagaatcaagaccttcgaggagctgctgcccaacgccaccagcatgttcgacgactaccagggcgacagcagcaccctgctggccagccccatgctgaagagattcacctggaccgacagcaagcccaaggccagcctgaagatcgacctgagagtgaccagcaagagcaaggagagcggcctgagcgacgtgagcagacccagcttctgccacagcagctgcggccacgtgagcgagggcaagagaagattcacctacgaccacgccgagctggagagaaagatcgcctgctgcagccccccccccgactacaacagcgtggtgctgtacagcaccccccccatctga

SEQ ID NO: 7495 - RNA, 4017 nt, synthetic construct
  misc_feature 1..4017: note = derived and/or modified sequence opt5 fromsFLT-1__Homo_sapiens__AGC09589
  source 1..4017: mol_type = other RNA
atggtgagctactgggacaccggcgtcctgctctgcgccctgctttcctgtctgctcctgaccgggtctagctccggatctaaacttaaggatcccgagctgagcctcaagggcacgcagcacatcatgcaagctgggcagaccctgcatctgcagtgcagaggagaagccgcgcacaaatggtccctccctgagatggtttctaaggaaagcgagcggctgtccattacaaaaagcgcttgtggccgcaacgggaagcagttctgctctacccttacactgaataccgcccaagccaaccatacaggattttattcctgtaagtacctcgctgtgccgaccagcaaaaagaaagaaacggagtctgccatctatattttcatctccgacaccggcagaccctttgtggagatgtacagcgaaattcctgagatcatccacatgacagaaggccgggagctggtcattccctgccgcgtgacctctcctaatatcacagttacccttaagaaattccccctggatacgctcattcctgacgggaagagaatcatttgggattcccggaagggatttatcattagcaacgctacatataaagagatcggcctgctgacctgtgaagccacagtgaatgggcatctctacaagaccaactatctgacccaccgccagacaaatacgatcattgacgtccagatctccaccccgagacccgtgaaacttctgcggggacacacactcgttctgaactgcaccgcgacaacccctcttaatacgcgcgtgcagatgacatggtcttaccccgatgagaagaacaaaagagccagcgtccggcgcagaattgaccaatccaatagccatgctaacatcttctactctgtgctgaccattgataagatgcagaataaagacaagggcctctatacctgtcgggtgcgctccgggcctagctttaagtctgtcaacacaagcgttcacatctacgataaagccttcatcaccgtgaagcatagaaaacaacaggtgctggaaacagtcgctggaaagcggtcctatagactgtctatgaaagtgaaggcctttcccagcccggaggttgtgtggctcaaggacggcctgcctgcgacggaaaaatccgcccgctaccttacccggggctatagcctgattatcaaggatgtcacagaggaggacgctgggaattacaccattctcctgtctatcaaacaatccaacgtgttcaagaaccttacagccaccctgattgttaatgtgaaaccccagatctatgaaaaggctgtcagctcttttcctgaccccgccctctaccccctgggatccagacagatcctgacgtgcaccgcctacggcattcctcaaccgacaatcaagtggttctggcacccctgtaaccacaatcatagcgaggctcgctgcgatttttgctccaacaatgaagagtctttcattctcgacgcggatagcaacatggggaatcggatcgaatccattacccagagaatggccatcattgagggcaaaaacaagatggcttctacactggtggtcgccgacagccgcatctccggaatctatatttgtatcgccagcaataaagtggggaccgttggacggaacatttctttctacatcacggatgtgcctaatggctttcacgtcaaccttgagaagatgcccacagaaggcgaggacctgaaactctcctgcaccgtgaataagttcctgtatagagatgttacatggattctgcttcgcaccgtgaacaatcggaccatgcattacagcatctctaagcagaaaatggctatcacaaaggaacactccattacgctcaacctgaccatcatgaacgtcagcctgcaggactctgggacatatgcctgtagagcgcgcaatgtgtacaccggagaggaaattctccagaaaaaggagatcacaattcgggatcaggaggctccttatctgcttagaaacctgagcgaccataccgtggccatctccagctctacgacactcgattgccacgccaatggcgttcccgaaccgcagatcacctggtttaaaaacaatcacaagattcagcaagagcctgggatcattctgggacccggctccagcaccctgttcatcgaacgggtcacagaggaggacgaaggggtgtaccattgtaaagctaccaaccagaagggctccgtggagtctagcgcctaccttacagtccagggaacgtccgacaagtctaatctcgaactgattaccctgacatgcacctgtgtggctgccacactcttttggctgcttctgaccctcttcatccgcaaaatgaagagaagctcctctgagatcaaaacggattatctgagcattatcatggaccctgatgaagttcccctggacgagcagtgcgagcggcttccttacgatgcgtccaagtgggaatttgccagagagcgcctcaaactgggcaagagcctggggcggggagctttcggcaaggtggtccaagcctctgcttttgggattaaaaagtcccccacctgtagaacagtggccgttaaaatgctcaaggaaggagcgaccgccagcgagtataaagctctgatgacagaacttaagatcctgacccacattggccatcacctcaacgtggtcaatctgctgggggcctgcacaaagcagggcggaccgcttatggtgatcgttgagtactgtaaatatggcaacctctctaattacctgaagtccaaacgcgacctgttctttctcaacaaggatgctgccctgcacatggagcctaaaaaggaaaagatggagcccgggcttgaacagggcaaaaagcccagactggacagcgtgacctcttccgagagcttcgcctccagcggatttcaggaagataaatctctcagcgacgtcgaggaggaagaggattccgacgggttctataaggaacctattacgatggaggatctgatctcttacagcttccaagtggctcggggaatggagtttctgtcctctcgcaaatgcatccatagagaccttgcggcccggaatattctgctcagcgaaaacaatgtggtcaagatctgcgacttcggcctggctcgcgatatttacaaaaacccggactatgttagaaagggggatacacggctccccctgaagtggatggcccctgagtccatctttgacaaaatttactctaccaagagcgatgtgtggtcctatggcgtgcttctgtgggaaatcttcagcctcggaggctctccctaccctggggtccagatggacgaggatttttgttcccgcctgagagaaggaatgcggatgcgcgcccccgagtatagcacccctgagatctaccagattatgctggactgctggcacagagatcccaaagaacggccgagattcgctgagcttgtggaaaagctgggcgacctcctgcaagccaacgttcagcaggatgggaaagactatatccctattaatgcgatcctcacaggaaactctggctttacctactccacgcccgctttcagcgaggactttttcaaggaatccatttctgcccctaagtttaatagcgggtccagcgatgacgtgcgctacgtcaacgccttcaaatttatgtctctggagcggatcaagacattcgaggaacttctgcccaatgctacctccatgttcgatgactatcagggcgatagctctacactcctggccagcccgatgctgaaaagatttacctggacagactccaagcctaaagcgtctcttaagatcgatctgcgcgtgaccagcaagtccaaagagtctggactcagcgacgtttcccggcccagcttctgtcattcttcctgcggccacgtgagcgaagggaagagacgctttacgtacgatcatgctgagctggaacggaaaattgcctgttgctcccctcctcccgactataactctgtcgtgctctacagcacacccccgatctga

SEQ ID NO: 7496 - RNA, 4017 nt, synthetic construct
  misc_feature 1..4017: note = derived and/or modified sequence opt6 fromsFLT-1__Homo_sapiens__AGC09589
  source 1..4017: mol_type = other RNA
atggttagttattgggacacaggcgtacttctgtgtgctttactatcatgtttattactaacaggatcatcaagcggctctaagctaaaagatccagaactaagtctgaagggaactcagcacataatgcaagcgggtcaaactctccacctccagtgccgtggagaagctgcacataaatggagtttgccagaaatggtctcaaaagaatcagaacgacttagcataacaaaatccgcatgtggtagaaatggtaaacaattttgctcaacactcacacttaatacagcacaagcaaaccacactggattctatagctgcaaatatcttgctgtaccaacttcaaaaaaaaaagaaacagaatcagccatatatatcttcatatcagacacaggaaggccctttgttgaaatgtactctgaaataccagaaataatacatatgacagaaggtcgggaacttgtcatcccatgcagagtcacctccccaaatatcacagttacactgaaaaaatttccactagatacgcttataccagatggaaaacgtatcatctgggattcaagaaaaggtttcatcatatcaaatgccacttacaaagaaataggcttactcacctgtgaagcaaccgtaaatggacacttatacaaaactaactacttaacacatcgacagacaaatacgataatagatgtacaaatatcaactccaagaccagtaaaattattaagaggacatacgctagtactaaattgtactgcaaccacccccctcaatacaagagttcagatgacttggtcatacccagacgaaaaaaacaagagagctagtgtacgcagaagaattgaccaaagcaactctcacgcaaacatcttctactctgtactaactatcgataaaatgcaaaataaagacaaaggattatacacatgtagggtccggtcaggaccatcattcaaaagtgtaaatacatcagtacacatttatgataaagcattcataaccgtgaaacatcgaaagcaacaagtattagagacggtagccggaaaacgtagctatcgtctaagcatgaaagtaaaagcattccccagcccagaagtcgtatggctaaaagatggattacccgctaccgaaaaatccgctcgctatctaacgagaggttatagtttaataataaaagacgtaacagaggaagatgcaggtaattatacaatcctcctttcaataaaacagtcaaatgtgttcaagaatctaacagcaaccctcattgtaaacgttaaacctcaaatatacgagaaagccgtatcctcatttcctgatccagccttatatccactaggatctcgtcaaatactgacctgtacggcatatggaataccacaaccgacaataaaatggttctggcacccatgtaatcacaaccattccgaagcacgttgtgatttttgtagtaacaatgaagaatcgtttatcttagatgcagacagtaatatgggtaacagaatcgaatcaatcacacaaagaatggctatcattgaaggaaaaaacaaaatggcctcaacattagttgtggccgactcacgtatatccggtatctacatttgcatagcgagtaataaagtcggaactgtcggccgtaatataagtttttatataacagatgtgccaaatggatttcacgttaatttagaaaaaatgcctacagaaggcgaagatctcaaactatcttgtacagtaaacaaatttctatacagggatgtaacatggatactactacgaacagtgaacaatcgaaccatgcattacagcatatcaaaacaaaaaatggccataacaaaagaacatagtataacattaaatcttacaatcatgaacgtctcgctacaagatagcgggacctatgcatgtagagcacgtaacgtgtacacaggcgaagaaatactacaaaaaaaagaaataacgatccgtgatcaagaggccccatacctactccgaaacttatcagatcacaccgtcgcaatttcatcatccactacattagattgccatgcaaacggcgtaccagaaccacaaatcacatggtttaaaaataatcacaaaatacaacaagaaccaggaataatactaggtcccggctcaagtactttatttattgaacgagtaacagaagaggatgaaggagtgtaccactgcaaagctacaaatcaaaaagggtccgttgaaagttcggcatatctcactgtacaaggaactagcgataaatctaacttagaattaataaccttaacctgtacctgcgtagctgccactctattttggttactcttgaccctattcataagaaaaatgaaaagatcaagttccgaaataaaaactgattacctaagtataattatggaccccgatgaagtaccactagatgaacagtgcgaacgactcccttacgacgcatcaaaatgggaatttgcaagagaaagattaaaactcggaaaatctttaggacgtggagcctttggaaaggtcgtacaagcgagtgctttcggaataaaaaagagtccaacctgccgtacagtagcagtaaagatgcttaaagaaggagcaacagcaagcgaatataaggctcttatgacagaattaaaaatactcacccatatcggacaccacttaaacgtagtaaacctattgggtgcgtgcacaaaacaagggggcccactaatggtaatagtcgaatactgtaaatatggtaatttaagcaactacttaaaatcaaagagagacttattctttttaaataaagacgcagcccttcatatggagccaaaaaaagaaaaaatggagcctggattggaacaagggaaaaaacctcgtctagacagtgttaccagttcggaatcattcgcaagtagcggattccaagaagacaaatcattgagcgatgttgaagaagaagaagactcggacggattttataaggagccaattacaatggaagacctaatctcatactcatttcaagtcgcaagaggtatggaattcttatcatctcgcaaatgcatccacagagaccttgctgctagaaatattttactaagcgaaaataatgtcgtcaaaatctgcgacttcggtttagctagagacatttataaaaatcccgactacgtacgcaaaggagatacaagattacccctgaaatggatggcacctgaatctatattcgataagatatactccacaaaatcagatgtatggtcttatggtgtattactgtgggaaatattcagtctcgggggtagcccgtacccaggcgtacaaatggacgaagatttctgctctcgcctacgtgaaggcatgagaatgcgcgctcccgaatatagtacccctgaaatataccaaataatgttagattgttggcatcgagaccccaaagaaagacccaggtttgcagaattagtagaaaaactaggagacctactacaagccaatgtgcaacaagacggaaaagattatatacccatcaatgctatattaactggaaattctggattcacttactccaccccagccttctcagaagatttcttcaaagaatccatctctgcaccaaaattcaactcaggatcaagcgatgacgtccgatacgtaaatgcgtttaaatttatgagcttagagcgtataaaaacatttgaagaattactacccaatgccacaagcatgtttgacgactaccagggtgactcaagtacccttttagcctcaccaatgctcaaaagatttacatggactgactcaaaacctaaagcatcactcaaaattgatctcagagttacaagcaaaagcaaagaaagcggattgtcggacgtatcgcgcccttctttttgtcattcgagttgcggtcacgtatcagaaggtaaaagacgattcacgtatgatcacgctgaattagaaaggaaaatagcatgttgcagtccaccgcctgactacaatagtgtagtactatactcaacacctcctatttaa

SEQ ID NO: 7497 - protein, 1338 aa, synthetic construct; identical to SEQ ID NO: 7489
  REGION 1..1338: note = sFLT-1__Homo_sapiens__P17948

SEQ ID NO: 7498 - RNA, 4017 nt, synthetic construct
  misc_feature 1..4017: note = sFLT-1__Homo_sapiens__ABY87530
  source 1..4017: mol_type = other RNA
atggtcagctactgggacaccggggtcctgctgtgcgcgctgctcagctgtctgcttctcacaggatctagttcaggttcaaaattaaaagatcctgaactgagtttaaaaggcacccagcacatcatgcaagcaggccagacactgcatctccaatgcaggggggaagcagcccataaatggtctttgcctgaaatggtgagtaaggaaagcgaaaggctgagcataactaaatctgcctgtggaagaaatggcaaacaattctgcagtactttaaccttgaacacagctcaagcaaaccacactggcttctacagctgcaaatatctagctgtacctacttcaaagaagaaggaaacagaatctgcaatctatatatttattagtgatacaggtagacctttcgtagagatgtacagtgaaatccccgaaattatacacatgactgaaggaagggagctcgtcattccctgccgggttacgtcacctaacatcactgttactttaaaaaagtttccacttgacactttgatccctgatggaaaacgcataatctgggacagtagaaagggcttcatcatatcaaatgcaacgtacaaagaaatagggcttctgacctgtgaagcaacagtcaatgggcatttgtataagacaaactatctcacacatcgacaaaccaatacaatcatagatgtccaaataagcacaccacgcccagtcaaattacttagaggccatactcttgtcctcaattgtactgctaccactcccttgaacacgagagttcaaatgacctggagttaccctgatgaaaaaaataagagagcttccgtaaggcgacgaattgaccaaagcaattcccatgccaacatattctacagtgttcttactattgacaaaatgcagaacaaagacaaaggactttatacttgtcgtgtaaggagtggaccatcattcaaatctgttaacacctcagtgcatatatatgataaagcattcatcactgtgaaacatcgaaaacagcaggtgcttgaaaccgtagctggcaagcggtcttaccggctctctatgaaagtgaaggcatttccctcgccggaagttgtatggttaaaagatgggttacctgcgactgagaaatctgctcgctatttgactcgtggctactcgttaattatcaaggacgtaactgaagaggatgcagggaattatacaatcttgctgagcataaaacagtcaaatgtgtttaaaaacctcactgccactctaattgtcaatgtgaaaccccagatttacgaaaaggccgtgtcatcgtttccagacccggctctctacccactgggcagcagacaaatcctgacttgtaccgcatatggtatccctcaacctacaatcaagtggttctggcacccctgtaaccataatcattccgaagcaaggtgtgacttttgttccaataatgaagagtcctttatcctggatgctgacagcaacatgggaaacagaattgagagcatcactcagcgcatggcaataatagaaggaaagaataagatggctagcaccttggttgtggctgactctagaatttctggaatctacatttgcatagcttccaataaagttgggactgtgggaagaaacataagcttttatatcacagatgtgccaaatgggtttcatgttaacttggaaaaaatgccgacggaaggagaggacctgaaactgtcttgcacagttaacaagttcttatacagagacgttacttggattttactgcggacagttaataacagaacaatgcactacagtattagcaagcaaaaaatggccatcactaaggagcactccatcactcttaatcttaccatcatgaatgtttccctgcaagattcaggcacctatgcctgcagagccaggaatgtatacacaggggaagaaatcctccagaagaaagaaattacaatcagagatcaggaagcaccatacctcctgcgaaacctcagtgatcacacagtggccatcagcagttccaccactttagactgtcatgctaatggtgtccccgagcctcagatcacttggtttaaaaacaaccacaaaatacaacaagagcctggaattattttaggaccaggaagcagcacgctgtttattgaaagagtcacagaagaggatgaaggtgtctatcactgcaaagccaccaaccagaagggctctgtggaaagttcagcatacctcactgttcaaggaacctcggacaagtctaatctggagctgatcactctaacatgcacctgtgtggctgcgactctcttctggctcctattaaccctctttatccgaaaaatgaaaaggtcttcttctgaaataaagactgactacctatcaattataatggacccagatgaagttcctttggatgagcagtgtgagcggctcccttatgatgccagcaagtgggagtttgcccgggagagacttaaactgggcaaatcacttggaagaggggcttttggaaaagtggttcaagcatcagcatttggcattaagaaatcacctacgtgccggactgtggctgtgaaaatgctgaaagagggggccacggccagcgagtacaaagctctgatgactgagctaaaaatcttgacccacattggccaccatctgaacgtggttaacctgctgggagcctgcaccaagcaaggagggcctctgatggtgattgttgaatactgcaaatatggaaatctctccaactacctcaagagcaaacgtgacttattttttctcaacaaggatgcagcactacacatggagcctaagaaagaaaaaatggagccaggcctggaacaaggcaagaaaccaagactagatagcgtcaccagcagcgaaagctttgcgagctccggctttcaggaagataaaagtctgagtgatgttgaggaagaggaggattctgacggtttctacaaggagcccatcactatggaagatctgatttcttacagttttcaagtggccagaggcatggagttcctgtcttccagaaagtgcattcatcgggacctggcagcgagaaacattcttttatctgagaacaacgtggtgaagatttgtgattttggccttgcccgggatatttataagaaccccgattatgtgagaaaaggagatactcgacttcctctgaaatggatggctcctgaatctatctttgacaaaatctacagcaccaagagcgacgtgtggtcttacggagtattgctgtgggaaatcttctccttaggtgggtctccatacccaggagtacaaatggatgaggacttttgcagtcgcctgagggaaggcatgaggatgagagctcctgagtactctactcctgaaatctatcagatcatgctggactgctggcacagagacccaaaagaaaggccaagatttgcagaacttgtggaaaaactaggtgatttgcttcaagcaaatgtacaacaggatggtaaagactacatcccaatcaatgccatactgacaggaaatagtgggtttacatactcaactcctgccttctctgaggacttcttcaaggaaagtatttcagctccgaagtttaattcaggaagctctgatgatgtcagatatgtaaatgctttcaagttcatgagcctggaaagaatcaaaacctttgaagaacttttaccgaatgccacctccatgtttgatgactaccagggcgacagcagcactctgttggcctctcccatgctgaagcgcttcacctggactgacagcaaacccaaggcctcgctcaagattgacttgagagtaaccagtaaaagtaaggagtcggggctgtctgatgtcagcaggcccagtttctgccattccagctgtgggcacgtcagcgaaggcaagcgcaggttcacctacgaccacgctgagctggaaaggaaaatcgcgtgctgctccccgcccccagactacaactcggtggtcctgtactccaccccacccatctag

SEQ ID NO: 7499 - RNA, 4017 nt, synthetic construct; identical to SEQ ID NO: 7491
  misc_feature 1..4017: note = derived and/or modified sequence opt1 fromsFLT-1__Homo_sapiens__ABY87530
  source 1..4017: mol_type = other RNA

SEQ ID NO: 7500 - RNA, 4017 nt, synthetic construct; identical to SEQ ID NO: 7492
  misc_feature 1..4017: note = derived and/or modified sequence opt2 fromsFLT-1__Homo_sapiens__ABY87530
  source 1..4017: mol_type = other RNA

SEQ ID NO: 7501 - RNA, 4017 nt, synthetic construct; identical to SEQ ID NO: 7493
  misc_feature 1..4017: note = derived and/or modified sequence opt3 fromsFLT-1__Homo_sapiens__ABY87530
  source 1..4017: mol_type = other RNA

SEQ ID NO: 7502 - RNA, 4017 nt, synthetic construct; identical to SEQ ID NO: 7494
  misc_feature 1..4017: note = derived and/or modified sequence opt4 fromsFLT-1__Homo_sapiens__ABY87530
  source 1..4017: mol_type = other RNA

SEQ ID NO: 7503 - RNA, 4017 nt, synthetic construct; identical to SEQ ID NO: 7495
  misc_feature 1..4017: note = derived and/or modified sequence opt5 fromsFLT-1__Homo_sapiens__ABY87530
  source 1..4017: mol_type = other RNA

SEQ ID NO: 7504 - RNA, 4017 nt, synthetic construct
  misc_feature 1..4017: note = derived and/or modified sequence opt6 fromsFLT-1__Homo_sapiens__ABY87530
  source 1..4017: mol_type = other RNA
atggttagctactgggatactggagtgctattatgtgcactattaagttgcttattacttaccggttcaagttctggaagtaaacttaaggacccagaattaagtcttaaaggcactcaacatatcatgcaagctggacaaacacttcatctccaatgccgaggagaagcagcacataaatggtctctaccagaaatggttagtaaagaatccgaacgactttctattacaaaatccgcatgcggccgaaacgggaaacaattttgttccacactaacactaaatacagctcaggcgaaccatactggcttttacagctgcaaatatcttgccgtgccaacgagtaaaaagaaagaaactgaatcagcaatttacatcttcatttcggacacaggtagaccattcgtagaaatgtatagtgaaataccagaaatcatccatatgactgaaggcagagaacttgttataccatgcagagttactagccctaacataacagtcacacttaagaaattcccactagacacactcattcctgacggaaaacggataatttgggatagtcgtaaaggattcataatatccaacgcaacttataaggaaataggattactaacttgcgaagccaccgtaaatggtcatttatataaaaccaattacttaacccaccgtcaaacaaacacaattatagatgttcaaataagtacaccgagaccagtcaaactgctccgaggacacacactagttctaaactgtaccgcaaccacccctctaaacaccagagtgcaaatgacatggtcatatcctgacgaaaaaaacaaacgcgcctcagtacgacgcagaattgaccaaagtaattcccatgccaacatcttttattcagtgttgacaatcgataagatgcaaaacaaagataaaggactttacacatgtagagtacgctcaggtcccagttttaaatcagtaaatacaagtgtccatatatacgataaagcctttataacagtaaaacatagaaaacaacaagttttagaaacagtagctggaaaacgatcctataggctatcaatgaaagttaaagcttttccttcacctgaagttgtttggttaaaggacggactccctgccacagaaaaaagcgcaagatacttaactcgaggatactcattaataattaaagatgtaactgaagaagacgctggaaattacacaatactattatccattaaacagtcaaacgtatttaagaatcttaccgcaacacttattgtaaatgtcaaaccccaaatatatgaaaaagcagtgtcctcattcccagacccagcactctacccattaggatcccgacaaatacttacttgtactgcatatggtatccctcaacctactataaaatggttttggcatccatgtaatcataaccattcagaagccagatgcgatttttgtagtaataacgaagaaagttttatattagatgcagattcaaacatgggaaacaggattgaatcaataactcagcgaatggctataatagaaggcaaaaataaaatggcatcaaccttggtagttgcagactcacgaataagtggcatttacatctgcatcgcatcaaataaagtcggcactgtcggaagaaatatatcattctacatcacagacgtacccaatggattccacgttaacttggaaaaaatgccaacagaaggagaagacttaaaattatcttgtacagttaataaattcctatacagagatgttacctggatccttctaagaacagttaataatcgaacaatgcattactccatatcgaagcaaaaaatggcaatcacaaaagaacattccataacattaaatcttacaatcatgaatgtcagcctacaagacagcggaacctatgcatgccgcgcacgcaacgtatatactggtgaagaaattttacaaaagaaagagataactatacgagaccaagaagcaccataccttttaagaaatctttcagatcacacggttgctatctcatcaagtaccactctagattgtcatgcaaacggcgtaccagaaccccaaataacttggttcaaaaacaaccacaaaatccaacaggaaccaggaattatattaggtcccggatcctccactctctttattgaaagagttactgaagaggatgaaggtgtttatcactgtaaagctacaaatcaaaaaggaagcgtagaaagcagtgcttatcttaccgttcaaggaacatcagacaaaagtaatctggaactaattactctaacatgcacttgtgtagcagctacccttttctggcttctcttgacactatttatccgtaaaatgaaacgctcaagctctgagatcaaaacagactacctttctataataatggatccagacgaagttccattagatgaacaatgtgaacgacttccgtatgatgcaagtaaatgggaattcgccagagaacgtctaaaattaggaaaatctttaggacgtggagcctttggcaaagttgttcaagcttcagcctttggaataaagaaaagcccaacatgtagaactgtagcagtcaaaatgctaaaagaaggtgctacagcatctgaatacaaagcgttaatgacagaattgaaaatcctaacacacattggccaccatctaaacgtcgtcaatttgttaggagcttgcactaaacaaggaggaccattaatggtaatagtagaatattgcaaatacggcaatctaagcaattacctcaaatctaaaagagacctattttttctaaataaagatgctgcacttcacatggaacctaaaaaggaaaaaatggagccaggcttagaacaaggaaaaaaaccacgactggacagcgtcacatcatcagaatccttcgcatcctcaggatttcaagaagataaatctttgtcagatgttgaagaagaagaagactcagatggattttataaagaaccaattacgatggaagacttaatatcgtattcttttcaggtagctcgcggcatggaattcctaagttcaaggaaatgtatacatagagacctagctgccagaaacatcctcctcagtgaaaataacgttgtaaaaatatgtgactttggtttagctagagatatatataaaaatcccgattacgtacgaaaaggcgacacgcgactcccactcaaatggatggcccctgaaagtatcttcgataaaatatactcaaccaagtctgacgtatggtcctatggagtcttactctgggaaattttctcacttggagggtccccctacccaggtgttcaaatggacgaagatttttgtagtagactaagagagggaatgaggatgcgcgcacccgaatacagcacccccgaaatatatcaaataatgcttgactgttggcatagagaccccaaagaaagaccacgcttcgcagaattagtagaaaaactaggagaccttttacaggcgaacgtacagcaagatggcaaagactatatcccaataaatgcaatactaacaggaaatagcgggttcacctactccacacccgcttttagtgaagattttttcaaagagtcgattagcgcaccgaaatttaactcaggaagcagcgatgatgttcgatatgtaaatgcattcaaattcatgagtttagaacgcataaaaacttttgaagaattactacccaacgcaacctcaatgtttgacgattatcaaggagattcaagcacactactagcaagtccgatgttaaaaagattcacctggaccgactcaaaaccgaaagccagtctaaaaatagatcttagagtgaccagcaaatcaaaagaatccgggctatctgacgtttccagaccttcattttgtcattcatcctgtggacacgtatccgaaggaaaacgacgctttacctacgatcatgcagaactggaaagaaagatagcttgttgttcacctccaccagattataattcagtagttctatatagtacacccccaatttaa

SEQ ID NO: 7505 - protein, 367 aa, synthetic construct
  REGION 1..367: note = sTie2__Homo_sapiens__B5A953
MDSLASLVLCGVSLLLSGTVEGAMDLILINSLPLVSDAETSLTCIASGWRPHEPITIGRDFEALMNQHQDPLEVTQDVTREWAKKVVWKREKASKINGAYFCEGRVRGEAIRIRTMKMRQQASFLPATLTMTVDKGDNVNISFKKVLIKEEDAVIYKNGSFIHSVPRHEVPDILEVHLPHAQPQDAGVYSARYIGGNLFTSAFTRLIVRRCEAQKWGPECNHLCTACMNNGVCHEDTGECICPPGFMGRTCEKACELHTFGRTCKERCSGQEGCKSYVFCLPDPYGCSCATGWKGLQCNEACHPGFYGPDCKLRCSCNNGEMCDRFQGCLCSPGWQGLQCEREGKARHTEDDPKDSGFARSYRSKQW

SEQ ID NO: 7506 - RNA, 1104 nt, synthetic construct
  misc_feature 1..1104: note = sTie2__Homo_sapiens__ACF47627
  source 1..1104: mol_type = other RNA
atggactctttagccagcttagttctctgtggagtcagcttgctcctttctggaactgtggaaggtgccatggacttgatcttgatcaattccctacctcttgtatctgatgctgaaacatctctcacctgcattgcctctgggtggcgcccccatgagcccatcaccataggaagggactttgaagccttaatgaaccagcaccaggatccgctggaagttactcaagatgtgaccagagaatgggctaaaaaagttgtttggaagagagaaaaggctagtaagatcaatggtgcttatttctgtgaagggcgagttcgaggagaggcaatcaggatacgaaccatgaagatgcgtcaacaagcttccttcctaccagctactttaactatgactgtggacaagggagataacgtgaacatatctttcaaaaaggtattgattaaagaagaagatgcagtgatttacaaaaatggttccttcatccattcagtgccccggcatgaagtacctgatattctagaagtacacctgcctcatgctcagccccaggatgctggagtgtactcggccaggtatataggaggaaacctcttcacctcggccttcaccaggctgatagtccggagatgtgaagcccagaagtggggacctgaatgcaaccatctctgtactgcttgtatgaacaatggtgtctgccatgaagatactggagaatgcatttgccctcctgggtttatgggaaggacgtgtgagaaggcttgtgaactgcacacgtttggcagaacttgtaaagaaaggtgcagtggacaagagggatgcaagtcttatgtgttctgtctccctgacccctatgggtgttcctgtgccacaggctggaagggtctgcagtgcaatgaagcatgccaccctggtttttacgggccagattgtaagcttaggtgcagctgcaacaatggggagatgtgtgatcgcttccaaggatgtctctgctctccaggatggcaggggctccagtgtgagagagaaggtaaagcaaggcatacagaggatgaccccaaagatagtggatttgccagatcatatagaagtaaacagtggtaa

SEQ ID NO: 7507 - RNA, 1104 nt, synthetic construct
  misc_feature 1..1104: note = derived and/or modified sequence opt1 fromsTie2__Homo_sapiens__ACF47627
  source 1..1104: mol_type = other RNA
atggacagcctggcctccctcgtgctgtgcggcgtcagcctgctcctgtccgggaccgtggagggcgccatggacctgatcctcatcaacagcctgcccctggtgtccgacgcggagaccagcctcacgtgcatcgcctccgggtggcgcccgcacgagcccatcaccatcggccgggacttcgaggccctgatgaaccagcaccaggaccccctggaggtcacccaggacgtgacccgcgagtgggccaagaaggtggtctggaagcgggagaaggccagcaagatcaacggggcgtacttctgcgagggccgcgtgcggggcgaggccatccgcatccggacgatgaagatgcgccagcaggcctccttcctccccgccaccctgaccatgaccgtggacaagggggacaacgtcaacatcagcttcaagaaggtgctgatcaaggaggaggacgcggtgatctacaagaacggctccttcatccacagcgtcccgcggcacgaggtgcccgacatcctcgaggtgcacctcccccacgcccagccccaggacgccggggtctactccgcccgctacatcggcgggaacctgttcacgagcgccttcacccggctgatcgtgcgccggtgcgaggcgcagaagtggggcccggagtgcaaccacctgtgcaccgcctgcatgaacaacggcgtgtgccacgaggacaccggggagtgcatctgcccgcccggcttcatggggcgcacgtgcgagaaggcctgcgagctgcacaccttcggccggacctgcaaggagcgctgctccggccaggaggggtgcaagagctacgtcttctgcctccccgacccctacggctgctcctgcgccaccgggtggaagggcctgcagtgcaacgaggcctgccaccccgggttctacggccccgactgcaagctgcggtgcagctgcaacaacggcgagatgtgcgaccgcttccaggggtgcctctgctcccccggctggcaggggctgcagtgcgagcgggagggcaaggcgcgccacacggaggacgacccgaaggacagcgggttcgcccggagctaccgctccaagcagtggtga

SEQ ID NO: 7508 - RNA, 1104 nt, synthetic construct
  misc_feature 1..1104: note = derived and/or modified sequence opt2 fromsTie2__Homo_sapiens__ACF47627
  source 1..1104: mol_type = other RNA
atggactccctcgcctccctcgtcctctgcggcgtctccctcctcctctccggcaccgtcgagggcgccatggacctcatcctcatcaactccctccccctcgtctccgacgccgagacctccctcacctgcatcgcctccggctggcgcccccacgagcccatcaccatcggccgcgacttcgaggccctcatgaaccagcaccaggaccccctcgaggtcacccaggacgtcacccgcgagtgggccaagaaggtcgtctggaagcgcgagaaggcctccaagatcaacggcgcctacttctgcgagggccgcgtccgcggcgaggccatccgcatccgcaccatgaagatgcgccagcaggcctccttcctccccgccaccctcaccatgaccgtcgacaagggcgacaacgtcaacatctccttcaagaaggtcctcatcaaggaggaggacgccgtcatctacaagaacggctccttcatccactccgtcccccgccacgaggtccccgacatcctcgaggtccacctcccccacgcccagccccaggacgccggcgtctactccgcccgctacatcggcggcaacctcttcacctccgccttcacccgcctcatcgtccgccgctgcgaggcccagaagtggggccccgagtgcaaccacctctgcaccgcctgcatgaacaacggcgtctgccacgaggacaccggcgagtgcatctgcccccccggcttcatgggccgcacctgcgagaaggcctgcgagctccacaccttcggccgcacctgcaaggagcgctgctccggccaggagggctgcaagtcctacgtcttctgcctccccgacccctacggctgctcctgcgccaccggctggaagggcctccagtgcaacgaggcctgccaccccggcttctacggccccgactgcaagctccgctgctcctgcaacaacggcgagatgtgcgaccgcttccagggctgcctctgctcccccggctggcagggcctccagtgcgagcgcgagggcaaggcccgccacaccgaggacgaccccaaggactccggcttcgcccgctcctaccgctccaagcagtggtga

SEQ ID NO: 7509 - RNA, 1104 nt, synthetic construct
  misc_feature 1..1104: note = derived and/or modified sequence opt3 fromsTie2__Homo_sapiens__ACF47627
  source 1..1104: mol_type = other RNA
atggacagcctggcctccctcgttctttgcggcgtctctctgttgttatcagggaccgttgagggagctatggatctgatcctaattaacagtctccccctggtgagcgacgcagaaacatcccttacttgtatagcctctggttggagacctcacgagccaatcacgattggcagggatttcgaagcgctgatgaatcagcatcaagacccgttggaggtaacccaggatgtgacacgggaatgggctaagaaagtcgtgtggaagcgcgagaaagcctcgaagatcaacggggcatacttttgcgagggacgagttcgtggcgaagccattagaatcaggactatgaaaatgcggcagcaggcttcattcctccccgcaaccctgacaatgaccgtggacaagggtgataatgtcaacatcagctttaagaaagtgctgataaaggaggaagacgccgtaatttataaaaatgggagtttcatccactccgttcctcgccatgaggtgccagatattctcgaggtccacttaccccatgctcaacctcaggacgccggagtgtactctgcgagatatatcggcggcaacctgtttactagcgcattcacaaggcttatagtgcggcgctgtgaagcccagaagtgggggccagagtgcaatcacttgtgtaccgcttgcatgaacaatggagtctgtcacgaagatacgggtgagtgcatttgtccccctggctttatggggcgaacttgcgaaaaagcctgtgagctgcataccttcggaagaacatgcaaggagaggtgctccggccaggaaggttgtaagtcatacgtgttttgcctaccagacccgtatgggtgtagttgcgcaactggatggaaaggcctccaatgtaacgaggcttgccaccccggcttctacgggcctgattgtaagctgcggtgcagctgtaataacggagaaatgtgcgaccgttttcagggttgtctttgctctccaggctggcaggggctgcagtgcgagcgcgaaggaaaagccagacataccgaggacgatcccaaggactccggcttcgcgaggtcatatcggagcaaacaatggtga

SEQ ID NO: 7510 - RNA, 1104 nt, synthetic construct
  misc_feature 1..1104: note = derived and/or modified sequence opt4 fromsTie2__Homo_sapiens__ACF47627
  source 1..1104: mol_type = other RNA
atggacagcctggccagcctggtgctgtgcggcgtgagcctgctgctgagcggcaccgtggagggcgccatggacctgatcctgatcaacagcctgcccctggtgagcgacgccgagaccagcctgacctgcatcgccagcggctggagaccccacgagcccatcaccatcggcagagacttcgaggccctgatgaaccagcaccaggaccccctggaggtgacccaggacgtgaccagagagtgggccaagaaggtggtgtggaagagagagaaggccagcaagatcaacggcgcctacttctgcgagggcagagtgagaggcgaggccatcagaatcagaaccatgaagatgagacagcaggccagcttcctgcccgccaccctgaccatgaccgtggacaagggcgacaacgtgaacatcagcttcaagaaggtgctgatcaaggaggaggacgccgtgatctacaagaacggcagcttcatccacagcgtgcccagacacgaggtgcccgacatcctggaggtgcacctgccccacgcccagccccaggacgccggcgtgtacagcgccagatacatcggcggcaacctgttcaccagcgccttcaccagactgatcgtgagaagatgcgaggcccagaagtggggccccgagtgcaaccacctgtgcaccgcctgcatgaacaacggcgtgtgccacgaggacaccggcgagtgcatctgcccccccggcttcatgggcagaacctgcgagaaggcctgcgagctgcacaccttcggcagaacctgcaaggagagatgcagcggccaggagggctgcaagagctacgtgttctgcctgcccgacccctacggctgcagctgcgccaccggctggaagggcctgcagtgcaacgaggcctgccaccccggcttctacggccccgactgcaagctgagatgcagctgcaacaacggcgagatgtgcgacagattccagggctgcctgtgcagccccggctggcagggcctgcagtgcgagagagagggcaaggccagacacaccgaggacgaccccaaggacagcggcttcgccagaagctacagaagcaagcagtggtga

SEQ ID NO: 7511 - RNA, 1104 nt, synthetic construct
  misc_feature 1..1104: note = derived and/or modified sequence opt5 fromsTie2__Homo_sapiens__ACF47627
  source 1..1104: mol_type = other RNA
atggacagcctggcctccctcgtgctgtgcggcgtctctcttctgctcagcgggaccgttgagggagctatggatctgatccttattaactccctgcccctcgtgtctgacgccgaaacaagcctgacgtgtatcgcgtccggctggagacctcacgagccgattaccatcgggcgggatttcgaagctctgatgaatcagcatcaagaccccctcgaggtgacacaggatgtcacccgcgaatgggccaagaaagtggtttggaagagagagaaagcctctaagattaacggagcttacttttgcgagggccgggtgcgcggggaagccatcagaatccggacaatgaaaatgcgccagcaggctagcttcctgcctgccacccttacaatgaccgtcgacaagggagataatgtgaacatttcctttaagaaagttctgatcaaggaggaagacgcggtgatttataaaaatggcagcttcatccactctgtccccagacatgaggtgcctgatattctcgaggtgcatctgccccacgcccaacctcaggacgctggcgtctactccgcccggtatatcgggggaaacctttttacgagcgctttcacccgcctgattgttagacggtgtgaagcccagaagtggggcccggagtgcaatcacctctgtacagcgtgcatgaacaatggggtgtgtcacgaagataccggagagtgcatctgtccccctggctttatggggcgcacatgcgaaaaagcctgtgagctgcataccttcggaagaacgtgcaaggagcggtgctctggccaggaaggctgtaagtcctacgtgttttgcctgcccgacccttatgggtgtagctgcgctacaggatggaaaggcctccaatgtaacgaggcctgccaccccgggttctacggaccggattgtaagctgcgctgctcttgtaataacggcgaaatgtgcgacagatttcaggggtgtctttgctcccctggatggcagggcctgcagtgcgagcgggaaggcaaagctagacataccgaggacgatcccaaggacagcgggttcgcccgctcctatcggtctaaacaatggtga

SEQ ID NO: 7512 - RNA, 1104 nt, synthetic construct
  misc_feature 1..1104: note = derived and/or modified sequence opt6 fromsTie2__Homo_sapiens__ACF47627
  source 1..1104: mol_type = other RNA
atggatagcttagcatcattagtattatgtggagtaagtttactattatcaggaacagtggaaggagcaatggatctaatattaataaatagtctaccacttgtttcagacgcagaaacatcattaacatgtatagccagcggatggcgaccacatgaaccaataacaataggaagagattttgaagcactaatgaatcaacatcaagatccattagaagtaacacaagatgtaacaagagaatgggcaaaaaaagtcgtttggaaaagagaaaaagcatcaaaaattaacggagcatatttttgtgaaggaagagtaagaggtgaagcaataagaataagaactatgaaaatgagacaacaagcatcattcttgccagcaacactaacaatgaccgtagataaaggagataatgtaaatataagtttcaaaaaagtacttattaaagaagaagacgcagtaatatataaaaacggatcatttatacatagcgtaccaagacacgaagtaccagatatattagaagtacacttaccacatgcacaaccacaagatgctggagtatacagtgctagatatataggaggaaatttattcacaagtgcatttacaagattaattgtaagaagatgtgaagcgcaaaaatggggtccagaatgcaaccacttatgtacagcatgcatgaataatggagtatgtcacgaagacacaggcgaatgcatatgtccaccaggatttatgggaagaacatgtgaaaaagcatgtgaattacacacatttggaagaacatgtaaagaaagatgcagtggacaagaaggatgtaaaagttatgtattctgtttaccagacccatatggatgctcatgcgcaacgggatggaaaggactacaatgtaatgaagcatgtcatccagggttttatggaccagattgtaaattaagatgtagttgcaataatggagaaatgtgtgatagatttcagggctgtttgtgtagtccaggatggcaaggattacaatgtgaaagagaaggaaaagctagacatacagaagacgatccaaaagattcaggatttgcaagaagttatagaagcaagcaatggtaa

SEQ ID NO: 7513 - protein, 207 aa, synthetic construct
  REGION 1..207: note = TIMP-1__Homo_sapiens__P01033
MAPFEPLASGILLLLWLIAPSRACTCVPPHPQTAFCNSDLVIRAKFVGTPEVNQTTLYQRYEIKMTKMYKGFQALGDAADIRFVYTPAMESVCGYFHRSHNRSEEFLIAGKLQDGLLHITTCSFVAPWNSLSLAQRRGFTKTYTVGCEECTVFPCLSIPCKLQSGTHCLWTDQLLQGSEKGFQSRHLACLPREPGLCTWQSLRSQIA

SEQ ID NO: 7514 - RNA, 624 nt, synthetic construct
  misc_feature 1..624: note = TIMP-1__Homo_sapiens__AAA52436
  source 1..624: mol_type = other RNA
atggccccctttgagcccctggcttctggcatcctgttgttgctgtggctgatagcccccagcagggcctgcacctgtgtcccaccccacccacagacggccttctgcaattccgacctcgtcatcagggccaagttcgtggggacaccagaagtcaaccagaccaccttataccagcgttatgagatcaagatgaccaagatgtataaagggttccaagccttaggggatgccgctgacatccggttcgtctacacccccgccatggagagtgtctgcggatacttccacaggtcccacaaccgcagcgaggagtttctcattgctggaaaactgcaggatggactcttgcacatcactacctgcagtttcgtggctccctggaacagcctgagcttagctcagcgccggggcttcaccaagacctacactgttggctgtgaggaatgcacagtgtttccctgtttatccatcccctgcaaactgcagagtggcactcattgcttgtggacggaccagctcctccaaggctctgaaaagggcttccagtcccgtcaccttgcctgcctgcctcgggagccagggctgtgcacctggcagtccctgcggtcccagatagcctga

SEQ ID NO: 7515 - RNA, 624 nt, synthetic construct
  misc_feature 1..624: note = derived and/or modified sequence opt1 fromTIMP-1__Homo_sapiens__AAA52436
  source 1..624: mol_type = other RNA
atggcccccttcgagccgctggccagcggcatcctcctgctgctctggctgatcgcgccctcccgcgcctgcacgtgcgtgccgccccacccccagaccgccttctgcaacagcgacctggtcatccgggccaagttcgtggggacccccgaggtgaaccagaccaccctctaccagcgctacgagatcaagatgaccaagatgtacaagggcttccaggccctgggggacgcggccgacatccggttcgtctacacgcccgccatggagtccgtgtgcggctacttccaccgcagccacaaccggtccgaggagttcctgatcgccgggaagctccaggacggcctgctgcacatcacgacctgcagcttcgtggcgccctggaactccctcagcctggcccagcgccggggcttcaccaagacctacaccgtcgggtgcgaggagtgcaccgtgttcccgtgcctgtccatcccctgcaagctccagagcggcacccactgcctgtggacggaccagctgctccaggggtccgagaagggcttccagagccgccacctggcctgcctgccccgggagcccgggctctgcacctggcagtccctgcgcagccagatcgcctga

SEQ ID NO: 7516 - RNA, 624 nt, synthetic construct
  misc_feature 1..624: note = derived and/or modified sequence opt2 fromTIMP-1__Homo_sapiens__AAA52436
  source 1..624: mol_type = other RNA
atggcccccttcgagcccctcgcctccggcatcctcctcctcctctggctcatcgccccctcccgcgcctgcacctgcgtccccccccacccccagaccgccttctgcaactccgacctcgtcatccgcgccaagttcgtcggcacccccgaggtcaaccagaccaccctctaccagcgctacgagatcaagatgaccaagatgtacaagggcttccaggccctcggcgacgccgccgacatccgcttcgtctacacccccgccatggagtccgtctgcggctacttccaccgctcccacaaccgctccgaggagttcctcatcgccggcaagctccaggacggcctcctccacatcaccacctgctccttcgtcgccccctggaactccctctccctcgcccagcgccgcggcttcaccaagacctacaccgtcggctgcgaggagtgcaccgtcttcccctgcctctccatcccctgcaagctccagtccggcacccactgcctctggaccgaccagctcctccagggctccgagaagggcttccagtcccgccacctcgcctgcctcccccgcgagcccggcctctgcacctggcagtccctccgctcccagatcgcctga

SEQ ID NO: 7517 - RNA, 624 nt, synthetic construct
  misc_feature 1..624: note = derived and/or modified sequence opt3 fromTIMP-1__Homo_sapiens__AAA52436
  source 1..624: mol_type = other RNA
atggcccccttcgagcctctggctagcggcatcctccttctgttgtggttaattgcaccatccagagcctgcacctgtgtgccgccccaccctcagacagcgttttgcaattctgacctggtcataagggctaagttcgttgggactccagaagtgaatcaaacgaccctataccagcggtatgagatcaaaatgacaaagatgtacaaaggatttcaggccctcggtgatgcagccgacattcgcttcgtatatactcccgctatggaatcagtgtgtggctactttcatcgaagtcacaaccgtagcgaggagttcctgatcgcagggaaacttcaggatggactgttgcatattaccacatgctcctttgtcgccccttggaactctctctcgctggctcaaagaaggggcttcaccaagacttatacagtgggttgtgaagagtgcaccgtttttccatgtctgtcaatcccctgcaagctccagagcgggacgcactgtttatggactgaccagctgcttcagggaagtgaaaagggcttccaatcccggcatttggcctgcctgcctcgcgagccaggcctatgtacctggcagtctctcagaagccagatagcgtga

SEQ ID NO: 7518 - RNA, 624 nt, synthetic construct
  misc_feature 1..624: note = derived and/or modified sequence opt4 fromTIMP-1__Homo_sapiens__AAA52436
  source 1..624: mol_type = other RNA
atggcccccttcgagcccctggccagcggcatcctgctgctgctgtggctgatcgcccccagcagagcctgcacctgcgtgcccccccacccccagaccgccttctgcaacagcgacctggtgatcagagccaagttcgtgggcacccccgaggtgaaccagaccaccctgtaccagagatacgagatcaagatgaccaagatgtacaagggcttccaggccctgggcgacgccgccgacatcagattcgtgtacacccccgccatggagagcgtgtgcggctacttccacagaagccacaacagaagcgaggagttcctgatcgccggcaagctgcaggacggcctgctgcacatcaccacctgcagcttcgtggccccctggaacagcctgagcctggcccagagaagaggcttcaccaagacctacaccgtgggctgcgaggagtgcaccgtgttcccctgcctgagcatcccctgcaagctgcagagcggcacccactgcctgtggaccgaccagctgctgcagggcagcgagaagggcttccagagcagacacctggcctgcctgcccagagagcccggcctgtgcacctggcagagcctgagaagccagatcgcctga

SEQ ID NO: 7519 - RNA, 624 nt, synthetic construct
  misc_feature 1..624: note = derived and/or modified sequence opt5 fromTIMP-1__Homo_sapiens__AAA52436
  source 1..624: mol_type = other RNA
atggcccccttcgagcctctggctagcggcatcctcctgcttctgtggctcattgccccgtccagagcgtgcacctgtgtgccccctcacccccagacagctttttgcaattctgacctggtcatccgggccaagttcgttgggacgcctgaagtgaatcaaaccacactttaccagcgctatgagattaaaatgaccaagatgtacaaaggatttcaggccctgggcgatgctgccgacatcagattcgtgtatacacccgctatggaaagcgtctgtgggtactttcatcggtcccacaaccgctctgaggagttcctcattgccggaaagctgcaggatggcctgctccatatcaccacatgcagctttgtggcgccttggaactccctgtctcttgcccaaagacgggggttcaccaaaacgtataccgttggatgtgaagagtgcacagtgtttccgtgtctgagcatcccctgcaagctccagtccggcacccactgtctgtggacagaccagcttctgcagggcagcgaaaaggggttccaatctcgccatctcgcttgcctgcctagagagcccggactgtgtacctggcagtccctccggagccagattgcctga

SEQ ID NO: 7520 - RNA, 624 nt, synthetic construct
  misc_feature 1..624: note = derived and/or modified sequence opt6 fromTIMP-1__Homo_sapiens__AAA52436
  source 1..624: mol_type = other RNA
atggcaccattcgaacccttagcatcaggaatactactactactatggctaatagcaccatcaagagcatgcacatgcgtaccaccacacccacaaaccgcattctgcaactcagacctagtaataagagcaaaattcgtaggaacaccagaagtaaatcaaaccacattataccaaagatacgaaataaaaatgacaaaaatgtacaaaggattccaagcactaggagacgcagccgacataagatttgtatacacaccagcaatggaatcagtatgtggatacttccaccgatcacacaaccgatccgaagaatttttaatagcaggaaaattacaagacggactattacacataacaacatgctcattcgtagcaccttggaactcactttcactagcacaaagaagaggattcacaaaaacatacacagtcggatgcgaagaatgtacagtattcccatgcctatccataccatgcaaactacaatcaggaacacactgcctatggacagaccaactattacaaggatcagaaaaaggattccaatcaagacacctagcatgcctacccagagaaccaggattatgcacatggcaatcactaagatcccaaatagcctaa

SEQ ID NO: 7521 - protein, 220 aa, synthetic construct
  REGION 1..220: note = TIMP-2__Homo_sapiens__P16035
MGAAARTLRLALGLLLLATLLRPADACSCSPVHPQQAFCNADVVIRAKAVSEKEVDSGNDIYGNPIKRIQYEIKQIKMFKGPEKDIEFIYTAPSSAVCGVSLDVGGKKEYLIAGKAEGDGKMHITLCDFIVPWDTLSTTQKKSLNHRYQMGCECKITRCPMIPCYISSPDECLWMDWVTEKNINGHQAKFFACIKRSDGSCAWYRGAAPPKQEFLDIEDP

SEQ ID NO: 7522 - RNA, 663 nt, synthetic construct
  misc_feature 1..663: note = TIMP-2__Homo_sapiens__AAA59581
  source 1..663: mol_type = other RNA
atgggcgccgcggcccgcaccctgcggctggcgctcggcctcctgctgctggcgacgctgcttcgcccggccgacgcctgcagctgctccccggtgcacccgcaacaggcgttttgcaatgcagatgtagtgatcagggccaaagcggtcagtgagaaggaagtggactctggaaacgacatttatggcaaccctatcaagaggatccagtatgagatcaagcagataaagatgttcaaagggcctgagaaggatatagagtttatctacacggccccctcctcggcagtgtgtggggtctcgctggacgttggaggaaagaaggaatatctcattgcaggaaaggccgagggggacggcaagatgcacatcaccctctgtgacttcatcgtgccctgggacaccctgagcaccacccagaagaagagcctgaaccacaggtaccagatgggctgcgagtgcaagatcacgcgctgccccatgatcccgtgctacatctcctccccggacgagtgcctctggatggactgggtcacagagaagaacatcaacgggcaccaggccaagttcttcgcctgcatcaagagaagtgacggctcctgtgcgtggtaccgcggcgcggcgccccccaagcaggagtttctcgacatcgaggacccataa

SEQ ID NO: 7523 - RNA, 663 nt, synthetic construct
  misc_feature 1..663: note = derived and/or modified sequence opt1 fromTIMP-2__Homo_sapiens__AAA59581
  source 1..663: mol_type = other RNA
atgggcgccgccgcgcgcaccctgcggctcgccctggggctgctcctgctggccaccctcctgcgccccgccgacgcctgcagctgctcccccgtgcacccccagcaggcgttctgcaacgccgacgtcgtgatccgggccaaggccgtgagcgagaaggaggtcgactccggcaacgacatctacgggaaccccatcaagcgcatccagtacgagatcaagcagatcaagatgttcaagggccccgagaaggacatcgagttcatctacacggcgccgagctccgccgtgtgcggggtgagcctggacgtcggcggcaagaaggagtacctcatcgccgggaaggccgagggcgacgggaagatgcacatcaccctgtgcgacttcatcgtgccctgggacaccctgtccaccacgcagaagaagtccctcaaccaccggtaccagatgggctgcgagtgcaagatcacccgctgccccatgatcccctgctacatcagcagcccggacgagtgcctgtggatggactgggtgaccgagaagaacatcaacgggcaccaggccaagttcttcgcgtgcatcaagcggtccgacggcagctgcgcctggtaccgcggcgccgccccgcccaagcaggagttcctggacatcgaggacccctga

SEQ ID NO: 7524 - RNA, 663 nt, synthetic construct
  misc_feature 1..663: note = derived and/or modified sequence opt2 fromTIMP-2__Homo_sapiens__AAA59581
  source 1..663: mol_type = other RNA
atgggcgccgccgcccgcaccctccgcctcgccctcggcctcctcctcctcgccaccctcctccgccccgccgacgcctgctcctgctcccccgtccacccccagcaggccttctgcaacgccgacgtcgtcatccgcgccaaggccgtctccgagaaggaggtcgactccggcaacgacatctacggcaaccccatcaagcgcatccagtacgagatcaagcagatcaagatgttcaagggccccgagaaggacatcgagttcatctacaccgccccctcctccgccgtctgcggcgtctccctcgacgtcggcggcaagaaggagtacctcatcgccggcaaggccgagggcgacggcaagatgcacatcaccctctgcgacttcatcgtcccctgggacaccctctccaccacccagaagaagtccctcaaccaccgctaccagatgggctgcgagtgcaagatcacccgctgccccatgatcccctgctacatctcctcccccgacgagtgcctctggatggactgggtcaccgagaagaacatcaacggccaccaggccaagttcttcgcctgcatcaagcgctccgacggctcctgcgcctggtaccgcggcgccgccccccccaagcaggagttcctcgacatcgaggacccctga

SEQ ID NO: 7525 - RNA, 663 nt, synthetic construct
  misc_feature 1..663: note = derived and/or modified sequence opt3 fromTIMP-2__Homo_sapiens__AAA59581
  source 1..663: mol_type = other RNA
atgggcgccgctgcaagaaccctgaggctcgcccttgggctgttgttactggcgacactactccggcccgctgacgcctgcagctgttcccctgtgcacccacagcaagcattctgcaacgccgatgtcgttatccgcgctaaggcagtgtctgagaaagaagtagactcaggaaatgatatttacggtaacccgataaagcgaatccagtatgagattaaacagatcaagatgtttaaaggccccgaaaaggacattgagttcatctacactgcccctagtagcgctgtgtgtggggtctccctggatgtgggaggcaagaaagaatatcttatagccggtaaggcggagggggacggaaaaatgcatatcacgctgtgcgattttattgttccatgggacaccttgtctacaactcagaagaaatcgctcaatcaccgttaccaaatgggctgtgagtgcaagatcaccagatgtcccatgattccttgctatatctcaagcccagatgaatgtctgtggatggactgggtgacagagaagaacataaatggccatcaggcaaaattctttgcctgcattaagaggagtgatgggtcctgtgcttggtaccggggagccgcaccccctaaacaggagttcctggacatcgaagatccatga

SEQ ID NO: 7526 - RNA, 663 nt, synthetic construct
  misc_feature 1..663: note = derived and/or modified sequence opt4 fromTIMP-2__Homo_sapiens__AAA59581
  source 1..663: mol_type = other RNA
atgggcgccgccgccagaaccctgagactggccctgggcctgctgctgctggccaccctgctgagacccgccgacgcctgcagctgcagccccgtgcacccccagcaggccttctgcaacgccgacgtggtgatcagagccaaggccgtgagcgagaaggaggtggacagcggcaacgacatctacggcaaccccatcaagagaatccagtacgagatcaagcagatcaagatgttcaagggccccgagaaggacatcgagttcatctacaccgcccccagcagcgccgtgtgcggcgtgagcctggacgtgggcggcaagaaggagtacctgatcgccggcaaggccgagggcgacggcaagatgcacatcaccctgtgcgacttcatcgtgccctgggacaccctgagcaccacccagaagaagagcctgaaccacagataccagatgggctgcgagtgcaagatcaccagatgccccatgatcccctgctacatcagcagccccgacgagtgcctgtggatggactgggtgaccgagaagaacatcaacggccaccaggccaagttcttcgcctgcatcaagagaagcgacggcagctgcgcctggtacagaggcgccgccccccccaagcaggagttcctggacatcgaggacccctga

SEQ ID NO: 7527 - RNA, 663 nt, synthetic construct
  misc_feature 1..663: note = derived and/or modified sequence opt5 fromTIMP-2__Homo_sapiens__AAA59581
  source 1..663: mol_type = other RNA
atgggcgccgctgccagaaccctgcggctcgcgctggggcttctgctcctggctacacttctgcgccccgccgacgcctgcagctgttcccctgtgcacccgcagcaggctttctgcaacgccgatgtcgttatcagagctaaggccgtgtctgagaaagaagtggacagcggaaatgatatttacggcaaccccatcaagcggattcaatatgagatcaaacagattaagatgtttaaagggcctgaaaaggacatcgagttcatctacacggcgccctcctctgccgtctgtggagtgagcctcgatgttggcgggaagaaagaatatctgattgctggaaaggccgagggcgacggcaaaatgcatatcaccctgtgcgattttattgtgccttgggacacactctccaccacacagaagaaatctctgaatcaccgctaccaaatggggtgtgagtgcaagatcaccagatgtcccatgattccttgctatatcagctccccggatgaatgtctttggatggactgggtcacagagaagaacattaatggacatcaggctaaattctttgcctgcatcaagcggagcgatggctcttgtgcgtggtaccgcggggccgctccccctaaacaggagttcctggacatcgaagatccctga

SEQ ID NO: 7528 - RNA, 663 nt, synthetic construct
  misc_feature 1..663: note = derived and/or modified sequence opt6 fromTIMP-2__Homo_sapiens__AAA59581
  source 1..663: mol_type = other RNA
atgggagcagcagcaagaacattaagattagcactaggactactactattagcaacactactaagaccagcagacgcatgcagctgctcaccagtacacccacaacaagcattctgcaacgcagacgtagtaataagagcaaaagcagtatcagaaaaagaagtcgactcaggaaacgacatatatggaaacccaataaaaagaatacaatacgaaataaaacaaataaaaatgttcaaaggaccagaaaaagacatagaattcatatatacagcaccatcatcagcagtatgcggagtatcactagacgtaggaggaaaaaaagaatacttaatagcaggaaaagcagaaggagacggaaaaatgcacataacactatgcgacttcatagtaccatgggacacactatcaacaacccaaaaaaaaagcttaaaccacagataccaaatgggatgcgaatgcaaaataacaagatgcccaatgataccatgctacatatcaagtccagatgaatgcttatggatggactgggtaacagaaaaaaacatcaacggacaccaagcaaaattcttcgcatgcataaaaagatcagacggaagttgcgcatggtatagaggagcagcaccaccaaaacaagaattcctagacatagaagatccataa

SEQ ID NO: 7529 - protein, 211 aa, synthetic construct
  REGION 1..211: note = TIMP-3__Homo_sapiens__P35625
MTPWLGLIVLLGSWSLGDWGAEACTCSPSHPQDAFCNSDIVIRAKVVGKKLVKEGPFGTLVYTIKQMKMYRGFTKMPHVQYIHTEASESLCGLKLEVNKYQYLLTGRVYDGKMYTGLCNFVERWDQLTLSQRKGLNYRYHLGCNCKIKSCYYLPCFVTSKNECLWTDMLSNFGYPGYQSKHYACIRQKGGYCSWYRGWAPPDKSIINATDP

SEQ ID NO: 7530 - RNA, 636 nt, synthetic construct
  misc_feature 1..636: note = TIMP-3__Homo_sapiens__AAA17672
  source 1..636: mol_type = other RNA
atgaccccttggctcgggctcatcgtgctcctgggcagctggagcctgggggactggggcgccgaggcgtgcacatgctcgcccagccacccccaggacgccttctgcaactccgacatcgtgatccgggccaaggtggtggggaagaagctggtaaaggaggggcccttcggcacgctggtctacaccatcaagcagatgaagatgtaccgaggcttcaccaagatgccccatgtgcagtacatccatacggaagcttccgagagtctctgtggccttaagctggaggtcaacaagtaccagtacctgctgacaggtcgcgtctatgatggcaagatgtacacggggctgtgcaacttcgtggagaggtgggaccagctcaccctctcccagcgcaaggggctgaactatcggtatcacctgggttgtaactgcaagatcaagtcctgctactacctgccttgctttgtgacttccaagaacgagtgtctctggaccgacatgctctccaatttcggttaccctggctaccagtccaaacactacgcctgcatccggcagaagggcggctactgcagctggtaccgaggatgggcccccccggataaaagcatcatcaatgccacagacccctga

SEQ ID NO: 7531 - RNA, 636 nt, synthetic construct
  misc_feature 1..636: note = derived and/or modified sequence opt1 fromTIMP-3__Homo_sapiens__AAA17672
  source 1..636: mol_type = other RNA
atgaccccctggctgggcctcatcgtgctgctggggagctggtccctcggcgactggggcgccgaggcctgcacgtgcagcccgtcccacccccaggacgcgttctgcaacagcgacatcgtcatccgcgccaaggtggtggggaagaagctggtcaaggaggggcccttcggcaccctggtgtacaccatcaagcagatgaagatgtaccggggcttcaccaagatgccccacgtgcagtacatccacaccgaggcctccgagagcctctgcgggctgaagctggaggtcaacaagtaccagtacctcctgacgggccgcgtgtacgacgggaagatgtacaccggcctgtgcaacttcgtggagcggtgggaccagctcaccctgtcccagcgcaaggggctgaactaccggtaccacctcggctgcaactgcaagatcaagagctgctactacctgccgtgcttcgtcacctccaagaacgagtgcctgtggacggacatgctcagcaacttcggctaccccgggtaccagtccaagcactacgcctgcatccgccagaagggcgggtactgcagctggtaccggggctgggccccgcccgacaagtccatcatcaacgcgaccgacccctga

SEQ ID NO: 7532 - RNA, 636 nt, synthetic construct
  misc_feature 1..636: note = derived and/or modified sequence opt2 fromTIMP-3__Homo_sapiens__AAA17672
  source 1..636: mol_type = other RNA
atgaccccctggctcggcctcatcgtcctcctcggctcctggtccctcggcgactggggcgccgaggcctgcacctgctccccctcccacccccaggacgccttctgcaactccgacatcgtcatccgcgccaaggtcgtcggcaagaagctcgtcaaggagggccccttcggcaccctcgtctacaccatcaagcagatgaagatgtaccgcggcttcaccaagatgccccacgtccagtacatccacaccgaggcctccgagtccctctgcggcctcaagctcgaggtcaacaagtaccagtacctcctcaccggccgcgtctacgacggcaagatgtacaccggcctctgcaacttcgtcgagcgctgggaccagctcaccctctcccagcgcaagggcctcaactaccgctaccacctcggctgcaactgcaagatcaagtcctgctactacctcccctgcttcgtcacctccaagaacgagtgcctctggaccgacatgctctccaacttcggctaccccggctaccagtccaagcactacgcctgcatccgccagaagggcggctactgctcctggtaccgcggctgggccccccccgacaagtccatcatcaacgccaccgacccctga

SEQ ID NO: 7533 - RNA, 636 nt, synthetic construct
  misc_feature 1..636: note = derived and/or modified sequence opt3 fromTIMP-3__Homo_sapiens__AAA17672
  source 1..636: mol_type = other RNA
atgaccccctggctgggcctcatcgtgcttctggggagctggtccttgggagactggggtgccgaggcttgcacatgttctccttcacacccacaggatgcattctgcaacagtgacattgtcataagagccaaggttgtgggcaaaaagttagtaaaagaagggccgtttggaactctggtgtacacgatcaagcaaatgaaaatgtataggggcttcaccaagatgccccatgtccagtacattcacacagaggcgagcgaatccctatgtggtctcaagctggaggtgaataaatatcagtaccttctgactgggcgggtttatgatggaaagatgtacaccggcttgtgcaactttgtggaacgctgggaccagctcacactgtctcaacgaaaaggcctgaattatcgttaccatctcgggtgtaactgcaagatcaaatcgtgttactatttaccttgcttcgtcacctcaaagaatgagtgtctgtggactgatatgcttagcaactttggatacccaggttatcagagtaagcactacgcttgcattagacagaaaggcgggtattgttcctggtacaggggatgggcaccccctgacaagtctatcataaatgccacagatccatga

SEQ ID NO: 7534 - RNA, 636 nt, synthetic construct
  misc_feature 1..636: note = derived and/or modified sequence opt4 fromTIMP-3__Homo_sapiens__AAA17672
  source 1..636: mol_type = other RNA
atgaccccctggctgggcctgatcgtgctgctgggcagctggagcctgggcgactggggcgccgaggcctgcacctgcagccccagccacccccaggacgccttctgcaacagcgacatcgtgatcagagccaaggtggtgggcaagaagctggtgaaggagggccccttcggcaccctggtgtacaccatcaagcagatgaagatgtacagaggcttcaccaagatgccccacgtgcagtacatccacaccgaggccagcgagagcctgtgcggcctgaagctggaggtgaacaagtaccagtacctgctgaccggcagagtgtacgacggcaagatgtacaccggcctgtgcaacttcgtggagagatgggaccagctgaccctgagccagagaaagggcctgaactacagataccacctgggctgcaactgcaagatcaagagctgctactacctgccctgcttcgtgaccagcaagaacgagtgcctgtggaccgacatgctgagcaacttcggctaccccggctaccagagcaagcactacgcctgcatcagacagaagggcggctactgcagctggtacagaggctgggccccccccgacaagagcatcatcaacgccaccgacccctga

SEQ ID NO: 7535 - RNA, 636 nt, synthetic construct
  misc_feature 1..636: note = derived and/or modified sequence opt5 fromTIMP-3__Homo_sapiens__AAA17672
  source 1..636: mol_type = other RNA
atgaccccctggctgggcctcatcgtgctgcttgggagctggtccctgggagactggggcgccgaggcttgcacatgttctcctagccacccgcaggatgccttctgcaactccgacattgtcatcagagcgaaggttgtggggaaaaagctcgtgaaagaaggaccctttggcacgctggtctacaccattaagcaaatgaaaatgtatcgggggttcacaaagatgcctcatgtgcagtacatccacaccgaggcttctgaaagcctttgtggactgaagctcgaggttaataaatatcagtacctgctgacaggccgcgtgtatgatggcaagatgtacaccgggctctgcaactttgtcgaaagatgggaccagctgacactttcccaacggaaaggactgaattatcgctaccatctcggctgtaactgcaagattaaatcttgttactatctgccctgcttcgtgaccagcaagaatgagtgtctttggacggatatgctgtccaactttgggtaccctggatatcagagcaagcactacgcctgcatcagacagaaaggcgggtattgttcttggtaccggggatgggctccccctgacaagtccatcattaatgccaccgatccgtga

SEQ ID NO: 7536 - RNA, 636 nt, synthetic construct
  misc_feature 1..636: note = derived and/or modified sequence opt6 fromTIMP-3__Homo_sapiens__AAA17672
  source 1..636: mol_type = other RNA
atgacaccatggctaggactaatagtactactaggatcatggtcactaggagactggggagcagaagcatgcacatgctcaccatcacacccacaagacgcattctgcaactcagacatagtaataagagcaaaagtagtaggaaaaaaattagtaaaagaaggacccttcggaacactagtatacacaataaaacaaatgaaaatgtacagaggattcacaaaaatgccacacgtacaatacatacacacagaagcatcagaatcactatgcggactaaaactagaagtaaacaaatatcaatatctattaacaggaagagtatacgacggaaaaatgtatacaggactatgcaacttcgtagaaagatgggaccaactaacactatcacaaagaaaaggactaaactacagataccacctaggatgcaattgcaaaataaaatcatgctactacttaccatgcttcgtaacatcaaaaaacgaatgcctatggacagacatgctatcaaatttcggatacccaggttaccaaagcaaacactacgcatgcataagacaaaaaggaggatactgctcatggtacagaggatgggcaccaccagacaaatcaataataaacgcaacagacccctaa

SEQ ID NO: 7537 - protein, 1170 aa, synthetic construct
  REGION 1..1170: note = TSP-1__Homo_sapiens__P07996
MGLAWGLGVLFLMHVCGTNRIPESGGDNSVFDIFELTGAARKGSGRRLVKGPDPSSPAFRIEDANLIPPVPDDKFQDLVDAVRAEKGFLLLASLRQMKKTRGTLLALERKDHSGQVFSVVSNGKAGTLDLSLTVQGKQHVVSVEEALLATGQWKSITLFVQEDRAQLYIDCEKMENAELDVPIQSVFTRDLASIARLRIAKGGVNDNFQGVLQNVRFVFGTTPEDILRNKGCSSSTSVLLTLDNNVVNGSSPAIRTNYIGHKTKDLQAICGISCDELSSMVLELRGLRTIVTTLQDSIRKVTEENKELANELRRPPLCYHNGVQYRNNEEWTVDSCTECHCQNSVTICKKVSCPIMPCSNATVPDGECCPRCWPSDSADDGWSPWSEWTSCSTSCGNGIQQRGRSCDSLNNRCEGSSVQTRTCHIQECDKRFKQDGGWSHWSPWSSCSVTCGDGVITRIRLCNSPSPQMNGKPCEGEARETKACKKDACPINGGWGPWSPWDICSVTCGGGVQKRSRLCNNPTPQFGGKDCVGDVTENQICNKQDCPIDGCLSNPCFAGVKCTSYPDGSWKCGACPPGYSGNGIQCTDVDECKEVPDACFNHNGEHRCENTDPGYNCLPCPPRFTGSQPFGQGVEHATANKQVCKPRNPCTDGTHDCNKNAKCNYLGHYSDPMYRCECKPGYAGNGIICGEDTDLDGWPNENLVCVANATYHCKKDNCPNLPNSGQEDYDKDGIGDACDDDDDNDKIPDDRDNCPFHYNPAQYDYDRDDVGDRCDNCPYNHNPDQADTDNNGEGDACAADIDGDGILNERDNCQYVYNVDQRDTDMDGVGDQCDNCPLEHNPDQLDSDSDRIGDTCDNNQDIDEDGHQNNLDNCPYVPNANQADHDKDGKGDACDHDDDNDGIPDDKDNCRLVPNPDQKDSDGDGRGDACKDDFDHDSVPDIDDICPENVDISETDFRRFQMIPLDPKGTSQNDPNWVVRHQGKELVQTVNCDPGLAVGYDEFNAVDFSGTFFINTERDDDYAGFVFGYQSSSRFYVVMWKQVTQSYWDTNPTRAQGYSGLSVKVVNSTTGPGEHLRNALWHTGNTPGQVRTLWHDPRHIGWKDFTAYRWRLSHRPKTGFIRVVMYEGKKIMADSGPIYDKTYAGGRLGLFVFSQEMVFFSDLKYECRDP

SEQ ID NO: 7538 - RNA, 3513 nt, synthetic construct
  misc_feature 1..3513: note = TSP-1__Homo_sapiens__AAI36470
  source 1..3513: mol_type = other RNA
atggggctggcctggggactaggcgtcctgttcctgatgcatgtgtgtggcaccaaccgcattccagagtctggcggagacaacagcgtgtttgacatctttgaactcaccggggccgcccgcaaggggtctgggcgccgactggtgaagggccccgacccttccagcccagctttccgcatcgaggatgccaacctgatcccccctgtgcctgatgacaagttccaagacctggtggatgctgtgcgggcagaaaagggtttcctccttctggcatccctgaggcagatgaagaagacccggggcacgctgctggccctggagcggaaagaccactctggccaggtcttcagcgtggtgtccaatggcaaggcgggcaccctggacctcagcctgaccgtccaaggaaagcagcacgtggtgtctgtggaagaagctctcctggcaaccggccagtggaagagcatcaccctgtttgtgcaggaagacagggcccagctgtacatcgactgtgaaaagatggagaatgctgagttggacgtccccatccaaagcgtcttcaccagagacctggccagcatcgccagactccgcatcgcaaaggggggcgtcaatgacaatttccagggggtgctgcagaatgtgaggtttgtctttggaaccacaccagaagacatcctcaggaacaaaggctgctccagctctaccagtgtcctcctcacccttgacaacaacgtggtgaatggttccagccctgccatccgcactaactacattggccacaagacaaaggacttgcaagccatctgcggcatctcctgtgatgagctgtccagcatggtcctggaactcaggggcctgcgcaccattgtgaccacgctgcaggacagcatccgcaaagtgactgaagagaacaaagagttggccaatgagctgaggcggcctcccctatgctatcacaacggagttcagtacagaaataacgaggaatggactgttgatagctgcactgagtgtcactgtcagaactcagttaccatctgcaaaaaggtgtcctgccccatcatgccctgctccaatgccacagttcctgatggagaatgctgtcctcgctgttggcccagcgactctgcggacgatggctggtctccatggtccgagtggacctcctgttctacgagctgtggcaatggaattcagcagcgcggccgctcctgcgatagcctcaacaaccgatgtgagggctcctcggtccagacacggacctgccacattcaggagtgtgacaagagatttaaacaggatggtggctggagccactggtccccgtggtcatcttgttctgtgacatgtggtgatggtgtgatcacaaggatccggctctgcaactctcccagcccccagatgaacgggaaaccctgtgaaggcgaagcgcgggagaccaaagcctgcaagaaagacgcctgccccatcaatggaggctggggtccttggtcaccatgggacatctgttctgtcacctgtggaggaggggtacagaaacgtagtcgtctctgcaacaaccccacaccccagtttggaggcaaggactgcgttggtgatgtaacagaaaaccagatctgcaacaagcaggactgtccaattgatggatgcctgtccaatccctgctttgccggcgtgaagtgtactagctaccctgatggcagctggaaatgtggtgcttgtccccctggttacagtggaaatggcatccagtgcacagatgttgatgagtgcaaagaagtgcctgatgcctgcttcaaccacaatggagagcaccggtgtgagaacacggaccccggctacaactgcctgccctgccccccacgcttcaccggctcacagcccttcggccagggtgtcgaacatgccacggccaacaaacaggtgtgcaagccccgtaacccctgcacggatgggacccacgactgcaacaagaacgccaagtgcaactacctgggccactatagcgaccccatgtaccgctgcgagtgcaagcctggctacgctggcaatggcatcatctgcggggaggacacagacctggatggctggcccaatgagaacctggtgtgcgtggccaatgcgacttaccactgcaaaaaggataattgccccaaccttcccaactcagggcaggaagactatgacaaggatggaattggtgatgcctgtgatgatgacgatgacaatgataaaattccagatgacagggacaactgtccattccattacaacccagctcagtatgactatgacagagatgatgtgggagaccgctgtgacaactgtccctacaaccacaacccagatcaggcagacacagacaacaatggggaaggagacgcctgtgctgcagacattgatggagacggtatcctcaatgaacgggacaactgccagtacgtctacaatgtggaccagagagacactgatatggatggggttggagatcagtgtgacaattgccccttggaacacaatccggatcagctggactctgactcagaccgcattggagatacctgtgacaacaatcaggatattgatgaagatggccaccagaacaatctggacaactgtccctatgtgcccaatgccaaccaggctgaccatgacaaagatggcaagggagatgcctgtgaccacgatgatgacaacgatggcattcctgatgacaaggacaactgcagactcgtgcccaatcccgaccagaaggactctgacggcgatggtcgaggtgatgcctgcaaagatgattttgaccatgacagtgtgccagacatcgatgacatctgtcctgagaatgttgacatcagtgagaccgatttccgccgattccagatgattcctctggaccccaaagggacatcccaaaatgaccctaactgggttgtacgccatcagggtaaagaactcgtccagactgtcaactgtgatcctggactcgctgtaggttatgatgagtttaatgctgtggacttcagtggcaccttcttcatcaacaccgaaagggacgatgactatgctggatttgtctttggctaccagtccagcagccgcttttatgttgtgatgtggaagcaagtcacccagtcctactgggacaccaaccccacgagggctcagggatactcgggcctttctgtgaaagttgtaaactccaccacagggcctggcgagcacctgcggaacgccctgtggcacacaggaaacacccctggccaggtgcgcaccctgtggcatgaccctcgtcacataggctggaaagatttcaccgcctacagatggcgtctcagccacaggccaaagacgggtttcattagagtggtgatgtatgaagggaagaaaatcatggctgactcaggacccatctatgataaaacctatgctggtggtagactagggttgtttgtcttctctcaagaaatggtgttcttctctgacctgaaatacgaatgtagagatccctaa

SEQ ID NO: 7539 - RNA, 3513 nt, synthetic construct
  misc_feature 1..3513: note = derived and/or modified sequence opt1 fromTSP-1__Homo_sapiens__AAI36470
  source 1..3513: mol_type = other RNA
atgggcctggcctgggggctcggcgtgctgttcctgatgcacgtctgcgggaccaaccgcatccccgagagcggcggggacaactccgtgttcgacatcttcgagctcaccggcgccgcgcggaagggcagcgggcgccggctggtgaagggcccggacccctccagccccgccttccgcatcgaggacgccaacctgatcccgcccgtccccgacgacaagttccaggacctcgtggacgccgtgcgggccgagaaggggttcctgctgctcgcgtccctgcgccagatgaagaagacgcggggcaccctgctcgccctggagcgcaaggaccacagcgggcaggtcttctccgtggtgagcaacggcaaggccggcaccctggacctctccctgaccgtccaggggaagcagcacgtggtgagcgtcgaggaggccctgctcgcgacgggccagtggaagtccatcaccctgttcgtgcaggaggaccgggcccagctgtacatcgactgcgagaagatggagaacgccgagctcgacgtgcccatccagagcgtcttcacccgcgacctggcctccatcgcccggctgcgcatcgcgaagggcggggtgaacgacaacttccagggcgtgctccagaacgtccggttcgtgttcgggaccacgcccgaggacatcctgcgcaacaagggctgcagctccagcacctccgtgctgctcaccctggacaacaacgtcgtgaacgggagctccccggccatccggaccaactacatcggccacaagacgaaggacctgcaggccatctgcgggatcagctgcgacgagctcagctccatggtgctggagctgcgcggcctccggaccatcgtcaccaccctgcaggacagcatccgcaaggtgacggaggagaacaaggagctggccaacgagctccggcgcccgcccctgtgctaccacaacggcgtccagtaccggaacaacgaggagtggaccgtggactcctgcaccgagtgccactgccagaacagcgtgaccatctgcaagaaggtctcctgccccatcatgccctgcagcaacgccacggtgcccgacggggagtgctgcccccgctgctggccctccgacagcgcggacgacggctggtccccgtggagcgagtggacctcctgcagcacctcctgcgggaacggcatccagcagcgcgggcggagctgcgactccctgaacaaccgctgcgagggcagctccgtgcagacccggacgtgccacatccaggagtgcgacaagcgcttcaagcaggacggcgggtggagccactggtccccctggagcagctgctccgtgacctgcggcgacggggtgatcacccggatccgcctctgcaacagccccagcccccagatgaacggcaagccgtgcgagggggaggcccgggagaccaaggcctgcaagaaggacgcctgccccatcaacggcggctgggggccctggtccccctgggacatctgctccgtgacgtgcggcgggggcgtccagaagcgcagccggctgtgcaacaacccgacgccccagttcggcgggaaggactgcgtgggcgacgtgaccgagaaccagatctgcaacaagcaggactgccccatcgacgggtgcctgtccaacccctgcttcgccggcgtcaagtgcaccagctacccggacgggtcctggaagtgcggcgcgtgcccgcccggctacagcgggaacggcatccagtgcaccgacgtggacgagtgcaaggaggtgcccgacgcctgcttcaaccacaacggggagcaccgctgcgagaacaccgaccccggctacaactgcctcccctgcccgccccggttcaccgggtcccagcccttcggccagggcgtcgagcacgccaccgccaacaagcaggtctgcaagccccgcaacccctgcacggacgggacccacgactgcaacaagaacgccaagtgcaactacctgggccactacagcgacccgatgtaccggtgcgagtgcaagcccgggtacgcgggcaacgggatcatctgcggcgaggacaccgacctggacggctggcccaacgagaacctcgtgtgcgtcgccaacgccacctaccactgcaagaaggacaactgccccaacctgccgaactccgggcaggaggactacgacaaggacggcatcggggacgcctgcgacgacgacgacgacaacgacaagatccccgacgaccgcgacaactgccccttccactacaaccccgcgcagtacgactacgaccgggacgacgtgggcgaccgctgcgacaactgcccgtacaaccacaaccccgaccaggccgacaccgacaacaacggggagggcgacgcctgcgccgccgacatcgacggcgacgggatcctgaacgagcgggacaactgccagtacgtgtacaacgtcgaccagcgcgacacggacatggacggcgtgggggaccagtgcgacaactgccccctcgagcacaaccccgaccagctggacagcgactccgaccggatcggcgacacgtgcgacaacaaccaggacatcgacgaggacggccaccagaacaacctggacaactgcccgtacgtgcccaacgcgaaccaggccgaccacgacaaggacgggaagggcgacgcctgcgaccacgacgacgacaacgacgggatccccgacgacaaggacaactgccgcctggtccccaacccggaccagaaggacagcgacggcgacgggcgcggcgacgcctgcaaggacgacttcgaccacgactccgtgcccgacatcgacgacatctgccccgagaacgtggacatcagcgagaccgacttccggcgcttccagatgatcccgctcgaccccaagggcaccagccagaacgaccccaactgggtcgtgcggcaccaggggaaggagctggtgcagaccgtcaactgcgaccccggcctggccgtggggtacgacgagttcaacgcggtggacttctccggcaccttcttcatcaacaccgagcgcgacgacgactacgccgggttcgtcttcggctaccagagctccagccggttctacgtggtgatgtggaagcaggtcacccagtcctactgggacacgaacccgacccgcgcccagggctacagcgggctctccgtgaaggtggtcaacagcaccaccggccccggggagcacctccggaacgccctgtggcacacgggcaacacccccggccaggtgcgcaccctgtggcacgacccccggcacatcgggtggaaggacttcaccgcctaccgctggcggctgtcccaccgcccgaagacgggcttcatccgggtggtcatgtacgaggggaagaagatcatggcggacagcggccccatctacgacaagacctacgccgggggccgcctgggcctcttcgtgttctcccaggagatggtgttcttcagcgacctgaagtacgagtgccgggacccctga

SEQ ID NO: 7540 - RNA, 3513 nt, synthetic construct
  misc_feature 1..3513: note = derived and/or modified sequence opt2 fromTSP-1__Homo_sapiens__AAI36470
  source 1..3513: mol_type = other RNA
atgggcctcgcctggggcctcggcgtcctcttcctcatgcacgtctgcggcaccaaccgcatccccgagtccggcggcgacaactccgtcttcgacatcttcgagctcaccggcgccgcccgcaagggctccggccgccgcctcgtcaagggccccgacccctcctcccccgccttccgcatcgaggacgccaacctcatcccccccgtccccgacgacaagttccaggacctcgtcgacgccgtccgcgccgagaagggcttcctcctcctcgcctccctccgccagatgaagaagacccgcggcaccctcctcgccctcgagcgcaaggaccactccggccaggtcttctccgtcgtctccaacggcaaggccggcaccctcgacctctccctcaccgtccagggcaagcagcacgtcgtctccgtcgaggaggccctcctcgccaccggccagtggaagtccatcaccctcttcgtccaggaggaccgcgcccagctctacatcgactgcgagaagatggagaacgccgagctcgacgtccccatccagtccgtcttcacccgcgacctcgcctccatcgcccgcctccgcatcgccaagggcggcgtcaacgacaacttccagggcgtcctccagaacgtccgcttcgtcttcggcaccacccccgaggacatcctccgcaacaagggctgctcctcctccacctccgtcctcctcaccctcgacaacaacgtcgtcaacggctcctcccccgccatccgcaccaactacatcggccacaagaccaaggacctccaggccatctgcggcatctcctgcgacgagctctcctccatggtcctcgagctccgcggcctccgcaccatcgtcaccaccctccaggactccatccgcaaggtcaccgaggagaacaaggagctcgccaacgagctccgccgcccccccctctgctaccacaacggcgtccagtaccgcaacaacgaggagtggaccgtcgactcctgcaccgagtgccactgccagaactccgtcaccatctgcaagaaggtctcctgccccatcatgccctgctccaacgccaccgtccccgacggcgagtgctgcccccgctgctggccctccgactccgccgacgacggctggtccccctggtccgagtggacctcctgctccacctcctgcggcaacggcatccagcagcgcggccgctcctgcgactccctcaacaaccgctgcgagggctcctccgtccagacccgcacctgccacatccaggagtgcgacaagcgcttcaagcaggacggcggctggtcccactggtccccctggtcctcctgctccgtcacctgcggcgacggcgtcatcacccgcatccgcctctgcaactccccctccccccagatgaacggcaagccctgcgagggcgaggcccgcgagaccaaggcctgcaagaaggacgcctgccccatcaacggcggctggggcccctggtccccctgggacatctgctccgtcacctgcggcggcggcgtccagaagcgctcccgcctctgcaacaaccccaccccccagttcggcggcaaggactgcgtcggcgacgtcaccgagaaccagatctgcaacaagcaggactgccccatcgacggctgcctctccaacccctgcttcgccggcgtcaagtgcacctcctaccccgacggctcctggaagtgcggcgcctgcccccccggctactccggcaacggcatccagtgcaccgacgtcgacgagtgcaaggaggtccccgacgcctgcttcaaccacaacggcgagcaccgctgcgagaacaccgaccccggctacaactgcctcccctgccccccccgcttcaccggctcccagcccttcggccagggcgtcgagcacgccaccgccaacaagcaggtctgcaagccccgcaacccctgcaccgacggcacccacgactgcaacaagaacgccaagtgcaactacctcggccactactccgaccccatgtaccgctgcgagtgcaagcccggctacgccggcaacggcatcatctgcggcgaggacaccgacctcgacggctggcccaacgagaacctcgtctgcgtcgccaacgccacctaccactgcaagaaggacaactgccccaacctccccaactccggccaggaggactacgacaaggacggcatcggcgacgcctgcgacgacgacgacgacaacgacaagatccccgacgaccgcgacaactgccccttccactacaaccccgcccagtacgactacgaccgcgacgacgtcggcgaccgctgcgacaactgcccctacaaccacaaccccgaccaggccgacaccgacaacaacggcgagggcgacgcctgcgccgccgacatcgacggcgacggcatcctcaacgagcgcgacaactgccagtacgtctacaacgtcgaccagcgcgacaccgacatggacggcgtcggcgaccagtgcgacaactgccccctcgagcacaaccccgaccagctcgactccgactccgaccgcatcggcgacacctgcgacaacaaccaggacatcgacgaggacggccaccagaacaacctcgacaactgcccctacgtccccaacgccaaccaggccgaccacgacaaggacggcaagggcgacgcctgcgaccacgacgacgacaacgacggcatccccgacgacaaggacaactgccgcctcgtccccaaccccgaccagaaggactccgacggcgacggccgcggcgacgcctgcaaggacgacttcgaccacgactccgtccccgacatcgacgacatctgccccgagaacgtcgacatctccgagaccgacttccgccgcttccagatgatccccctcgaccccaagggcacctcccagaacgaccccaactgggtcgtccgccaccagggcaaggagctcgtccagaccgtcaactgcgaccccggcctcgccgtcggctacgacgagttcaacgccgtcgacttctccggcaccttcttcatcaacaccgagcgcgacgacgactacgccggcttcgtcttcggctaccagtcctcctcccgcttctacgtcgtcatgtggaagcaggtcacccagtcctactgggacaccaaccccacccgcgcccagggctactccggcctctccgtcaaggtcgtcaactccaccaccggccccggcgagcacctccgcaacgccctctggcacaccggcaacacccccggccaggtccgcaccctctggcacgacccccgccacatcggctggaaggacttcaccgcctaccgctggcgcctctcccaccgccccaagaccggcttcatccgcgtcgtcatgtacgagggcaagaagatcatggccgactccggccccatctacgacaagacctacgccggcggccgcctcggcctcttcgtcttctcccaggagatggtcttcttctccgacctcaagtacgagtgccgcgacccctga

SEQ ID NO: 7541 - RNA, 3513 nt, synthetic construct
  misc_feature 1..3513: note = derived and/or modified sequence opt3 fromTSP-1__Homo_sapiens__AAI36470
  source 1..3513: mol_type = other RNA
atgggcctggcctgggggctcggagtgcttttcctgatgcacgtctgcggtaccaacagaatccccgagagcggcggggacaattccgtttttgatattttcgaattgacaggagctgcaaggaagggctctggtcggcgcttagtgaaagggcctgacccatcaagtccggcctttcgaatagaggatgcgaacctgattccccctgtaccagacgataagttccaggacctagtggatgctgtccgtgccgaaaaaggatttctcctgcttgcaagcctgagacaaatgaagaaaactaggggcacgttgctcgccctggagcggaaggaccattccggccaggtgttctctgttgtgtcgaatgggaaggctggaaccctggatctctcattaacagtccagggtaaacagcacgtggtaagcgttgaagaggcactgcttgccactggccaatggaagagtatcaccttgtttgtgcaggaggaccgcgctcagctgtacatcgattgtgaaaagatggagaacgccgaactagacgtccccattcagtccgtgttcacaagagatctcgcgtctatcgcaaggctgcggatagccaaagggggagtgaatgacaactttcaaggcgtccttcagaatgttcgcttcgtgtttggtaccactcctgaggacatcctgcgaaacaaagggtgcagctcctcaacaagtgtattgctcaccctggataataacgtggtcaatggaagctctccagctattagaacgaactatatcggccataagactaaggacttacaggccatttgtggcatctcctgcgatgagctgtcaagcatggtgctcgaacttagggggctgcggaccatagttacaactttgcaggacagtattcgtaaagtgaccgaggaaaataaggagctagcaaacgaactgcgcagaccccctctctgttaccacaatggagtccaatataggaacaacgaggagtggacagtggattcttgcaccgaatgtcattgccaaaattccgtaacgatctgtaaaaaggttagctgcccaattatgccgtgttcgaacgctactgtgcccgacggtgagtgctgccctcggtgttggccatctgattccgccgacgatggctggtcaccctggagtgaatggacaagctgctccacctcttgtgggaatggaatccagcagcgaggccgcagctgcgactcactgaacaatagatgtgagggtagttccgtccagactaggacatgccacatccaggaatgtgataaacggttcaagcaggacgggggctggagccactggtctccttggtcaagttgcagcgtgacctgtggagacggcgtcattacgcgcataagactttgcaactccccatctccccaaatgaatgggaaaccgtgtgagggagaggcgagggaaaccaaggcctgcaagaaagatgcatgccctatcaacggtggctgggggccctggtcgccatgggacatttgtagcgtgacatgcggaggcggtgttcagaagcgttcccggctgtgtaataaccctactccccagtttgggggcaaagattgcgtgggagacgtaaccgagaatcagatctgtaacaagcaagattgcccaatagacggctgtttgtcaaatccctgcttcgctggggtcaaatgtacaagttaccctgatggatcttggaagtgcggtgcctgtccaccgggctatagcgggaacgggattcagtgcactgacgtggatgaatgcaaggaggttcccgacgcttgtttcaatcataacggcgaacaccgatgcgagaacaccgatcctggttacaattgtctcccatgtccccctagatttacagggtcccagccattcggccagggagtggagcatgccaccgcaaacaaacaagtctgcaagcccaggaatccgtgcactgacggcacgcacgattgtaacaaaaatgccaagtgcaactatctggggcactactcagaccctatgtaccgctgtgaatgcaaaccaggatatgctggcaatggtatcatctgtggggaggacacagatttagacggatggcccaacgaaaatctggtgtgcgtagcgaacgcaacctaccattgcaagaaggataattgtcctaacctacccaatagcggccaggaggactatgataaagacggtattggcgatgcctgcgacgatgacgatgacaacgataagatcccagacgaccgggataattgtccttttcactacaaccccgctcagtatgactacgatagagacgatgtgggggacaggtgcgataactgtccatataatcataacccggaccaggccgatactgacaataacggagagggcgatgcatgcgccgctgacattgacggggatggaatactcaatgaacgcgacaactgtcaatacgtttacaatgtcgatcagcgagacaccgatatggacggcgtgggtgatcagtgcgacaactgtcctctggagcacaatcccgatcaacttgactctgattccgaccggatcggggatacatgcgacaacaatcaggacattgatgaagacggacatcagaacaatttggataactgtccatatgtgcccaatgccaaccaggcagaccacgataaagacggcaagggtgatgcgtgcgaccacgatgacgataacgacggcatccctgatgacaaagacaattgccgtctggtcccaaaccccgatcaaaaggacagtgatggggacggaagaggcgatgcttgtaaggacgatttcgaccatgatagcgttcctgacatcgatgacatttgcccggagaatgtggacatatctgaaaccgattttaggcgcttccagatgatcccactcgaccccaaagggacttcccagaacgatcctaattgggtggtacggcaccagggaaaggagctggtccaaacagtgaactgtgacccaggccttgccgttggttacgatgagtttaatgcagtggacttctcagggacgtttttcattaacaccgaaagagatgacgattatgccggatttgtcttcggctaccagagtagctcgaggttttatgtggttatgtggaaacaggtgactcagtcctactgggacacaaatcccacccgagctcaaggttattctggcctgagcgtaaaggtcgtgaactcaacaactgggcctggagagcatttgcgcaatgccctctggcacaccggcaacacgccgggacaggtgcggaccctgtggcacgatcccagacatatcggatggaaagacttcacagcatacaggtggcgtttaagtcaccgcccaaagactggcttcattcgggtcgttatgtacgaaggtaaaaagatcatggctgattccgggcctatatatgacaagacctacgccggaggcagactgggcctatttgtgttctctcaggagatggtatttttcagcgacctcaaatatgaatgcagggatccctga

SEQ ID NO: 7542 - RNA, 3513 nt, synthetic construct
  misc_feature 1..3513: note = derived and/or modified sequence opt4 fromTSP-1__Homo_sapiens__AAI36470
  source 1..3513: mol_type = other RNA
atgggcctggcctggggcctgggcgtgctgttcctgatgcacgtgtgcggcaccaacagaatccccgagagcggcggcgacaacagcgtgttcgacatcttcgagctgaccggcgccgccagaaagggcagcggcagaagactggtgaagggccccgaccccagcagccccgccttcagaatcgaggacgccaacctgatcccccccgtgcccgacgacaagttccaggacctggtggacgccgtgagagccgagaagggcttcctgctgctggccagcctgagacagatgaagaagaccagaggcaccctgctggccctggagagaaaggaccacagcggccaggtgttcagcgtggtgagcaacggcaaggccggcaccctggacctgagcctgaccgtgcagggcaagcagcacgtggtgagcgtggaggaggccctgctggccaccggccagtggaagagcatcaccctgttcgtgcaggaggacagagcccagctgtacatcgactgcgagaagatggagaacgccgagctggacgtgcccatccagagcgtgttcaccagagacctggccagcatcgccagactgagaatcgccaagggcggcgtgaacgacaacttccagggcgtgctgcagaacgtgagattcgtgttcggcaccacccccgaggacatcctgagaaacaagggctgcagcagcagcaccagcgtgctgctgaccctggacaacaacgtggtgaacggcagcagccccgccatcagaaccaactacatcggccacaagaccaaggacctgcaggccatctgcggcatcagctgcgacgagctgagcagcatggtgctggagctgagaggcctgagaaccatcgtgaccaccctgcaggacagcatcagaaaggtgaccgaggagaacaaggagctggccaacgagctgagaagaccccccctgtgctaccacaacggcgtgcagtacagaaacaacgaggagtggaccgtggacagctgcaccgagtgccactgccagaacagcgtgaccatctgcaagaaggtgagctgccccatcatgccctgcagcaacgccaccgtgcccgacggcgagtgctgccccagatgctggcccagcgacagcgccgacgacggctggagcccctggagcgagtggaccagctgcagcaccagctgcggcaacggcatccagcagagaggcagaagctgcgacagcctgaacaacagatgcgagggcagcagcgtgcagaccagaacctgccacatccaggagtgcgacaagagattcaagcaggacggcggctggagccactggagcccctggagcagctgcagcgtgacctgcggcgacggcgtgatcaccagaatcagactgtgcaacagccccagcccccagatgaacggcaagccctgcgagggcgaggccagagagaccaaggcctgcaagaaggacgcctgccccatcaacggcggctggggcccctggagcccctgggacatctgcagcgtgacctgcggcggcggcgtgcagaagagaagcagactgtgcaacaaccccaccccccagttcggcggcaaggactgcgtgggcgacgtgaccgagaaccagatctgcaacaagcaggactgccccatcgacggctgcctgagcaacccctgcttcgccggcgtgaagtgcaccagctaccccgacggcagctggaagtgcggcgcctgcccccccggctacagcggcaacggcatccagtgcaccgacgtggacgagtgcaaggaggtgcccgacgcctgcttcaaccacaacggcgagcacagatgcgagaacaccgaccccggctacaactgcctgccctgcccccccagattcaccggcagccagcccttcggccagggcgtggagcacgccaccgccaacaagcaggtgtgcaagcccagaaacccctgcaccgacggcacccacgactgcaacaagaacgccaagtgcaactacctgggccactacagcgaccccatgtacagatgcgagtgcaagcccggctacgccggcaacggcatcatctgcggcgaggacaccgacctggacggctggcccaacgagaacctggtgtgcgtggccaacgccacctaccactgcaagaaggacaactgccccaacctgcccaacagcggccaggaggactacgacaaggacggcatcggcgacgcctgcgacgacgacgacgacaacgacaagatccccgacgacagagacaactgccccttccactacaaccccgcccagtacgactacgacagagacgacgtgggcgacagatgcgacaactgcccctacaaccacaaccccgaccaggccgacaccgacaacaacggcgagggcgacgcctgcgccgccgacatcgacggcgacggcatcctgaacgagagagacaactgccagtacgtgtacaacgtggaccagagagacaccgacatggacggcgtgggcgaccagtgcgacaactgccccctggagcacaaccccgaccagctggacagcgacagcgacagaatcggcgacacctgcgacaacaaccaggacatcgacgaggacggccaccagaacaacctggacaactgcccctacgtgcccaacgccaaccaggccgaccacgacaaggacggcaagggcgacgcctgcgaccacgacgacgacaacgacggcatccccgacgacaaggacaactgcagactggtgcccaaccccgaccagaaggacagcgacggcgacggcagaggcgacgcctgcaaggacgacttcgaccacgacagcgtgcccgacatcgacgacatctgccccgagaacgtggacatcagcgagaccgacttcagaagattccagatgatccccctggaccccaagggcaccagccagaacgaccccaactgggtggtgagacaccagggcaaggagctggtgcagaccgtgaactgcgaccccggcctggccgtgggctacgacgagttcaacgccgtggacttcagcggcaccttcttcatcaacaccgagagagacgacgactacgccggcttcgtgttcggctaccagagcagcagcagattctacgtggtgatgtggaagcaggtgacccagagctactgggacaccaaccccaccagagcccagggctacagcggcctgagcgtgaaggtggtgaacagcaccaccggccccggcgagcacctgagaaacgccctgtggcacaccggcaacacccccggccaggtgagaaccctgtggcacgaccccagacacatcggctggaaggacttcaccgcctacagatggagactgagccacagacccaagaccggcttcatcagagtggtgatgtacgagggcaagaagatcatggccgacagcggccccatctacgacaagacctacgccggcggcagactgggcctgttcgtgttcagccaggagatggtgttcttcagcgacctgaagtacgagtgcagagacccctga

SEQ ID NO: 7543 - RNA, 3513 nt, synthetic construct
  misc_feature 1..3513: note = derived and/or modified sequence opt5 fromTSP-1__Homo_sapiens__AAI36470
  source 1..3513: mol_type = other RNA
atgggcctggcctgggggctcggagtgctgttccttatgcacgtctgcggcaccaacagaatccccgagagcgggggagacaattccgtttttgatattttcgaactgacaggcgctgcccggaaggggtctggacgcagactcgtgaaaggccctgacccgagctcccccgcgtttcggatcgaggatgctaacctgattcctcccgtgcctgacgataagttccaggaccttgtcgatgccgtgcgcgccgaaaaaggctttctgctcctggcttctctgagacaaatgaagaaaacgcgggggaccctcctggcccttgagcgcaaggaccatagcggacaggttttctccgtggtctctaatggcaaggctgggacactggatctcagcctgaccgtgcagggaaaacagcacgttgtgtccgtcgaagaggcccttctggcgacaggccaatggaaaagcatcaccctctttgtgcaggaggacagagcccagctgtacattgattgtgaaaagatggagaacgctgaactggacgtgcccatccagtctgtcttcacacgggatctcgcctccatcgctcgcctgagaattgccaaagggggagttaatgacaactttcaaggcgtgcttcagaatgtgcggttcgtctttggcaccacgcctgaggacatcctgcgcaacaaggggtgctcctcttccaccagcgtgctcctgacacttgataataacgttgtgaatggatcttccccggcgattagaaccaactatatcggccataagacaaaggacctgcaggccatttgtgggatcagctgcgatgagctctcctctatggtcctggaactgcggggactccgcaccattgtgacgacactgcaggacagcatcagaaaagttaccgaggaaaataaggagcttgctaacgaactgcggagaccccctctctgttaccacaatggcgtgcaatatcgcaacaacgaggagtggacagtcgattcctgcaccgaatgtcattgccagaatagcgtgaccatctgtaaaaaggtctcttgccccattatgccttgttccaacgccacagtgcccgacggggagtgctgcccgcggtgttggcctagcgattctgctgacgatggatggagcccctggtccgaatggacgtcttgcagcacctcctgtggcaatggcatccagcaaagagggcgcagctgcgactctctgaacaatcggtgtgagggatccagcgttcagacaagaacctgccacattcaggaatgtgataaacgcttcaagcaggacggcgggtggtctcactggtccccttggagctcctgctctgtgacatgtggagacggcgtcatcacccggattagactttgcaacagccccagcccccaaatgaatgggaaaccttgtgagggcgaggcccgcgaaacgaaggcctgcaagaaagatgcttgcccgatcaacggaggctgggggccctggtctccttgggacatctgtagcgtgacatgcggaggcggggttcagaagcggtccagactgtgtaataaccccacccctcagtttggaggcaaagattgcgtgggggacgtcaccgagaatcagatttgtaacaagcaagattgccccatcgacggctgtctcagcaatccgtgcttcgcgggagtgaaatgtacatcttaccctgatggctcctggaagtgcggggcctgtccccctggatatagcggcaacgggattcagtgcaccgacgtggatgaatgcaaggaggttcccgacgcttgtttcaatcataacggagaacaccgctgcgagaacacagatcctggctacaattgtctgccctgcccgcctcggtttacggggtctcagcccttcggccagggagtcgagcatgccaccgccaacaaacaagtgtgtaagcccagaaatccttgcacagacggcacccacgattgtaacaaaaatgctaagtgcaactatctggggcactactccgacccgatgtaccggtgtgaatgcaaacccggatatgccggcaatgggatcatttgtggagaggacacagatctcgacggctggcctaacgaaaatctggtgtgcgtcgcgaacgctacctaccattgcaagaaggataattgtcccaaccttcctaatagcgggcaggaggactatgataaagacggcatcggagatgcctgcgacgatgacgatgacaacgataagatccccgacgaccgcgataattgtccttttcactacaaccccgcccagtatgactacgatagagacgatgtgggcgaccggtgcgataactgtccgtataatcataaccctgaccaggctgatacggacaataacggggagggagatgcctgcgctgccgacattgacggcgatgggatcctgaatgaaagagacaactgtcaatacgtttacaatgtggatcagcgcgacaccgatatggacggagtcggcgatcagtgcgacaactgtcccctcgagcacaatcctgatcaactggactctgatagcgaccggattggcgatacatgcgacaacaatcaggacatcgatgaagacgggcatcagaacaatctggataactgtccctatgtgccgaatgcgaaccaggccgaccacgataaagacggaaagggcgatgcttgcgaccacgatgacgataacgacgggattcctgatgacaaagacaattgcagacttgttcccaaccctgatcaaaaggactccgatggagacggccgcggggatgcctgtaaggacgatttcgaccatgatagcgtgcccgacatcgatgacatttgccccgagaatgtcgacatctctgaaaccgattttagacggttccagatgatccctctcgacccgaaaggaacatcccagaacgatcccaattgggtggttcgccaccagggcaaggagctggtgcaaaccgtcaactgtgaccctggcctggctgtggggtacgatgagtttaatgccgtggacttcagcggaacgtttttcattaacacagaaagagatgacgattatgcgggctttgtcttcgggtaccagtcctctagccggttttatgttgtgatgtggaaacaggtgacccagtcctactgggacacaaatcccacccgcgcccaaggatattctggcctcagcgtcaaggtggttaactccaccacagggcctggagagcatctgagaaatgctctttggcacacgggcaacacccccggccaggtgcggacactgtggcacgatcctcgccatatcgggtggaaagacttcaccgcctacagatggcggctctctcaccgcccgaagacaggattcattagagtcgtgatgtacgaaggcaaaaagatcatggctgatagcgggcccatttatgacaagacctacgccggaggccggctggggctgtttgttttctcccaggagatggtgtttttcagcgaccttaaatatgaatgcagagatccttga

SEQ ID NO: 7544 - RNA, 3513 nt, synthetic construct
  misc_feature 1..3513: note = derived and/or modified sequence opt6 fromTSP-1__Homo_sapiens__AAI36470
  source 1..3513: mol_type = other RNA
atgggtttagcttggggtctaggtgtattatttttgatgcatgtatgtggaacaaatagaataccagaatcgggaggagataattcagtattcgacatatttgaattaacaggagcagcaagaaaaggcagcggaagaagacttgttaagggacctgacccaagtagtcccgcatttcgtatagaggatgctaatctaattccaccagtaccagatgataaatttcaagatttagtcgatgcagttagagctgaaaaaggtttcttattattagcaagcttaagacaaatgaagaaaacaagaggtacattactggcattggaaaggaaagaccacagcgggcaagtattctcagtagtatctaatggaaaggccggaactttagatttaagtttgacagtccaaggaaagcaacacgtagtatcggttgaagaggccctattagctacaggacagtggaaatcgatcacattatttgtacaagaagatcgagcacaattatatatagattgtgaaaaaatggaaaacgcagaattggacgtcccaattcaatctgtatttacacgagatttggcatccatcgcaagactacgaatagctaagggaggagttaacgataacttccaaggtgtactacaaaatgttagatttgtattcgggacaacaccagaagacattttaaggaataaaggttgctcaagtagtactagtgtattattaacgttggataacaacgtagtaaacgggagttcacccgctattcgaactaattatatcggacacaaaaccaaagacttacaagcaatttgtggtatatcatgcgatgaattgagctcgatggtattggaactcagaggtttacgaacaatcgttacaacacttcaagatagcataagaaaagtaacagaagaaaacaaagaactagcaaatgaactccgacgaccaccgttatgctaccataacggcgtacaatatagaaacaacgaagaatggactgttgattcatgtacggaatgtcactgtcaaaattctgtaacaatatgtaagaaagtatcgtgtccaattatgccatgttctaatgctacagttcccgacggagaatgttgcccccgatgttggccaagtgattcagcagatgatggctggtcgccatggagcgaatggacaagctgctcaacatcttgtggtaatggtatacaacaacgtggaagatcatgtgattctttaaataatcgttgcgaaggaagttctgtgcaaactcgtacatgtcatatccaagaatgtgataaacgcttcaaacaagacggaggatggtctcactggagtccatggagctcatgcagcgtaacatgtggagacggcgtaattaccagaattaggctatgtaatagtccaagcccgcaaatgaatgggaaaccctgtgaaggagaagcaagagaaacaaaagcttgtaaaaaagatgcctgtccaataaatgggggatggggaccgtggtcaccatgggacatatgctcggtcacatgcggcggaggggtccaaaaaaggtctaggctatgcaacaatccaacaccacaatttggaggaaaagattgtgtcggagatgtaaccgaaaatcaaatatgtaacaagcaagattgtccaatagatggatgtttatcaaatccatgctttgcaggagtaaagtgcacttcatatccagacggaagttggaaatgtggagcttgccctccaggatattcaggaaacggtattcaatgcacagatgtagacgaatgtaaagaagtacctgacgcatgtttcaatcacaatggagaacacagatgcgagaataccgatcctgggtataactgtctaccatgtccaccaagattcactggaagtcagccttttggacaaggagtagaacatgcgacagcaaacaaacaggtatgtaaacctagaaacccgtgcacggacggaacacatgattgcaataaaaacgcgaaatgtaattacttaggtcattattctgatcctatgtacagatgtgaatgcaaacctggatatgcaggaaacggtataatatgtggcgaagacacagatttagatggttggccaaacgaaaacttggtatgtgtggcaaatgcgacatatcattgtaaaaaagataactgcccaaatctacctaatagcggtcaagaagactatgacaaagatggtataggagacgcctgtgatgacgacgacgataatgataaaatacctgacgatcgggataactgtccattccactacaatcccgctcaatatgattatgacagggatgacgtaggggatcgatgtgataactgtccatacaaccataacccagatcaagcagatactgataacaacggtgaaggtgatgcatgtgcagcagatatagatggagacggtatattaaacgagcgagacaattgtcagtacgtttataacgttgaccaaagagatacagacatggatggtgtaggagatcaatgtgataactgtcccctagaacacaatccagaccaacttgacagtgatagtgaccggattggcgacacatgtgataacaaccaagatatagatgaagatggacatcaaaataacctagataattgtccgtacgtaccaaatgcaaatcaagcagatcatgataaagatggtaaaggagacgcttgtgaccatgatgatgataacgatggcattcctgatgataaagacaattgcagactagtaccaaatcccgatcaaaaagatagcgatggagacgggagaggtgatgcttgcaaagatgattttgaccatgactcagttccagatatagatgatatttgtccagaaaatgttgacatatctgaaacagattttcgaagattccaaatgataccgctagacccaaaaggaacttcacaaaatgatccaaattgggtagtaagacatcaaggaaaagagctagtacaaacagtaaattgcgatccagggctagctgtagggtatgacgaatttaatgcagtagatttctcaggaaccttttttatcaatactgaaagagatgacgattatgctggatttgtatttggctatcagtcaagcagcagattttacgtagtaatgtggaaacaagttactcaaagctattgggatacaaatccaacaagagcacaaggatactcaggacttagcgtaaaagttgtaaactcaacaacaggtccaggagaacacctcagaaatgcactttggcatacaggtaatacaccgggtcaagtgagaacactttggcacgatcctagacatataggatggaaagatttcacagcataccgatggcgattatcacacagaccaaagacaggatttataagagtagtaatgtatgagggaaagaaaataatggcagattccggaccaatatatgataagacctatgccggaggaagattaggattatttgtattcagccaagaaatggtattcttcagcgacttgaaatatgaatgtagagatccataa

SEQ ID NO: 7545 - protein, 1172 aa, synthetic construct
  REGION 1..1172: note = TSP-2__Homo_sapiens__P35442
MVWRLVLLALWVWPSTQAGHQDKDTTFDLFSISNINRKTIGAKQFRGPDPGVPAYRFVRFDYIPPVNADDLSKITKIMRQKEGFFLTAQLKQDGKSRGTLLALEGPGLSQRQFEIVSNGPADTLDLTYWIDGTRHVVSLEDVGLADSQWKNVTVQVAGETYSLHVGCDLIDSFALDEPFYEHLQAEKSRMYVAKGSARESHFRGLLQNVHLVFENSVEDILSKKGCQQGQGAEINAISENTETLRLGPHVTTEYVGPSSERRPEVCERSCEELGNMVQELSGLHVLVNQLSENLKRVSNDNQFLWELIGGPPKTRNMSACWQDGRFFAENETWVVDSCTTCTCKKFKTICHQITCPPATCASPSFVEGECCPSCLHSVDGEEGWSPWAEWTQCSVTCGSGTQQRGRSCDVTSNTCLGPSIQTRACSLSKCDTRIRQDGGWSHWSPWSSCSVTCGVGNITRIRLCNSPVPQMGGKNCKGSGRETKACQGAPCPIDGRWSPWSPWSACTVTCAGGIRERTRVCNSPEPQYGGKACVGDVQERQMCNKRSCPVDGCLSNPCFPGAQCSSFPDGSWSCGSCPVGFLGNGTHCEDLDECALVPDICFSTSKVPRCVNTQPGFHCLPCPPRYRGNQPVGVGLEAAKTEKQVCEPENPCKDKTHNCHKHAECIYLGHFSDPMYKCECQTGYAGDGLICGEDSDLDGWPNLNLVCATNATYHCIKDNCPHLPNSGQEDFDKDGIGDACDDDDDNDGVTDEKDNCQLLFNPRQADYDKDEVGDRCDNCPYVHNPAQIDTDNNGEGDACSVDIDGDDVFNERDNCPYVYNTDQRDTDGDGVGDHCDNCPLVHNPDQTDVDNDLVGDQCDNNEDIDDDGHQNNQDNCPYISNANQADHDRDGQGDACDPDDDNDGVPDDRDNCRLVFNPDQEDLDGDGRGDICKDDFDNDNIPDIDDVCPENNAISETDFRNFQMVPLDPKGTTQIDPNWVIRHQGKELVQTANSDPGIAVGFDEFGSVDFSGTFYVNTDRDDDYAGFVFGYQSSSRFYVVMWKQVTQTYWEDQPTRAYGYSGVSLKVVNSTTGTGEHLRNALWHTGNTPGQVRTLWHDPRNIGWKDYTAYRWHLTHRPKTGYIRVLVHEGKQVMADSGPIYDQTYAGGRLGLFVFSQEMVYFSDLKYECRDI

SEQ ID NO: 7546 - RNA, 3519 nt, synthetic construct
  misc_feature 1..3519: note = TSP-2__Homo_sapiens__BAF85118
  source 1..3519: mol_type = other RNA
atggtctggaggctggtcctgctggctctgtgggtgtggcccagcacgcaagctggtcaccaggacaaagacacgaccttcgaccttttcagtatcagcaacatcaaccgcaagaccattggcgccaagcagttccgcgggcccgaccccggcgtgccggcttaccgcttcgtgcgctttgactacatcccaccggtgaacgcagatgacctcagcaagatcaccaagatcatgcggcagaaggagggcttcttcctcacggcccagctcaagcaggacggcaagtccaggggcacgctgttggctctggagggccccggtctctcccagaggcagttcgagatcgtctccaatggccccgcggacacgctggatctcacctactggattgacggcacccggcatgtggtctccctggaggacgtcggcctggctgactcgcagtggaagaacgtcaccgtgcaggtggctggcgagacctacagcttgcacgtgggctgcgacctcatagacagcttcgctctggacgagcccttctacgagcacctgcaggcggaaaagagccggatgtacgtggccaaaggctctgccagagagagtcacttcaggggtttgcttcagaacgtccacctagtgtttgaaaactctgtggaagatattctaagcaagaagggttgccagcaaggccagggagctgagatcaacgccatcagtgagaacacagagacgctgcgcctgggtccgcatgtcaccaccgagtacgtgggccccagctcggagaggaggcccgaggtgtgcgaacgctcgtgcgaggagctgggaaacatggtccaggagctctcggggctccacgtcctcgtgaaccagctcagcgagaacctcaagagagtgtcgaatgataaccagtttctctgggagctcattggtggccctcctaagacaaggaacatgtcagcttgctggcaggatggccggttctttgcggaaaatgaaacgtgggtggtggacagctgcaccacgtgtacctgcaagaaatttaaaaccatttgccaccaaatcacctgcccgcctgcaacctgcgccagtccatcctttgtggaaggcgaatgctgcccttcctgcctccactcggtggacggtgaggagggctggtctccgtgggcagagtggacccagtgctccgtgacgtgtggctctgggacccagcagagaggccggtcctgtgacgtcaccagcaacacctgcttggggccctccatccagacacgggcttgcagtctgagcaagtgtgacacccgcatccggcaggacggcggctggagccactggtcaccttggtcttcatgctctgtgacctgtggagttggcaatatcacacgcatccgtctctgcaactccccagtgccccagatggggggcaagaattgcaaagggagtggccgggagaccaaagcctgccagggcgccccatgcccaatcgatggccgctggagcccctggtccccgtggtcggcctgcactgtcacctgtgccggtgggatccgggagcgcacccgggtctgcaacagccctgagcctcagtacggagggaaggcctgcgtgggggatgtgcaggagcgtcagatgtgcaacaagaggagctgccccgtggatggctgtttatccaacccctgcttcccgggagcccagtgcagcagcttccccgatgggtcctggtcatgcggctcctgccctgtgggcttcttgggcaatggcacccactgtgaggacctggacgagtgtgccctggtccccgacatctgcttctccaccagcaaggtgcctcgctgtgtcaacactcagcctggcttccactgcctgccctgcccgccccgatacagagggaaccagcccgtcggggtcggcctggaagcagccaagacggaaaagcaagtgtgtgagcccgaaaacccatgcaaggacaagacacacaactgccacaagcacgcggagtgcatctacctgggccacttcagcgaccccatgtacaagtgcgagtgccagacaggctacgcgggcgacgggctcatctgcggggaggactcggacctggacggctggcccaacctcaatctggtctgcgccaccaacgccacctaccactgcatcaaggataactgcccccatctgccaaattctgggcaggaagactttgacaaggacgggattggcgatgcctgtgatgatgacgatgacaatgacggtgtgaccgatgagaaggacaactgccagctcctcttcaatccccgccaggctgactatgacaaggatgaggttggggaccgctgtgacaactgcccttacgtgcacaaccctgcccagatcgacacagacaacaatggagagggtgacgcctgctccgtggacattgatggggacgatgtcttcaatgaacgagacaattgtccctacgtctacaacactgaccagagggacacggatggtgacggtgtgggggatcactgtgacaactgccccctggtgcacaaccctgaccagaccgacgtggacaatgaccttgttggggaccagtgtgacaacaacgaggacatagatgacgacggccaccagaacaaccaggacaactgcccctacatctccaacgccaaccaggctgaccatgacagagacggccagggcgacgcctgtgaccctgatgatgacaacgatggcgtccccgatgacagggacaactgccggcttgtgttcaacccagaccaggaggacttggacggtgatggacggggtgatatttgtaaagatgattttgacaatgacaacatcccagatattgatgatgtgtgtcctgaaaacaatgccatcagtgagacagacttcaggaacttccagatggtccccttggatcccaaagggaccacccaaattgatcccaactgggtcattcgccatcaaggcaaggagctggttcagacagccaactcggaccccggcatcgctgtaggttttgacgagtttgggtctgtggacttcagtggcacattctacgtaaacactgaccgggacgacgactatgccggcttcgtctttggttaccagtcaagcagccgcttctatgtggtgatgtggaagcaggtgacgcagacctactgggaggaccagcccacgcgggcctatggctactccggcgtgtccctcaaggtggtgaactccaccacggggacgggcgagcacctgaggaacgcgctgtggcacacggggaacacgccggggcaggtgcgaaccttatggcacgaccccaggaacattggctggaaggactacacggcctataggtggcacctgactcacaggcccaagactggctacatcagagtcttagtgcatgaaggaaaacaggtcatggcagactcaggacctatctatgaccaaacctacgctggcgggcggctgggtctatttgtcttctctcaagaaatggtctatttctcagacctcaagtacgaatgcagagatatttaa

SEQ ID NO: 7547 - RNA, 3519 nt, synthetic construct
  misc_feature 1..3519: note = derived and/or modified sequence opt1 fromTSP-2__Homo_sapiens__BAF85118
  source 1..3519: mol_type = other RNA
atggtgtggcgcctggtcctcctggccctgtgggtgtggcccagcacccaggccggccaccaggacaaggacaccacgttcgacctcttctccatcagcaacatcaaccggaagaccatcggggcgaagcagttccgcggcccggaccccggggtgcccgcctaccggttcgtccgcttcgactacatcccgcccgtgaacgccgacgacctgtccaagatcaccaagatcatgcggcagaaggagggcttcttcctgaccgcccagctcaagcaggacggcaagagccgcgggacgctgctggccctcgagggccccgggctgtcccagcggcagttcgagatcgtgagcaacggccccgcggacaccctggacctcacctactggatcgacgggacccgccacgtcgtgtccctggaggacgtgggcctggccgacagccagtggaagaacgtcacggtccaggtggccggggagacctactccctccacgtgggctgcgacctgatcgacagcttcgccctggacgagcccttctacgagcacctccaggcggagaagtcccggatgtacgtggccaagggcagcgcccgcgagtcccacttccgggggctgctgcagaacgtgcacctcgtcttcgagaacagcgtggaggacatcctgtccaagaagggctgccagcaggggcagggcgccgagatcaacgccatcagcgagaacaccgagaccctgcgcctcggcccgcacgtgacgaccgagtacgtcgggccctccagcgagcggcgccccgaggtgtgcgagcggtcctgcgaggagctgggcaacatggtgcaggagctgagcgggctccacgtcctggtgaaccagctgagcgagaacctcaagcgcgtgtccaacgacaaccagttcctgtgggagctgatcggcgggcccccgaagacccggaacatgagcgcgtgctggcaggacggccgcttcttcgccgagaacgagacctgggtcgtggactcctgcacgacctgcacgtgcaagaagttcaagaccatctgccaccagatcacgtgcccgcccgcgacctgcgccagcccctccttcgtcgagggcgagtgctgccccagctgcctccactccgtggacggggaggagggctggagcccctgggccgagtggacccagtgctccgtgacctgcgggagcggcacccagcagcgggggcgctcctgcgacgtcaccagcaacacgtgcctgggcccctccatccagacccgggcgtgcagcctgtccaagtgcgacacccgcatccgccaggacggcgggtggagccactggtccccctggagctcctgcagcgtgacctgcggcgtggggaacatcacccggatccgcctctgcaacagcccggtcccccagatgggcgggaagaactgcaagggctccggccgggagaccaaggcctgccagggggccccctgccccatcgacggccgctggagcccgtggtccccctggagcgcctgcacggtgacctgcgccgggggcatccgggagcgcacccgggtgtgcaactcccccgagccccagtacggcgggaaggcgtgcgtcggcgacgtgcaggagcgccagatgtgcaacaagcggagctgcccggtggacgggtgcctgtccaacccctgcttccccggcgcccagtgcagctccttcccggacgggagctggtcctgcggcagctgccccgtcggcttcctggggaacggcacccactgcgaggacctcgacgagtgcgccctggtgcccgacatctgcttctccacgagcaaggtgccccgctgcgtcaacacccagccggggttccactgcctgccctgcccgccccggtaccgcggcaaccagcccgtgggggtgggcctcgaggccgccaagaccgagaagcaggtctgcgagcccgagaacccctgcaaggacaagacccacaactgccacaagcacgcggagtgcatctacctgggccacttctccgaccccatgtacaagtgcgagtgccagaccgggtacgccggcgacgggctgatctgcggcgaggacagcgacctcgacgggtggccgaacctgaacctggtgtgcgccacgaacgccacctaccactgcatcaaggacaactgcccccacctccccaactccggccaggaggacttcgacaaggacggcatcggggacgcgtgcgacgacgacgacgacaacgacggcgtgaccgacgagaaggacaactgccagctgctgttcaacccccggcaggccgactacgacaaggacgaggtcggggaccgctgcgacaactgcccgtacgtgcacaaccccgcccagatcgacaccgacaacaacggcgagggggacgcctgcagcgtggacatcgacggcgacgacgtcttcaacgagcgggacaactgcccctacgtgtacaacacggaccagcgcgacaccgacggcgacggggtgggcgaccactgcgacaactgccccctggtccacaacccggaccagaccgacgtggacaacgacctcgtgggggaccagtgcgacaacaacgaggacatcgacgacgacggccaccagaacaaccaggacaactgcccctacatcagcaacgccaaccaggcggaccacgaccgggacggccagggggacgcctgcgaccccgacgacgacaacgacggcgtccccgacgaccgcgacaactgccggctggtgttcaacccggaccaggaggacctggacggggacggccgcggggacatctgcaaggacgacttcgacaacgacaacatccccgacatcgacgacgtgtgccccgagaacaacgccatctccgagaccgacttccgcaacttccagatggtcccgctcgaccccaagggcacgacccagatcgaccccaactgggtgatccggcaccagggcaaggagctggtgcagaccgccaacagcgaccccgggatcgccgtcggcttcgacgagttcgggtccgtggacttcagcggcaccttctacgtgaacacggaccgcgacgacgactacgcggggttcgtcttcggctaccagtccagctcccggttctacgtggtgatgtggaagcaggtcacccagacctactgggaggaccagccgacccgcgcctacggctacagcggggtgtccctgaaggtggtcaacagcacgaccggcaccggggagcacctccggaacgccctgtggcacaccggcaacacgcccggccaggtgcgcaccctgtggcacgacccccggaacatcgggtggaaggactacaccgcctaccgctggcacctcacccaccggcccaagacgggctacatccgcgtgctggtccacgaggggaagcaggtcatggccgactccggcccgatctacgaccagacctacgccgggggccggctgggcctcttcgtgttcagccaggagatggtgtacttctccgacctgaagtacgagtgccgcgacatctga

SEQ ID NO: 7548 - RNA, 3519 nt, synthetic construct
  misc_feature 1..3519: note = derived and/or modified sequence opt2 fromTSP-2__Homo_sapiens__BAF85118
  source 1..3519: mol_type = other RNA
atggtctggcgcctcgtcctcctcgccctctgggtctggccctccacccaggccggccaccaggacaaggacaccaccttcgacctcttctccatctccaacatcaaccgcaagaccatcggcgccaagcagttccgcggccccgaccccggcgtccccgcctaccgcttcgtccgcttcgactacatcccccccgtcaacgccgacgacctctccaagatcaccaagatcatgcgccagaaggagggcttcttcctcaccgcccagctcaagcaggacggcaagtcccgcggcaccctcctcgccctcgagggccccggcctctcccagcgccagttcgagatcgtctccaacggccccgccgacaccctcgacctcacctactggatcgacggcacccgccacgtcgtctccctcgaggacgtcggcctcgccgactcccagtggaagaacgtcaccgtccaggtcgccggcgagacctactccctccacgtcggctgcgacctcatcgactccttcgccctcgacgagcccttctacgagcacctccaggccgagaagtcccgcatgtacgtcgccaagggctccgcccgcgagtcccacttccgcggcctcctccagaacgtccacctcgtcttcgagaactccgtcgaggacatcctctccaagaagggctgccagcagggccagggcgccgagatcaacgccatctccgagaacaccgagaccctccgcctcggcccccacgtcaccaccgagtacgtcggcccctcctccgagcgccgccccgaggtctgcgagcgctcctgcgaggagctcggcaacatggtccaggagctctccggcctccacgtcctcgtcaaccagctctccgagaacctcaagcgcgtctccaacgacaaccagttcctctgggagctcatcggcggcccccccaagacccgcaacatgtccgcctgctggcaggacggccgcttcttcgccgagaacgagacctgggtcgtcgactcctgcaccacctgcacctgcaagaagttcaagaccatctgccaccagatcacctgcccccccgccacctgcgcctccccctccttcgtcgagggcgagtgctgcccctcctgcctccactccgtcgacggcgaggagggctggtccccctgggccgagtggacccagtgctccgtcacctgcggctccggcacccagcagcgcggccgctcctgcgacgtcacctccaacacctgcctcggcccctccatccagacccgcgcctgctccctctccaagtgcgacacccgcatccgccaggacggcggctggtcccactggtccccctggtcctcctgctccgtcacctgcggcgtcggcaacatcacccgcatccgcctctgcaactcccccgtcccccagatgggcggcaagaactgcaagggctccggccgcgagaccaaggcctgccagggcgccccctgccccatcgacggccgctggtccccctggtccccctggtccgcctgcaccgtcacctgcgccggcggcatccgcgagcgcacccgcgtctgcaactcccccgagccccagtacggcggcaaggcctgcgtcggcgacgtccaggagcgccagatgtgcaacaagcgctcctgccccgtcgacggctgcctctccaacccctgcttccccggcgcccagtgctcctccttccccgacggctcctggtcctgcggctcctgccccgtcggcttcctcggcaacggcacccactgcgaggacctcgacgagtgcgccctcgtccccgacatctgcttctccacctccaaggtcccccgctgcgtcaacacccagcccggcttccactgcctcccctgccccccccgctaccgcggcaaccagcccgtcggcgtcggcctcgaggccgccaagaccgagaagcaggtctgcgagcccgagaacccctgcaaggacaagacccacaactgccacaagcacgccgagtgcatctacctcggccacttctccgaccccatgtacaagtgcgagtgccagaccggctacgccggcgacggcctcatctgcggcgaggactccgacctcgacggctggcccaacctcaacctcgtctgcgccaccaacgccacctaccactgcatcaaggacaactgcccccacctccccaactccggccaggaggacttcgacaaggacggcatcggcgacgcctgcgacgacgacgacgacaacgacggcgtcaccgacgagaaggacaactgccagctcctcttcaacccccgccaggccgactacgacaaggacgaggtcggcgaccgctgcgacaactgcccctacgtccacaaccccgcccagatcgacaccgacaacaacggcgagggcgacgcctgctccgtcgacatcgacggcgacgacgtcttcaacgagcgcgacaactgcccctacgtctacaacaccgaccagcgcgacaccgacggcgacggcgtcggcgaccactgcgacaactgccccctcgtccacaaccccgaccagaccgacgtcgacaacgacctcgtcggcgaccagtgcgacaacaacgaggacatcgacgacgacggccaccagaacaaccaggacaactgcccctacatctccaacgccaaccaggccgaccacgaccgcgacggccagggcgacgcctgcgaccccgacgacgacaacgacggcgtccccgacgaccgcgacaactgccgcctcgtcttcaaccccgaccaggaggacctcgacggcgacggccgcggcgacatctgcaaggacgacttcgacaacgacaacatccccgacatcgacgacgtctgccccgagaacaacgccatctccgagaccgacttccgcaacttccagatggtccccctcgaccccaagggcaccacccagatcgaccccaactgggtcatccgccaccagggcaaggagctcgtccagaccgccaactccgaccccggcatcgccgtcggcttcgacgagttcggctccgtcgacttctccggcaccttctacgtcaacaccgaccgcgacgacgactacgccggcttcgtcttcggctaccagtcctcctcccgcttctacgtcgtcatgtggaagcaggtcacccagacctactgggaggaccagcccacccgcgcctacggctactccggcgtctccctcaaggtcgtcaactccaccaccggcaccggcgagcacctccgcaacgccctctggcacaccggcaacacccccggccaggtccgcaccctctggcacgacccccgcaacatcggctggaaggactacaccgcctaccgctggcacctcacccaccgccccaagaccggctacatccgcgtcctcgtccacgagggcaagcaggtcatggccgactccggccccatctacgaccagacctacgccggcggccgcctcggcctcttcgtcttctcccaggagatggtctacttctccgacctcaagtacgagtgccgcgacatctga

SEQ ID NO: 7549 - RNA, 3519 nt, synthetic construct
  misc_feature 1..3519: note = derived and/or modified sequence opt3 fromTSP-2__Homo_sapiens__BAF85118
  source 1..3519: mol_type = other RNA
atggtgtggagactggtcctccttgccctgtgggtttggcccagcacccaggctggccaccaagacaaggatacaactttcgacttgttttccatctctaacattaataggaaaacgataggggcaaagcagttccggggacctgatccaggtgtgccggcctaccgctttgtacgattcgactatatcccacctgtgaacgcggatgacttatcaaaaattaccaagatcatgcgtcagaaagagggctttttcctgacagctcagctaaagcaagatgggaagagtagaggaactctcctggcccttgaaggcccaggtctgagccagaggcagtttgagattgtctccaatgggcccgcagacaccttggatctcacatactggatcgacggaacccggcatgtggtttctctggaagatgtgggcctggccgactcgcagtggaaaaacgtcactgtgcaagtagctggcgagacatattcactccacgttgggtgcgatttaatagacagcttcgcactggacgaacctttttacgagcatcttcaggccgagaagagtcgcatgtatgtggctaaaggatccgccagagaatctcacttcaggggtttgctgcagaatgtccatctagtgtttgagaacagcgtggaagatatcctctccaagaaaggctgtcagcaagggcagggagcggagattaatgcaatctcagagaacaccgaaacgctgcggcttggcccacacgtcactaccgagtacgttggtcccagtagcgaacgccgacctgaggtgtgcgaaagatcttgtgaggagctggggaatatggtacaggaattgtccggactccacgtgctggtcaaccaattatcagagaatctgaagagggtgagcaacgacaatcagttcctctgggaacttattggcggcccaccgaagacacggaacatgagtgcctgctggcaggatgggcgctttttcgctgagaatgaaacttgggttgtggactcttgtaccacatgcacctgtaaaaagttcaaaacgatctgccatcagataacttgtccccctgccacatgcgcatcccccagctttgtcgagggagagtgttgcccctcgtgcctgcactctgtggatggtgaagagggctggtccccttgggctgaatggacccaatgttcagtaacttgcgggagtggaacacagcagcgtggcagaagctgtgacgttacctccaacacgtgcttgggtccatctattcagaccagggcctgtagcctatcaaagtgcgatacacggatccgacaagacgggggctggagtcattggtccccctggagctcttgttcagtgacttgcggagtcggcaacattacccgcatcagactgtgtaatagtccggtgcctcagatgggagggaaaaactgcaagggtagcggcagggagacaaaagcgtgtcagggggccccctgcccaatcgatggacggtggtccccttggtctccctggtcggcatgcactgtcacctgtgctggcggtattcgcgaaagaacaagggtgtgcaatagcccagagccccagtatgggggcaaggcctgtgttggagacgtgcaagagcgtcagatgtgcaacaagcggtcctgtcctgtagatggctgcctctcaaatccatgtttcccgggggctcagtgcagttcttttcccgacggaagctggtcctgtggttcatgccctgtcggcttcctggggaacggaacccactgtgaagaccttgatgagtgcgccctggtgccagacatatgctttagcacttctaaagttccccgatgtgtgaatacgcagcctggcttccactgcttgccatgtcccccgagatacaggggtaaccaacctgtcggggtgggcctcgaagcagccaagacagagaaacaggtatgcgagccagaaaatccctgtaaggataaaacccataactgccacaagcatgctgagtgtatctacctgggacacttttccgaccctatgtataagtgcgaatgtcagactggctacgcgggggatggattaatttgcggcgaggacagtgatctggacggttggcccaatctaaacctcgtgtgtgcaaccaatgccacatatcattgcatcaaagataactgcccacatctgcctaatagcgggcaagaagacttcgataaggacggaataggcgatgcttgtgacgacgatgacgataacgacggtgttaccgatgagaaagacaactgccagcttttgtttaatccccgccaggccgattacgacaaggatgaggtcggcgaccggtgtgataactgcccatatgtgcacaatccggcacagattgacactgataacaatggggaaggagacgcctgttctgtggacatcgatggcgacgatgtcttcaacgagagagacaattgcccttacgtttataacacagatcaaagggacacggatggggacggagtgggcgatcactgtgacaattgccccctggtgcacaacccagatcagaccgacgtagacaatgatctcgtcggtgaccagtgtgataacaatgaagacatcgatgacgatgggcatcagaacaatcaagacaactgcccctacatttccaacgctaatcaggccgatcacgaccgcgatggacagggcgacgcatgtgatcctgacgacgataacgacggtgtgccagatgaccgagataattgccggctggtttttaaccccgaccaggaggatcttgacggcgatgggcgtggagacatctgcaaagatgacttcgataatgacaacattcctgacatagatgacgtgtgtccggaaaataacgcgatctcagagactgattttagaaatttccaaatggtcccactggaccccaagggcacaacccagattgatcctaactgggtgatcaggcaccaggggaaggagttggttcaaacagctaatagtgacccaggaatcgccgtgggcttcgatgaatttggtagcgtagacttctcggggactttttacgtcaacaccgatcgcgacgatgactatgcaggattcgtgtttggctaccagtcctctagccggttctatgtggtcatgtggaaacaggttacgcagacctactgggaggaccaacccacaagagcctatggttactcaggcgtgagtctcaaggtagtgaactccactaccgggacaggagaacatctgaggaatgctttatggcacactggcaatacccctgggcaggtccgaacgctgtggcatgatccgcgcaacattggatggaaagactatacagcctaccggtggcacctaacccatagacccaagactggctacataagggtgctcgttcacgagggtaaacaggtgatggcagattctgggccaatctatgaccagacatacgctggaggccgtctgggcctttttgtcttcagccaagaaatggtgtatttttccgatttgaagtacgagtgccgcgacatttga

SEQ ID NO: 7550 - RNA, 3519 nt, synthetic construct
  misc_feature 1..3519: note = derived and/or modified sequence opt4 fromTSP-2__Homo_sapiens__BAF85118
  source 1..3519: mol_type = other RNA
atggtgtggagactggtgctgctggccctgtgggtgtggcccagcacccaggccggccaccaggacaaggacaccaccttcgacctgttcagcatcagcaacatcaacagaaagaccatcggcgccaagcagttcagaggccccgaccccggcgtgcccgcctacagattcgtgagattcgactacatcccccccgtgaacgccgacgacctgagcaagatcaccaagatcatgagacagaaggagggcttcttcctgaccgcccagctgaagcaggacggcaagagcagaggcaccctgctggccctggagggccccggcctgagccagagacagttcgagatcgtgagcaacggccccgccgacaccctggacctgacctactggatcgacggcaccagacacgtggtgagcctggaggacgtgggcctggccgacagccagtggaagaacgtgaccgtgcaggtggccggcgagacctacagcctgcacgtgggctgcgacctgatcgacagcttcgccctggacgagcccttctacgagcacctgcaggccgagaagagcagaatgtacgtggccaagggcagcgccagagagagccacttcagaggcctgctgcagaacgtgcacctggtgttcgagaacagcgtggaggacatcctgagcaagaagggctgccagcagggccagggcgccgagatcaacgccatcagcgagaacaccgagaccctgagactgggcccccacgtgaccaccgagtacgtgggccccagcagcgagagaagacccgaggtgtgcgagagaagctgcgaggagctgggcaacatggtgcaggagctgagcggcctgcacgtgctggtgaaccagctgagcgagaacctgaagagagtgagcaacgacaaccagttcctgtgggagctgatcggcggcccccccaagaccagaaacatgagcgcctgctggcaggacggcagattcttcgccgagaacgagacctgggtggtggacagctgcaccacctgcacctgcaagaagttcaagaccatctgccaccagatcacctgcccccccgccacctgcgccagccccagcttcgtggagggcgagtgctgccccagctgcctgcacagcgtggacggcgaggagggctggagcccctgggccgagtggacccagtgcagcgtgacctgcggcagcggcacccagcagagaggcagaagctgcgacgtgaccagcaacacctgcctgggccccagcatccagaccagagcctgcagcctgagcaagtgcgacaccagaatcagacaggacggcggctggagccactggagcccctggagcagctgcagcgtgacctgcggcgtgggcaacatcaccagaatcagactgtgcaacagccccgtgccccagatgggcggcaagaactgcaagggcagcggcagagagaccaaggcctgccagggcgccccctgccccatcgacggcagatggagcccctggagcccctggagcgcctgcaccgtgacctgcgccggcggcatcagagagagaaccagagtgtgcaacagccccgagccccagtacggcggcaaggcctgcgtgggcgacgtgcaggagagacagatgtgcaacaagagaagctgccccgtggacggctgcctgagcaacccctgcttccccggcgcccagtgcagcagcttccccgacggcagctggagctgcggcagctgccccgtgggcttcctgggcaacggcacccactgcgaggacctggacgagtgcgccctggtgcccgacatctgcttcagcaccagcaaggtgcccagatgcgtgaacacccagcccggcttccactgcctgccctgcccccccagatacagaggcaaccagcccgtgggcgtgggcctggaggccgccaagaccgagaagcaggtgtgcgagcccgagaacccctgcaaggacaagacccacaactgccacaagcacgccgagtgcatctacctgggccacttcagcgaccccatgtacaagtgcgagtgccagaccggctacgccggcgacggcctgatctgcggcgaggacagcgacctggacggctggcccaacctgaacctggtgtgcgccaccaacgccacctaccactgcatcaaggacaactgcccccacctgcccaacagcggccaggaggacttcgacaaggacggcatcggcgacgcctgcgacgacgacgacgacaacgacggcgtgaccgacgagaaggacaactgccagctgctgttcaaccccagacaggccgactacgacaaggacgaggtgggcgacagatgcgacaactgcccctacgtgcacaaccccgcccagatcgacaccgacaacaacggcgagggcgacgcctgcagcgtggacatcgacggcgacgacgtgttcaacgagagagacaactgcccctacgtgtacaacaccgaccagagagacaccgacggcgacggcgtgggcgaccactgcgacaactgccccctggtgcacaaccccgaccagaccgacgtggacaacgacctggtgggcgaccagtgcgacaacaacgaggacatcgacgacgacggccaccagaacaaccaggacaactgcccctacatcagcaacgccaaccaggccgaccacgacagagacggccagggcgacgcctgcgaccccgacgacgacaacgacggcgtgcccgacgacagagacaactgcagactggtgttcaaccccgaccaggaggacctggacggcgacggcagaggcgacatctgcaaggacgacttcgacaacgacaacatccccgacatcgacgacgtgtgccccgagaacaacgccatcagcgagaccgacttcagaaacttccagatggtgcccctggaccccaagggcaccacccagatcgaccccaactgggtgatcagacaccagggcaaggagctggtgcagaccgccaacagcgaccccggcatcgccgtgggcttcgacgagttcggcagcgtggacttcagcggcaccttctacgtgaacaccgacagagacgacgactacgccggcttcgtgttcggctaccagagcagcagcagattctacgtggtgatgtggaagcaggtgacccagacctactgggaggaccagcccaccagagcctacggctacagcggcgtgagcctgaaggtggtgaacagcaccaccggcaccggcgagcacctgagaaacgccctgtggcacaccggcaacacccccggccaggtgagaaccctgtggcacgaccccagaaacatcggctggaaggactacaccgcctacagatggcacctgacccacagacccaagaccggctacatcagagtgctggtgcacgagggcaagcaggtgatggccgacagcggccccatctacgaccagacctacgccggcggcagactgggcctgttcgtgttcagccaggagatggtgtacttcagcgacctgaagtacgagtgcagagacatctga

SEQ ID NO: 7551 - RNA, 3519 nt, synthetic construct
  misc_feature 1..3519: note = derived and/or modified sequence opt5 fromTSP-2__Homo_sapiens__BAF85118
  source 1..3519: mol_type = other RNA
atggtgtggagactggtcctcctggccctttgggtttggcccagcacccaggctggccaccaagacaaggatacaacgttcgacctgttttccatctctaacattaatcggaaaaccatcggggccaagcagttccgcggacctgatccgggcgtgcccgcgtacagatttgtgcggttcgactatattcctcccgtcaacgctgatgacctcagcaaaatcacaaagattatgcgccagaaagaggggtttttcctgaccgcccagcttaagcaagatggaaagtccagaggcacactgctcgccctggaagggcctggactgtctcagcggcagtttgagatcgtgagcaatggccccgctgacaccctcgatctgacatactggatcgacggcacccgccatgttgtgtcccttgaagatgtcgggctggccgactctcagtggaaaaacgtgacggttcaagtggctggagagacctatagcctccacgtcggctgcgatctgattgactccttcgcccttgacgaacctttttacgagcatctgcaggcggagaagtctagaatgtatgtggccaaagggtctgctcgggaatcccacttccgcggactcctgcagaatgtgcatctggtctttgagaacagcgttgaagatatcctctctaagaaaggctgtcagcaagggcagggagccgagattaatgctatctccgagaacacagaaaccctgagacttggcccgcacgtgacaaccgagtacgtgggccccagctctgaacggcgccctgaggtctgcgaaagatcctgtgaggagctggggaatatggtgcaggaactcagcggactgcacgttcttgtgaaccaactgtccgagaatctcaagcgggtctctaacgacaatcagttcctgtgggaactgattggcgggccccctaagacgcgcaacatgagcgcctgctggcaggatggaagatttttcgcggagaatgaaacatgggtggttgactcctgtaccacatgcacctgtaaaaagttcaaaaccatctgccatcagattacatgtcccccggccacgtgcgctagcccttcttttgtggagggcgagtgttgcccctcctgcctccacagcgtcgatggggaagagggatggtctccttgggccgaatggacccaatgtagcgtgacatgcggctccggcacccagcagcgggggagatcttgtgacgtcacaagcaatacctgcctgggaccctccatccagacgcgcgcttgtagcctttctaagtgcgatacacggatcagacaagacggcgggtggtcccattggagcccctggtcttcctgtagcgtgacctgcggagttggcaacattacccgcatccggctgtgtaactcccctgtgccgcagatgggcgggaaaaactgcaagggatctggcagagagacaaaagcctgtcagggggccccctgccctattgatggacgctggagcccctggtccccttggtctgcttgcaccgtcacatgtgcgggcgggatccgggaaagaacgcgcgtgtgcaatagccccgagccgcagtatggaggcaaggcctgtgttggggacgtgcaagagcggcagatgtgcaacaagagatcctgtcctgtcgatggctgcctcagcaatccctgtttccctggagctcagtgcagctcctttcccgacggcagctggtcttgtgggtcctgccctgtgggattcctgggcaacgggacccactgtgaagaccttgatgagtgcgccctggtgcccgacatttgctttagcacatctaaagttccgcgctgtgtcaatacccagcctggattccactgcctcccctgtccccctcggtacagaggcaaccaaccggtgggggtgggcctggaagccgctaagacagagaaacaggtctgcgagcccgaaaatccttgtaaggataaaacccataactgccacaagcatgccgagtgtatctacctgggacactttagcgaccccatgtataagtgcgaatgtcagacgggctacgcgggggatggactcatctgcggcgaggactccgatctggacgggtggcctaatcttaacctggtgtgtgctaccaatgccacatatcattgcattaaagataactgcccccacctccctaatagcggacaagaagacttcgataaggacggcatcggggatgcctgtgacgacgatgacgataacgacggcgttaccgatgagaaagacaactgccagctgctgtttaatccccggcaggctgattacgacaaggatgaggtgggagaccgctgtgataactgcccgtatgtccacaatcctgcccagattgacacagataacaatggcgaaggggacgcttgttctgtggacatcgatggagacgatgttttcaacgagagagacaattgcccctacgtgtataacaccgatcaacgggacacggatggcgacggggtcggagatcattgtgacaattgccctcttgtgcacaaccccgatcagacagacgttgacaatgatctcgtgggcgaccagtgtgataacaatgaagacattgatgacgatggccatcagaacaatcaagacaactgcccgtacatctccaacgccaatcaggcggatcacgacagagatgggcagggagacgcctgtgatcctgacgacgataacgacggcgtccccgatgaccgcgataattgccggctggtgtttaaccctgaccaggaggatctggacggggatggaagaggcgacatctgcaaagatgacttcgataatgacaacattcccgacatcgatgacgtgtgtcccgaaaataacgctattagcgagaccgattttcgcaatttccaaatggtccctctcgacccgaaggggacaacccagatcgatcccaactgggttattagacaccagggaaaggagctggtgcaaaccgccaattccgaccctggcatcgctgtgggcttcgatgaatttgggtctgtcgacttcagcggaacattttacgtgaacacggatcgggacgatgactatgccggcttcgtttttgggtaccagtcctctagccgcttctatgtggtcatgtggaaacaggtgacccagacatactgggaggaccaacccaccagagcgtatggatactccggcgtttctcttaaggtggtcaatagcacaaccgggacgggagaacatctgcggaacgccctctggcacacaggcaatacccctggccaggtgcgcaccctgtggcatgatcccagaaacattgggtggaaagactatacagcttaccggtggcacctgacccatcgccctaagacaggatacatcagagttcttgtgcacgagggcaaacaggtcatggccgattccgggccgatctatgaccagacgtacgctggaggccggctcgggctgtttgtgttcagccaagaaatggtgtatttttctgatctgaagtacgagtgccgcgacatttga

SEQ ID NO: 7552 - RNA, 3519 nt, synthetic construct
  misc_feature 1..3519: note = derived and/or modified sequence opt6 fromTSP-2__Homo_sapiens__BAF85118
  source 1..3519: mol_type = other RNA
atggtttggagattagtgttactagcactatgggtatggccaagtacccaagcagggcatcaagataaagatactacatttgatctatttagtatttctaacataaatagaaaaacaataggtgcaaaacaattcaggggtcctgatcctggagttccagcctatcgttttgtaagatttgattatataccacctgtaaacgccgatgacttatcaaaaataacaaaaataatgagacaaaaagaaggcttttttctaactgcacaacttaaacaagatggaaaatccagaggtacactattagcattagaagggcccggattatcacaaagacaattcgaaattgtaagtaatgggcctgccgatacactagatttgacgtactggatagatggaacaagacacgttgtgagcttagaagatgtcggattagcagattcacaatggaaaaatgtaacagtacaggttgcaggtgaaacatattccttgcatgtaggatgcgatttaatagattcgtttgccttagatgaaccattctacgaacacctacaagctgaaaaatcacggatgtatgtagcaaaaggaagtgcaagagagtcacatttcagaggactgttacaaaacgttcacttagtctttgagaattcagtcgaggacatattatcaaagaaaggttgtcaacaaggtcaaggtgcagaaattaatgctataagtgagaatacagaaactctaagattaggtccgcatgtaacaacggaatatgtcggtccgagcagcgaaaggagaccagaagtttgtgaaagatcatgcgaagaattgggaaatatggtccaagaattatcaggattacatgtactggtaaatcagctttcagaaaatttaaaacgagtatcaaatgacaatcaatttttatgggaattaatagggggtccacctaaaactagaaatatgtcagcatgctggcaagatggaagattcttcgctgaaaatgaaacatgggttgtagatagttgcacaacatgcacatgcaaaaaatttaaaacaatctgtcaccaaattacgtgcccaccagcaacatgcgcatcaccatcatttgtagaaggagaatgctgtccctcctgcttacattcagttgatggtgaagaaggatggagtccatgggcagagtggacacaatgtagtgtaacatgtggttcgggaacgcaacaaagaggacgctcatgtgatgtaacaagtaacacttgtcttggtccttcaatacaaacaagagcttgctcattatcaaaatgtgatactaggatcagacaagacggaggatggtcacactggagtccatggtcctcctgttccgtgacatgcggcgtcggaaatataacaagaattcgactatgcaattccccggtaccacaaatgggaggtaaaaattgtaaaggtagtggaagagagacaaaagcttgtcaaggggcaccctgtccaatagatggaaggtggagtccatggtccccttggtcggcatgtactgtaacatgtgcgggtggaattcgggaaagaacaagagtgtgtaacagccctgaaccacagtacggaggaaaggcatgtgtaggagacgtacaggaacgtcaaatgtgtaataaaagatcatgtcccgtcgatggatgtctatctaatccttgttttccaggcgcacaatgttcttcctttcctgatggatcatggtcatgtggtagttgcccagtcgggtttttagggaatggtacacattgtgaagacctagacgaatgcgcgttagttccagatatatgtttcagtacctcaaaagtgccaagatgtgtgaatacacaacctggatttcattgcttaccatgtccacctagatatagaggcaaccaaccggtaggcgttggtttagaagccgcaaaaactgaaaaacaggtttgtgaacctgaaaatccttgcaaagacaaaacacataattgccacaaacatgcagagtgtatatatctgggtcatttttcagatccaatgtataagtgtgaatgccaaacagggtacgcaggagatggactaatatgtggtgaggattcagatctagatggctggcctaaccttaatctagtatgtgcaacaaatgcaacataccattgtataaaagacaattgccctcatcttccaaacagtggccaagaagatttcgataaagatggcattggagatgcatgtgacgatgatgacgacaatgatggtgtcacagacgaaaaagataattgccaattactttttaaccccagacaagcagattacgataaagacgaagtaggagatagatgtgataattgtccatatgtacataatccggcacaaatagatacagacaacaacggagaaggtgatgcatgttccgttgatatagatggcgatgatgtattcaacgaaagagataactgtccttatgtttacaacacggatcaacgagatacagatggcgacggagtaggagatcactgcgataactgtcctttagtacataatcctgatcaaactgatgtagataacgacttagtaggagatcagtgcgacaacaatgaagacatagatgatgatggccatcaaaataaccaggataattgtccatatatctcaaacgcaaaccaagcagatcacgatagagatggtcagggggatgcatgcgacccagacgatgacaacgacggagtaccggatgaccgtgataattgtcgtcttgtatttaatccagatcaagaagatctagacggggacggaagaggagatatatgcaaagacgatttcgacaacgataatataccagatattgacgacgtttgtcctgaaaataatgccattagtgaaacggactttcgtaactttcaaatggttccgttagatccaaaaggaactactcaaatagatccaaactgggtaatcagacatcaaggaaaagaattagtacaaacagccaattcagaccccggaattgcagtagggtttgatgaattcggatcagtagacttttcaggaacattctatgtaaataccgatcgtgatgacgactatgcaggattcgtatttggatatcaaagttcgagtagattttacgtagttatgtggaaacaagtcacccagacttactgggaagaccaacctactcgagcttatggatattctggggtcagtttaaaggtagttaattccactactggaacgggtgaacatttaagaaatgctttatggcatacagggaacaccccaggacaggtcagaactttatggcatgatcccaggaatataggatggaaagactatacagcctatagatggcatctaacgcatcggccaaaaactggatacataagagtactagttcacgaaggtaagcaagtaatggcagacagcggacctatatatgaccaaacttacgcaggaggaagattaggtttattcgttttctcccaggaaatggtatacttttcggatctaaaatatgaatgccgcgacatctaa

SEQ ID NO: 7553 - protein, 1670 aa, synthetic construct
  REGION 1..1670: note = Tumstatin__Homo_sapiens__Q01955
MSARTAPRPQVLLLPLLLVLLAAAPAASKGCVCKDKGQCFCDGAKGEKGEKGFPGPPGSPGQKGFTGPEGLPGPQGPKGFPGLPGLTGSKGVRGISGLPGFSGSPGLPGTPGNTGPYGLVGVPGCSGSKGEQGFPGLPGTLGYPGIPGAAGLKGQKGAPAKEEDIELDAKGDPGLPGAPGPQGLPGPPGFPGPVGPPGPPGFFGFPGAMGPRGPKGHMGERVIGHKGERGVKGLTGPPGPPGTVIVTLTGPDNRTDLKGEKGDKGAMGEPGPPGPSGLPGESYGSEKGAPGDPGLQGKPGKDGVPGFPGSEGVKGNRGFPGLMGEDGIKGQKGDIGPPGFRGPTEYYDTYQEKGDEGTPGPPGPRGARGPQGPSGPPGVPGSPGSSRPGLRGAPGWPGLKGSKGERGRPGKDAMGTPGSPGCAGSPGLPGSPGPPGPPGDIVFRKGPPGDHGLPGYLGSPGIPGVDGPKGEPGLLCTQCPYIPGPPGLPGLPGLHGVKGIPGRQGAAGLKGSPGSPGNTGLPGFPGFPGAQGDPGLKGEKGETLQPEGQVGVPGDPGLRGQPGRKGLDGIPGTPGVKGLPGPKGELALSGEKGDQGPPGDPGSPGSPGPAGPAGPPGYGPQGEPGLQGTQGVPGAPGPPGEAGPRGELSVSTPVPGPPGPPGPPGHPGPQGPPGIPGSLGKCGDPGLPGPDGEPGIPGIGFPGPPGPKGDQGFPGTKGSLGCPGKMGEPGLPGKPGLPGAKGEPAVAMPGGPGTPGFPGERGNSGEHGEIGLPGLPGLPGTPGNEGLDGPRGDPGQPGPPGEQGPPGRCIEGPRGAQGLPGLNGLKGQQGRRGKTGPKGDPGIPGLDRSGFPGETGSPGIPGHQGEMGPLGQRGYPGNPGILGPPGEDGVIGMMGFPGAIGPPGPPGNPGTPGQRGSPGIPGVKGQRGTPGAKGEQGDKGNPGPSEISHVIGDKGEPGLKGFAGNPGEKGNRGVPGMPGLKGLKGLPGPAGPPGPRGDLGSTGNPGEPGLRGIPGSMGNMGMPGSKGKRGTLGFPGRAGRPGLPGIHGLQGDKGEPGYSEGTRPGPPGPTGDPGLPGDMGKKGEMGQPGPPGHLGPAGPEGAPGSPGSPGLPGKPGPHGDLGFKGIKGLLGPPGIRGPPGLPGFPGSPGPMGIRGDQGRDGIPGPAGEKGETGLLRAPPGPRGNPGAQGAKGDRGAPGFPGLPGRKGAMGDAGPRGPTGIEGFPGPPGLPGAIIPGQTGNRGPPGSRGSPGAPGPPGPPGSHVIGIKGDKGSMGHPGPKGPPGTAGDMGPPGRLGAPGTPGLPGPRGDPGFQGFPGVKGEKGNPGFLGSIGPPGPIGPKGPPGVRGDPGTLKIISLPGSPGPPGTPGEPGMQGEPGPPGPPGNLGPCGPRGKPGKDGKPGTPGPAGEKGNKGSKGEPGPAGSDGLPGLKGKRGDSGSPATWTTRGFVFTRHSQTTAIPSCPEGTVPLYSGFSFLFVQGNQRAHGQDLGTLGSCLQRFTTMPFLFCNVNDVCNFASRNDYSYWLSTPALMPMNMAPITGRALEPYISRCTVCEGPAIAIAVHSQTTDIPPCPHGWISLWKGFSFIMFTSAGSEGTGQALASPGSCLEEFRASPFLECHGRGTCNYYSNSYSFWLASLNPERMFRKPIPSTVKAGELEKIISRCQVCMKKRH

SEQ ID NO: 7554 - RNA, 5013 nt, synthetic construct
  misc_feature 1..5013: note = Tumstatin__Homo_sapiens__CCDS42829.1
  source 1..5013: mol_type = other RNA
atgagcgcccggaccgcccccaggccgcaggtgctcctgctgccgctcctgctggtgctcctggcggcggcgcccgcagccagcaagggttgtgtctgtaaagacaaaggccagtgcttctgtgacggggccaaaggggagaagggggagaagggctttcctggaccccccggttctcctggccagaaaggattcacaggtcctgaaggcttgcctggaccgcagggacccaagggctttccaggacttccaggactcacgggttccaaaggtgtaaggggaataagtggattgccaggattttctggttctcctggacttccaggcaccccaggcaataccgggccttacggacttgtcggtgtaccaggatgcagtggttctaagggtgagcaggggtttccaggactcccagggacactgggctacccagggatcccgggtgctgctggtttgaaaggacaaaagggtgctcctgctaaagaagaagatatagaacttgatgcaaaaggcgaccccgggttgccaggggctccaggaccccagggtttgccaggccctccaggttttcctgggcctgttggcccacctggtcctccgggattctttggctttccaggagccatgggacctagaggacctaagggtcacatgggtgaaagagtgataggacataaaggagagcggggtgtgaaagggttaacaggacccccgggaccaccaggaacagttattgtgaccctaactggcccagataacagaacggacctcaagggggaaaagggagacaagggagcaatgggcgagcctggacctcctggaccctcaggactgcctggagaatcatatggatctgaaaagggtgctcctggagaccctggcctgcagggaaaacccggaaaagatggtgttcctggcttccctggaagtgagggagtcaagggcaacaggggtttccctgggttaatgggtgaagatggcattaagggacagaaaggggacattggccctccaggatttcgtggtccaacagaatattatgacacataccaggaaaagggagatgaaggcactccaggcccaccagggcccagaggagctcgtggcccacaaggtcccagtggtccccccggagttcctggaagtcctggatcatcaaggcctggcctcagaggagcccctggatggccaggcctgaaaggaagtaaaggggaacgaggccgcccaggaaaggatgccatggggactcctgggtccccaggttgtgctggttcaccaggtcttccaggatcaccgggacctccaggaccgccaggtgacatcgtttttcgcaagggtccacctggagatcacggactgccaggctatctagggtctccaggaatcccaggagttgatgggcccaaaggagaaccaggcctcctgtgtacacagtgcccttatatcccagggcctcccggtctcccaggattgccagggttacatggtgtaaaaggaatcccaggaagacaaggcgcagctggcttgaaaggaagcccagggtccccaggaaatacaggtcttccaggatttccaggtttcccaggtgcccagggtgacccaggacttaaaggagaaaaaggtgaaacacttcagcctgaggggcaagtgggtgtcccaggtgacccggggctcagaggccaacctgggagaaagggcttggatggaattcctggaactccgggagtgaaaggattaccaggacctaaaggcgaactggctctgagtggtgagaaaggggaccaaggtcctccaggggatcctggctcccctgggtccccaggacctgcaggaccagctggaccacctggctacggaccccaaggagaacctggtctccagggcacgcaaggagttcctggagcccccggaccacccggagaagccggccctaggggagagctcagtgtttcaacaccagttccaggcccaccaggacctccagggccccctggccatcctggcccccaaggtccacctggtatccctggatccctggggaaatgtggagatcctggtcttccagggcctgatggtgaaccaggaattccaggaattggatttcctgggcctcctggacctaagggagaccaaggttttccaggtacaaaaggatcactgggttgtcctggaaaaatgggagagcctgggttacctggaaagccaggcctcccaggagccaagggagaaccagcagtagccatgcctggaggaccaggaacaccaggttttccaggagaaagaggcaattctggggaacatggagaaattggactccctggacttccaggtctccctggaactccaggaaatgaagggcttgatggaccacgaggagatccagggcagcctggaccacctggagaacaaggacccccaggaaggtgcatagagggtcccaggggagcccaaggacttccaggcttaaatggattgaaagggcaacaaggcagaagaggtaaaacggggccaaagggagacccaggaattccaggcttggatagatcaggatttcctggagaaactggatcaccaggaattccaggtcatcaaggtgaaatgggaccactgggtcaaagaggatatccaggaaatccgggaattttagggccaccaggtgaagatggagtgattgggatgatgggctttcctggagccattggccctccagggccccctgggaacccaggcacaccagggcagagggggagccctggaattccaggagtaaagggccagagaggaaccccaggagccaagggggaacaaggagataaaggaaatcccgggccttcagagatatcccacgtaataggggacaaaggagaaccaggtctcaaaggattcgcaggaaatccaggtgagaaaggaaacagaggcgttccagggatgccaggtttaaagggcctcaaaggactacccggaccagcaggaccaccaggccccagaggagatttgggcagcactgggaatcctggagaaccaggactgcgtggtataccaggaagcatggggaacatgggcatgccaggttctaaaggaaaaaggggaactttgggattcccaggtcgagcaggaagaccaggcctcccaggtattcatggtctccagggagataagggagagccaggttattcagaaggtacaaggccaggaccaccgggaccaacgggggatccaggactgccgggtgatatgggaaagaaaggagaaatggggcaacctggcccacctggacatttggggcctgctggacctgagggagcccctggaagtcctggaagtcctggcctcccaggaaagccaggtcctcatggtgatttgggttttaaaggaatcaaaggcctcctgggccctccaggaatcagaggccctccaggtcttccaggatttccaggatctcctggaccaatgggtataagaggtgaccaaggacgtgatggaattcctggtccagccggagaaaagggagaaacgggtttattgagggcccctccaggcccaagagggaaccctggtgctcaaggagccaaaggagacaggggagccccaggttttcctggcctcccgggcagaaaaggggccatgggagatgctggacctcgaggacccacaggcatagaaggattcccagggccaccaggtctgcccggtgcaattatccctggccagacaggaaatcgtggtccaccaggctcaagaggaagcccaggtgcgcctggtccccctggacctccagggagtcatgtaataggcataaaaggagacaaagggtctatgggccaccctggcccaaaaggtccacctggaactgcaggagacatgggaccaccaggtcgtctgggagcaccaggtactccaggtcttccaggacccagaggtgatcctggattccaggggtttccaggcgtgaaaggagaaaagggtaatcctggatttctaggatccattggacctccaggaccaattgggccaaaaggaccacctggtgtacgtggagaccctggcacacttaagattatctcccttccaggaagcccagggccacctggcacacctggagaaccagggatgcagggagaacctgggccaccagggccacctggaaacctaggaccctgtgggccaagaggtaagccaggcaaggatggaaaaccaggaactcctggaccagctggagaaaaaggcaacaaaggttctaaaggagagccaggaccagctggatcagatggattgccaggtttgaaaggaaaacgtggagacagtggatcacctgcaacctggacaacgagaggctttgtcttcacccgacacagtcaaaccacagcaattccttcatgtccagaggggacagtgccactctacagtgggttttcttttctttttgtacaaggaaatcaacgagcccacggacaagaccttggaactcttggcagctgcctgcagcgatttaccacaatgccattcttattctgcaatgtcaatgatgtatgtaattttgcatctcgaaatgattattcatactggctgtcaacaccagctctgatgccaatgaacatggctcccattactggcagagcccttgagccttatataagcagatgcactgtttgtgaaggtcctgcgatcgccatagccgttcacagccaaaccactgacattcctccatgtcctcacggctggatttctctctggaaaggattttcattcatcatgttcacaagtgcaggttctgagggcaccgggcaagcactggcctcccctggctcctgcctggaagaattccgagccagcccatttctagaatgtcatggaagaggaacgtgcaactactattcaaattcctacagtttctggctggcttcattaaacccagaaagaatgttcagaaagcctattccatcaactgtgaaagctggggaattagaaaaaataataagtcgctgtcaggtgtgcatgaagaaaagacactga

SEQ ID NO: 7555 - RNA, 5013 nt, synthetic construct
  misc_feature 1..5013: note = derived and/or modified sequence opt1 fromTumstatin__Homo_sapiens__CCDS42829.1
  source 1..5013: mol_type = other RNA
atgagcgcccgcaccgccccccggccgcaggtgctgctcctgcccctgctcctggtcctgctcgcggccgcccccgccgcctccaagggctgcgtgtgcaaggacaaggggcagtgcttctgcgacggcgcgaagggggagaagggcgagaaggggttccccggcccgcccggcagccccgggcagaagggcttcaccgggcccgagggcctgccggggccccagggccccaagggcttccccgggctgccgggcctcacggggtccaagggcgtgcgcggcatcagcgggctgcccggcttctccgggagccccggcctgcccgggaccccgggcaacaccggcccctacgggctcgtcggcgtgcccgggtgctccggcagcaagggggagcagggcttccccggcctgccggggaccctgggctaccccgggatccccggcgccgccgggctcaagggccagaagggcgcccccgcgaaggaggaggacatcgagctggacgccaagggggacccgggcctgcccggggcccccggcccccagggcctcccggggccccccggcttcccggggcccgtgggcccccccgggccgcccggcttcttcggcttccccggggccatgggcccccgggggccgaagggccacatgggggagcgcgtcatcggccacaagggcgagcggggggtgaagggcctgacggggccccccggccccccggggaccgtgatcgtcaccctgaccggccccgacaaccgcacggacctcaagggcgagaagggggacaagggcgccatgggggagcccggccccccggggccctccggcctgcccggcgagagctacgggtccgagaagggcgcgcccggggacccgggcctgcagggcaagcccgggaaggacggcgtgcccgggttccccggcagcgagggggtgaagggcaaccggggcttcccggggctcatgggcgaggacgggatcaagggccagaagggggacatcggcccccccggcttccgcgggccgaccgagtactacgacacctaccaggagaagggcgacgaggggacccccggcccccccgggccgcggggcgcccgcggcccccaggggccctccggccccccgggggtccccggcagccccggctccagccggcccgggctgcgcggcgccccggggtggcccggcctgaaggggtccaagggcgagcggggccgccccgggaaggacgccatgggcacgcccgggagcccgggctgcgccgggtcccccggcctccccggcagccccgggccgcccggcccccccggggacatcgtgttccggaagggcccgcccggggaccacggcctgcccggctacctggggagccccggcatcccgggggtggacggccccaagggggagcccggcctcctgtgcacccagtgcccgtacatccccggcccccccgggctgccgggcctccccgggctgcacggcgtcaagggcatccccgggcgccagggcgcggccgggctgaagggctcccccgggagcccgggcaacaccggcctccccgggttccccggcttccccggggcccagggcgacccggggctgaagggcgagaagggcgagaccctgcagcccgaggggcaggtgggcgtgcccggggaccccggcctccgggggcagccgggccgcaagggcctggacgggatccccggcacgcccggggtcaagggcctgcccgggccgaagggcgagctcgccctgtccggcgagaagggggaccagggcccccccggggaccccggcagcccgggctcccccgggcccgccggccccgcggggccgcccggctacgggccccagggcgagccgggcctgcaggggacccagggcgtgcccggggcccccggccccccgggggaggccggcccccggggcgagctcagcgtgtccacccccgtccccgggccgcccggcccccccgggccgcccggccaccccgggccccagggcccgcccggcatccccgggagcctgggcaagtgcggggaccccggcctgccgggccccgacggggagcccggcatccccgggatcggcttcccggggccccccggcccgaagggcgaccaggggttccccggcaccaaggggtccctcggctgccccgggaagatgggcgagcccggcctgccggggaagcccggcctgcccggggccaagggcgagcccgccgtggcgatgccggggggccccggcacgcccgggttccccggcgagcgcgggaacagcggcgagcacggggagatcggcctgccgggcctccccgggctgcccggcacccccgggaacgagggcctggacggcccgcggggggaccccggccagcccgggcccccgggcgagcaggggccccccggccgctgcatcgagggcccccgcggggcccagggcctcccggggctgaacggcctgaaggggcagcagggccggcgcggcaagaccgggcccaagggcgaccccgggatccccggcctcgaccggtccgggttcccgggcgagaccggcagccccgggatccccggccaccagggggagatgggcccgctgggccagcgcgggtaccccggcaaccccgggatcctgggccccccgggggaggacggcgtgatcggcatgatggggttccccggcgccatcgggccccccggcccgcccgggaaccccggcacgcccggccagcgggggtccccgggcatccccggggtcaagggccagcgcgggacccccggcgccaagggcgagcagggggacaagggcaaccccgggccgagcgagatctcccacgtgatcggcgacaagggggagcccggcctcaagggcttcgcggggaaccccggcgagaaggggaaccggggcgtccccggcatgccggggctgaagggcctgaaggggctccccggccccgccgggcccccgggcccccgcggcgacctggggagcaccggcaaccccggggagcccggcctgcgggggatcccgggctccatgggcaacatggggatgcccggcagcaaggggaagcgcggcaccctcgggttccccggccgggccggccgcccggggctgcccggcatccacgggctgcagggcgacaagggcgagcccgggtactccgagggcacgcggcccgggccgcccggccccaccggggaccccggcctcccgggcgacatggggaagaagggcgagatggggcagcccggcccccccgggcacctgggcccggccggccccgagggggcccccggcagccccgggagcccgggcctgcccgggaagcccggcccccacggcgacctcgggttcaagggcatcaaggggctgctgggcccgcccgggatccgcggcccccccggcctcccggggttccccggctcccccgggcccatgggcatccggggcgaccaggggcgcgacggcatcccggggcccgcgggcgagaagggggagaccggcctgctgcgggcccccccgggcccccgcgggaaccccggcgcccagggggccaagggcgaccggggggcccccggcttcccgggcctccccgggcgcaagggcgcgatgggggacgccggcccccgcgggcccaccggcatcgagggcttcccggggccccccggcctgcccggggccatcatcccgggccagacggggaaccggggcccccccggcagccgcgggtcccccggcgccccggggccccccggccccccgggcagccacgtgatcgggatcaagggcgacaaggggtccatgggccaccccgggcccaagggccccccgggcaccgccggggacatgggcccccccgggcggctgggcgcgccggggacccccggcctccccggcccccgcggggacccgggcttccaggggttccccggcgtgaagggggagaagggcaaccccggcttcctggggagcatcggccccccggggcccatcggccccaagggccccccgggggtccggggcgaccccgggaccctgaagatcatctccctccccggcagccccgggccgcccggcacgcccggcgagcccgggatgcagggcgagccggggccccccggccccccggggaacctgggcccctgcggcccccgcgggaagcccggcaaggacgggaagccgggcacccccgggcccgccggcgagaagggcaacaaggggtccaagggcgagccggggcccgccggcagcgacgggctgcccggcctcaagggcaagcggggggactccggcagccccgccacctggaccacccgcgggttcgtgttcacgcggcactcccagaccaccgcgatcccgagctgccccgagggcaccgtgcccctgtactccggcttcagcttcctgttcgtccaggggaaccagcgcgcccacggccaggacctcgggacgctgggctcctgcctgcagcggttcaccaccatgcccttcctcttctgcaacgtgaacgacgtgtgcaacttcgccagccgcaacgactacagctactggctgtccaccccggccctgatgcccatgaacatggcccccatcacggggcgggcgctcgagccctacatcagccgctgcaccgtctgcgagggcccggccatcgccatcgccgtgcactcccagaccaccgacatccccccctgcccccacggctggatcagcctgtggaaggggttctccttcatcatgttcacgagcgccggctccgaggggaccggccaggcgctggccagcccggggtcctgcctcgaggagttccgggccagccccttcctggagtgccacggccgcggcacctgcaactactactccaacagctactccttctggctggccagcctcaaccccgagcggatgttccgcaagcccatcccgtccaccgtgaaggccggggagctggagaagatcatcagccggtgccaggtctgcatgaagaagcgccactga

SEQ ID NO: 7556 - RNA, 5013 nt, synthetic construct
  misc_feature 1..5013: note = derived and/or modified sequence opt2 fromTumstatin__Homo_sapiens__CCDS42829.1
  source 1..5013: mol_type = other RNA
atgtccgcccgcaccgccccccgcccccaggtcctcctcctccccctcctcctcgtcctcctcgccgccgcccccgccgcctccaagggctgcgtctgcaaggacaagggccagtgcttctgcgacggcgccaagggcgagaagggcgagaagggcttccccggcccccccggctcccccggccagaagggcttcaccggccccgagggcctccccggcccccagggccccaagggcttccccggcctccccggcctcaccggctccaagggcgtccgcggcatctccggcctccccggcttctccggctcccccggcctccccggcacccccggcaacaccggcccctacggcctcgtcggcgtccccggctgctccggctccaagggcgagcagggcttccccggcctccccggcaccctcggctaccccggcatccccggcgccgccggcctcaagggccagaagggcgcccccgccaaggaggaggacatcgagctcgacgccaagggcgaccccggcctccccggcgcccccggcccccagggcctccccggcccccccggcttccccggccccgtcggcccccccggcccccccggcttcttcggcttccccggcgccatgggcccccgcggccccaagggccacatgggcgagcgcgtcatcggccacaagggcgagcgcggcgtcaagggcctcaccggcccccccggcccccccggcaccgtcatcgtcaccctcaccggccccgacaaccgcaccgacctcaagggcgagaagggcgacaagggcgccatgggcgagcccggcccccccggcccctccggcctccccggcgagtcctacggctccgagaagggcgcccccggcgaccccggcctccagggcaagcccggcaaggacggcgtccccggcttccccggctccgagggcgtcaagggcaaccgcggcttccccggcctcatgggcgaggacggcatcaagggccagaagggcgacatcggcccccccggcttccgcggccccaccgagtactacgacacctaccaggagaagggcgacgagggcacccccggcccccccggcccccgcggcgcccgcggcccccagggcccctccggcccccccggcgtccccggctcccccggctcctcccgccccggcctccgcggcgcccccggctggcccggcctcaagggctccaagggcgagcgcggccgccccggcaaggacgccatgggcacccccggctcccccggctgcgccggctcccccggcctccccggctcccccggcccccccggcccccccggcgacatcgtcttccgcaagggcccccccggcgaccacggcctccccggctacctcggctcccccggcatccccggcgtcgacggccccaagggcgagcccggcctcctctgcacccagtgcccctacatccccggcccccccggcctccccggcctccccggcctccacggcgtcaagggcatccccggccgccagggcgccgccggcctcaagggctcccccggctcccccggcaacaccggcctccccggcttccccggcttccccggcgcccagggcgaccccggcctcaagggcgagaagggcgagaccctccagcccgagggccaggtcggcgtccccggcgaccccggcctccgcggccagcccggccgcaagggcctcgacggcatccccggcacccccggcgtcaagggcctccccggccccaagggcgagctcgccctctccggcgagaagggcgaccagggcccccccggcgaccccggctcccccggctcccccggccccgccggccccgccggcccccccggctacggcccccagggcgagcccggcctccagggcacccagggcgtccccggcgcccccggcccccccggcgaggccggcccccgcggcgagctctccgtctccacccccgtccccggcccccccggcccccccggcccccccggccaccccggcccccagggcccccccggcatccccggctccctcggcaagtgcggcgaccccggcctccccggccccgacggcgagcccggcatccccggcatcggcttccccggcccccccggccccaagggcgaccagggcttccccggcaccaagggctccctcggctgccccggcaagatgggcgagcccggcctccccggcaagcccggcctccccggcgccaagggcgagcccgccgtcgccatgcccggcggccccggcacccccggcttccccggcgagcgcggcaactccggcgagcacggcgagatcggcctccccggcctccccggcctccccggcacccccggcaacgagggcctcgacggcccccgcggcgaccccggccagcccggcccccccggcgagcagggcccccccggccgctgcatcgagggcccccgcggcgcccagggcctccccggcctcaacggcctcaagggccagcagggccgccgcggcaagaccggccccaagggcgaccccggcatccccggcctcgaccgctccggcttccccggcgagaccggctcccccggcatccccggccaccagggcgagatgggccccctcggccagcgcggctaccccggcaaccccggcatcctcggcccccccggcgaggacggcgtcatcggcatgatgggcttccccggcgccatcggcccccccggcccccccggcaaccccggcacccccggccagcgcggctcccccggcatccccggcgtcaagggccagcgcggcacccccggcgccaagggcgagcagggcgacaagggcaaccccggcccctccgagatctcccacgtcatcggcgacaagggcgagcccggcctcaagggcttcgccggcaaccccggcgagaagggcaaccgcggcgtccccggcatgcccggcctcaagggcctcaagggcctccccggccccgccggcccccccggcccccgcggcgacctcggctccaccggcaaccccggcgagcccggcctccgcggcatccccggctccatgggcaacatgggcatgcccggctccaagggcaagcgcggcaccctcggcttccccggccgcgccggccgccccggcctccccggcatccacggcctccagggcgacaagggcgagcccggctactccgagggcacccgccccggcccccccggccccaccggcgaccccggcctccccggcgacatgggcaagaagggcgagatgggccagcccggcccccccggccacctcggccccgccggccccgagggcgcccccggctcccccggctcccccggcctccccggcaagcccggcccccacggcgacctcggcttcaagggcatcaagggcctcctcggcccccccggcatccgcggcccccccggcctccccggcttccccggctcccccggccccatgggcatccgcggcgaccagggccgcgacggcatccccggccccgccggcgagaagggcgagaccggcctcctccgcgccccccccggcccccgcggcaaccccggcgcccagggcgccaagggcgaccgcggcgcccccggcttccccggcctccccggccgcaagggcgccatgggcgacgccggcccccgcggccccaccggcatcgagggcttccccggcccccccggcctccccggcgccatcatccccggccagaccggcaaccgcggcccccccggctcccgcggctcccccggcgcccccggcccccccggcccccccggctcccacgtcatcggcatcaagggcgacaagggctccatgggccaccccggccccaagggcccccccggcaccgccggcgacatgggcccccccggccgcctcggcgcccccggcacccccggcctccccggcccccgcggcgaccccggcttccagggcttccccggcgtcaagggcgagaagggcaaccccggcttcctcggctccatcggcccccccggccccatcggccccaagggcccccccggcgtccgcggcgaccccggcaccctcaagatcatctccctccccggctcccccggcccccccggcacccccggcgagcccggcatgcagggcgagcccggcccccccggcccccccggcaacctcggcccctgcggcccccgcggcaagcccggcaaggacggcaagcccggcacccccggccccgccggcgagaagggcaacaagggctccaagggcgagcccggccccgccggctccgacggcctccccggcctcaagggcaagcgcggcgactccggctcccccgccacctggaccacccgcggcttcgtcttcacccgccactcccagaccaccgccatcccctcctgccccgagggcaccgtccccctctactccggcttctccttcctcttcgtccagggcaaccagcgcgcccacggccaggacctcggcaccctcggctcctgcctccagcgcttcaccaccatgcccttcctcttctgcaacgtcaacgacgtctgcaacttcgcctcccgcaacgactactcctactggctctccacccccgccctcatgcccatgaacatggcccccatcaccggccgcgccctcgagccctacatctcccgctgcaccgtctgcgagggccccgccatcgccatcgccgtccactcccagaccaccgacatccccccctgcccccacggctggatctccctctggaagggcttctccttcatcatgttcacctccgccggctccgagggcaccggccaggccctcgcctcccccggctcctgcctcgaggagttccgcgcctcccccttcctcgagtgccacggccgcggcacctgcaactactactccaactcctactccttctggctcgcctccctcaaccccgagcgcatgttccgcaagcccatcccctccaccgtcaaggccggcgagctcgagaagatcatctcccgctgccaggtctgcatgaagaagcgccactga

SEQ ID NO: 7557 - RNA, 5013 nt, synthetic construct
  misc_feature 1..5013: note = derived and/or modified sequence opt3 fromTumstatin__Homo_sapiens__CCDS42829.1
  source 1..5013: mol_type = other RNA
atgagcgccagaaccgctcccaggcctcaggtgctgctccttccactgttgttagtcctgctagcagccgcgccggctgcctccaagggctgcgtttgtaaagacaaggggcaatgcttctgtgatggagcaaaaggtgagaagggcgaaaaagggtttcccggacctccaggctctcccggtcagaaggggttcacaggacctgagggcctcccaggcccccaggggcctaagggatttccaggtctgccgggccttactgggtcaaaaggagtgcggggcatcagtggtctgcccgggttcagcggatcccctggcttgccaggcacgcccgggaacaccggaccttacggtctcgtaggcgtgccagggtgctctggatcgaagggcgaacagggttttcccgggctgccgggcacactgggatatcctggcattcccggggccgctggactcaaaggtcaaaagggcgcaccagccaaagaggaagacatagagttagatgctaagggggaccctggactgcccggcgccccaggtccccaggggcttcctggcccaccgggattccccggccctgtcgggccacccggacctccaggtttcttcggctttcccggggcgatgggaccgcgcggccctaagggtcacatgggggagcgagtgatcggccataaaggagaacgtggcgttaaggggttgactggaccacccggccctcccggtaccgtgattgtcacactgaccgggccagataatagaactgacctaaaaggagagaagggcgataaaggtgcaatgggcgaacctgggcccccaggaccgtcaggcctccctggggagagctacggaagtgagaagggcgcccccggtgacccagggctgcagggaaaacccggcaaggatggtgtgcctggcttcccagggtccgaaggagtaaagggcaacagggggtttcccggacttatgggcgaggacggtatcaaagggcagaagggagatattggccctccgggtttccggggcccaacagaatattacgacacctatcaagagaaaggggatgaaggaacgcccggccctccagggccccgcggagctagaggccctcagggtccgtctgggcccccaggagttcctggcagccccggctcctcaaggccagggctgcggggagcccctggttggcccggcttgaaggggagtaaaggagagcgcggccgaccaggtaaggacgcaatggggactccgggaagccctggctgtgctggctctcccgggctcccaggatcccccggtcctccaggccctcccggggacatcgtgtttagaaagggaccgccaggcgatcacggtctgcccgggtacttaggatcacctggcatacccggcgtcgacgggccaaaaggagagcctggtctgctctgcacccagtgtccctatatcccaggccctccggggcttcccggactgccaggcttgcatggtgtgaaggggattcctggaaggcagggcgccgcgggcctaaaagggagccccggaagtccaggtaatacaggcctgcctgggttccccggattcccgggcgcccaaggtgatccagggctcaagggagaaaaaggcgagactctgcagcctgaaggccaggtgggggtccccggagacccaggtcttcggggccaacccgggcgtaagggactggatggcatccctggtaccccgggggttaagggcttgcccggaccaaaaggcgagctcgcactgtctggggaaaagggagaccagggtcctcccggcgatcctgggtccccaggaagccccggccctgctggtccagccgggcccccgggctacggacctcagggcgagccagggttacagggaacacaaggtgtgcccggcgctcctgggccacccggagaggccggcccgcgcggtgaactgtcggtatctacccctgtgcccgggccacctggacccccaggaccccctggccacccagggccgcagggaccccctggcattccaggttccctagggaaatgcggagaccccggcctccctggtccagatggcgagcccgggatccctggaataggctttccggggccacccggacctaagggcgaccagggtttccccgggacgaaaggatcactgggctgtccaggtaagatgggcgaacctgggcttcccggaaagccaggcttgccgggggcaaaaggagagcctgccgtcgctatgcccggcggtccagggactcccggatttcctggcgaaagaggcaacagtggggagcatggagagattggtctgccaggcctccccgggctgcctggaacaccgggcaatgaaggtcttgatgggccaaggggagaccccggccagcctggcccacccggggagcaaggacctcccggtcggtgcatcgaaggcccacgaggggcgcagggactgccgggcttgaacggtctcaaggggcagcagggacgcagaggcaaaaccggccctaagggggaccccggcattccaggtctggataggagcggcttccctggggagactggatcccccggcatcccaggtcaccaaggggagatgggacctttaggccagcggggctaccccgggaatccgggaatcctgggtccacctggcgaagacggggtgattggaatgatgggctttcccggtgcaatagggccacccggacctccgggcaacccaggcacacccgggcagcgcggatctcctggtatccccggcgttaaagggcagagaggaaccccaggcgccaagggtgagcaaggggataaaggaaatcctggccccagcgaaatttcacacgtgatcggcgacaagggggagccaggactaaagggtttcgctggcaaccctggggaaaaaggaaataggggcgtcccgggtatgcccgggctcaagggcctgaaaggacttccaggccctgccgggcccccaggacctcgtggtgatttgggcagtacggggaaccccggagagccgggcctgcggggtataccagggtccatgggcaatatgggaatgcctggcagcaaggggaaacgaggaaccctcggttttcccggcagagcagggaggccaggactgcccggcattcatggtttacagggcgacaagggggagcctggatattctgaaggcacacgccccgggccacctggaccgactggcgatcccggtctgccaggggacatgggaaagaaaggcgagatgggtcagcctgggcccccaggccaccttggacctgccggccccgaaggggctccgggatcacctggcagtccaggtttgcccgggaagcctggaccacatggcgatctcggtttcaaaggcatcaaggggctgctaggaccccctggcatccgggggccacccggactgccgggctttcctggtagccccgggccaatgggaattagaggcgaccaaggcagggatgggatccccggacctgccggtgagaaaggcgaaaccgggctcctgcgcgcaccacccggacctcgaggcaacccaggtgcgcagggggctaagggagaccggggcgccccgggcttccccgggcttcctggacgtaagggtgcaatgggcgatgccgggccaagaggacccacaggcattgagggttttcctgggccacccggattgccgggcgctataatccctggccagactgggaataggggaccacccggttcccgcggctctcctggggcccccggaccaccgggccctcccggttcgcacgtgattgggatcaaaggagacaagggcagcatgggccacccagggcccaaaggacctccaggtaccgcaggcgacatggggccccctggacggctgggcgctccaggtacaccggggttacccggacctagaggcgatccaggcttccaggggtttcccggagtaaagggtgagaaaggcaaccctgggttcctcggatccatcggcccacccggtcctattgggccgaagggacccccaggcgttaggggcgaccctgggaccctgaagataatctcacttcccggaagtccaggtcctcccggcactccaggggaaccgggaatgcaaggcgagcctggtcccccagggccccctggcaacctgggaccatgtggcccccgagggaaacctggaaaggatggtaaaccgggcacgcccgggccagccggagaaaagggcaataaaggttctaagggggagcctggccccgcgggaagcgacggcttgccagggctcaaaggaaagcgcggtgattccggcagccctgccacatggaccactcgggggttcgtgtttaccagacattcacagacaaccgctattccctcttgcccagaaggaactgtcccgctgtactccggcttcagttttctattcgtgcagggtaaccagagggcacacggccaagacctggggacactcggaagctgcctgcagcgttttacgaccatgcctttcttgttttgtaatgtcaacgatgtgtgcaatttcgcctctcgcaacgactattcctactggctttcaactcccgctctgatgccaatgaatatggcccctatcacaggccgggcattagagccctatattagtagatgtaccgtttgcgaggggccagcgatcgccatagctgtgcatagccagacaactgatatccctccctgtccgcacggatggatttcgctctggaagggcttttccttcatcatgtttacctctgccggtagcgaagggacgggacaggcactggcttcaccaggcagttgccttgaggaatttagggcctccccctttctggagtgtcatggtcgagggacctgcaactactattctaatagctactccttctggctagcatcactcaaccctgagcggatgttccgcaaaccaattcccagcacagtaaaggccggcgaactggagaaaatcataagtagatgtcaagtctgcatgaagaaaaggcactga

SEQ ID NO: 7558 - RNA, 5013 nt, synthetic construct
  misc_feature 1..5013: note = derived and/or modified sequence opt4 fromTumstatin__Homo_sapiens__CCDS42829.1
  source 1..5013: mol_type = other RNA
atgagcgccagaaccgcccccagaccccaggtgctgctgctgcccctgctgctggtgctgctggccgccgcccccgccgccagcaagggctgcgtgtgcaaggacaagggccagtgcttctgcgacggcgccaagggcgagaagggcgagaagggcttccccggcccccccggcagccccggccagaagggcttcaccggccccgagggcctgcccggcccccagggccccaagggcttccccggcctgcccggcctgaccggcagcaagggcgtgagaggcatcagcggcctgcccggcttcagcggcagccccggcctgcccggcacccccggcaacaccggcccctacggcctggtgggcgtgcccggctgcagcggcagcaagggcgagcagggcttccccggcctgcccggcaccctgggctaccccggcatccccggcgccgccggcctgaagggccagaagggcgcccccgccaaggaggaggacatcgagctggacgccaagggcgaccccggcctgcccggcgcccccggcccccagggcctgcccggcccccccggcttccccggccccgtgggcccccccggcccccccggcttcttcggcttccccggcgccatgggccccagaggccccaagggccacatgggcgagagagtgatcggccacaagggcgagagaggcgtgaagggcctgaccggcccccccggcccccccggcaccgtgatcgtgaccctgaccggccccgacaacagaaccgacctgaagggcgagaagggcgacaagggcgccatgggcgagcccggcccccccggccccagcggcctgcccggcgagagctacggcagcgagaagggcgcccccggcgaccccggcctgcagggcaagcccggcaaggacggcgtgcccggcttccccggcagcgagggcgtgaagggcaacagaggcttccccggcctgatgggcgaggacggcatcaagggccagaagggcgacatcggcccccccggcttcagaggccccaccgagtactacgacacctaccaggagaagggcgacgagggcacccccggcccccccggccccagaggcgccagaggcccccagggccccagcggcccccccggcgtgcccggcagccccggcagcagcagacccggcctgagaggcgcccccggctggcccggcctgaagggcagcaagggcgagagaggcagacccggcaaggacgccatgggcacccccggcagccccggctgcgccggcagccccggcctgcccggcagccccggcccccccggcccccccggcgacatcgtgttcagaaagggcccccccggcgaccacggcctgcccggctacctgggcagccccggcatccccggcgtggacggccccaagggcgagcccggcctgctgtgcacccagtgcccctacatccccggcccccccggcctgcccggcctgcccggcctgcacggcgtgaagggcatccccggcagacagggcgccgccggcctgaagggcagccccggcagccccggcaacaccggcctgcccggcttccccggcttccccggcgcccagggcgaccccggcctgaagggcgagaagggcgagaccctgcagcccgagggccaggtgggcgtgcccggcgaccccggcctgagaggccagcccggcagaaagggcctggacggcatccccggcacccccggcgtgaagggcctgcccggccccaagggcgagctggccctgagcggcgagaagggcgaccagggcccccccggcgaccccggcagccccggcagccccggccccgccggccccgccggcccccccggctacggcccccagggcgagcccggcctgcagggcacccagggcgtgcccggcgcccccggcccccccggcgaggccggccccagaggcgagctgagcgtgagcacccccgtgcccggcccccccggcccccccggcccccccggccaccccggcccccagggcccccccggcatccccggcagcctgggcaagtgcggcgaccccggcctgcccggccccgacggcgagcccggcatccccggcatcggcttccccggcccccccggccccaagggcgaccagggcttccccggcaccaagggcagcctgggctgccccggcaagatgggcgagcccggcctgcccggcaagcccggcctgcccggcgccaagggcgagcccgccgtggccatgcccggcggccccggcacccccggcttccccggcgagagaggcaacagcggcgagcacggcgagatcggcctgcccggcctgcccggcctgcccggcacccccggcaacgagggcctggacggccccagaggcgaccccggccagcccggcccccccggcgagcagggcccccccggcagatgcatcgagggccccagaggcgcccagggcctgcccggcctgaacggcctgaagggccagcagggcagaagaggcaagaccggccccaagggcgaccccggcatccccggcctggacagaagcggcttccccggcgagaccggcagccccggcatccccggccaccagggcgagatgggccccctgggccagagaggctaccccggcaaccccggcatcctgggcccccccggcgaggacggcgtgatcggcatgatgggcttccccggcgccatcggcccccccggcccccccggcaaccccggcacccccggccagagaggcagccccggcatccccggcgtgaagggccagagaggcacccccggcgccaagggcgagcagggcgacaagggcaaccccggccccagcgagatcagccacgtgatcggcgacaagggcgagcccggcctgaagggcttcgccggcaaccccggcgagaagggcaacagaggcgtgcccggcatgcccggcctgaagggcctgaagggcctgcccggccccgccggcccccccggccccagaggcgacctgggcagcaccggcaaccccggcgagcccggcctgagaggcatccccggcagcatgggcaacatgggcatgcccggcagcaagggcaagagaggcaccctgggcttccccggcagagccggcagacccggcctgcccggcatccacggcctgcagggcgacaagggcgagcccggctacagcgagggcaccagacccggcccccccggccccaccggcgaccccggcctgcccggcgacatgggcaagaagggcgagatgggccagcccggcccccccggccacctgggccccgccggccccgagggcgcccccggcagccccggcagccccggcctgcccggcaagcccggcccccacggcgacctgggcttcaagggcatcaagggcctgctgggcccccccggcatcagaggcccccccggcctgcccggcttccccggcagccccggccccatgggcatcagaggcgaccagggcagagacggcatccccggccccgccggcgagaagggcgagaccggcctgctgagagccccccccggccccagaggcaaccccggcgcccagggcgccaagggcgacagaggcgcccccggcttccccggcctgcccggcagaaagggcgccatgggcgacgccggccccagaggccccaccggcatcgagggcttccccggcccccccggcctgcccggcgccatcatccccggccagaccggcaacagaggcccccccggcagcagaggcagccccggcgcccccggcccccccggcccccccggcagccacgtgatcggcatcaagggcgacaagggcagcatgggccaccccggccccaagggcccccccggcaccgccggcgacatgggcccccccggcagactgggcgcccccggcacccccggcctgcccggccccagaggcgaccccggcttccagggcttccccggcgtgaagggcgagaagggcaaccccggcttcctgggcagcatcggcccccccggccccatcggccccaagggcccccccggcgtgagaggcgaccccggcaccctgaagatcatcagcctgcccggcagccccggcccccccggcacccccggcgagcccggcatgcagggcgagcccggcccccccggcccccccggcaacctgggcccctgcggccccagaggcaagcccggcaaggacggcaagcccggcacccccggccccgccggcgagaagggcaacaagggcagcaagggcgagcccggccccgccggcagcgacggcctgcccggcctgaagggcaagagaggcgacagcggcagccccgccacctggaccaccagaggcttcgtgttcaccagacacagccagaccaccgccatccccagctgccccgagggcaccgtgcccctgtacagcggcttcagcttcctgttcgtgcagggcaaccagagagcccacggccaggacctgggcaccctgggcagctgcctgcagagattcaccaccatgcccttcctgttctgcaacgtgaacgacgtgtgcaacttcgccagcagaaacgactacagctactggctgagcacccccgccctgatgcccatgaacatggcccccatcaccggcagagccctggagccctacatcagcagatgcaccgtgtgcgagggccccgccatcgccatcgccgtgcacagccagaccaccgacatccccccctgcccccacggctggatcagcctgtggaagggcttcagcttcatcatgttcaccagcgccggcagcgagggcaccggccaggccctggccagccccggcagctgcctggaggagttcagagccagccccttcctggagtgccacggcagaggcacctgcaactactacagcaacagctacagcttctggctggccagcctgaaccccgagagaatgttcagaaagcccatccccagcaccgtgaaggccggcgagctggagaagatcatcagcagatgccaggtgtgcatgaagaagagacactga

SEQ ID NO: 7559 - RNA, 5013 nt, synthetic construct
  misc_feature 1..5013: note = derived and/or modified sequence opt5 fromTumstatin__Homo_sapiens__CCDS42829.1
  source 1..5013: mol_type = other RNA
atgagcgccagaaccgctccccggcctcaggtgctgctcctgccgcttctgctcgtcctgcttgccgcggctcccgccgcctccaagggctgcgtttgtaaagacaaggggcaatgcttctgtgatggagctaaaggcgagaagggggaaaaaggatttcctggaccccctgggtctcccggacagaagggcttcacaggccctgaggggctgccgggaccccagggccctaaggggtttcccggactccctggcctgacggggagcaaaggagtgcgcggcatctccggcctgcccgggttctctggaagcccgggcctccctgggacccccggaaacacaggcccttacgggctggtgggagtccccggctgctccggctctaagggggaacagggatttcccggccttcctgggaccctgggatatccgggcattcccggggccgctggcctcaaaggacaaaagggcgcccctgcgaaagaggaagacatcgagctggatgccaagggggaccccggacttcctggcgctcccgggccgcagggactgcctgggccccctggcttccccggccctgtgggacccccgggccctcccgggtttttcggatttcccggcgccatggggcctagaggaccgaagggccacatgggggagcgggttattggccataaaggagaacgcggcgtgaaggggctcacaggaccccctgggccccctggcaccgtcatcgtgacactgaccggacccgataatagaacggacctgaaaggcgagaagggggataaaggcgctatgggagaacctgggcccccgggccctagcggactccccggcgagtcctacgggagcgagaagggagcccctggcgaccccggcctgcaggggaaaccgggaaaggatggcgttcctgggttccccggatctgaaggcgtgaaggggaaccggggatttcctggccttatgggcgaggacgggattaaaggacagaagggcgatatcgggccgcccggattccgcggccctaccgaatattacgacacatatcaagagaaaggggatgaaggaaccccggggccccctggccccagaggcgcgcggggacctcagggcccctccgggcctccgggagtccccggcagccctgggtcttcccgccccggactgagaggcgcccctggctggcccgggctcaagggaagcaaaggcgagcgggggcgcccgggaaaggacgctatgggcacacctgggtctcccggatgtgccggctcccccggcctgcctgggagccccggacctccggggccccctggcgacatcgtgtttagaaagggaccccctggcgatcacgggcttcccggatacctgggctccccgggcattcctggggtggacggacccaaaggcgagcctgggctcctgtgcacccagtgtccctatatccctggacccccgggcctgcctgggctccccggactgcatggcgtcaagggcattcccgggcggcagggagctgccggccttaaagggtctcctggaagcccgggcaatacggggctgcccggcttccctggattccccggcgcccaaggggatcctggactcaagggcgaaaaaggggagacactgcagcccgaaggacaggttggcgtgcctggggacccgggccttcgcggacaacccggcagaaaggggctggatggaatccctggcacccccggggtgaagggactccctggccccaaaggggagctggctctgtccggcgaaaagggagaccagggcccgcctggggatcccggaagccccggctctcctgggcccgcgggacctgccggcccgcccggctacgggcctcagggagagcccggcctccaggggacacaaggagtccctggcgctcccgggccgcctggagaggccggcccccggggcgaactgtccgtgagcacccctgttcccgggcctcccggaccgcctggccctcccgggcaccccggaccgcaggggccccctggcattcccggatctcttggcaaatgcggcgaccctgggctgcccggacctgatggcgagcccgggatcccgggaattggctttcctgggccccctggacccaagggcgaccagggcttcccggggaccaaaggaagcctcggctgtcctgggaagatgggagaacccggcctgcccgggaagcctggactgcccggcgccaaaggcgagcctgctgtggccatgcccgggggacccggcacacctgggtttcccggagaaagaggcaactccggggagcatggagagatcggccttcctggcctccccgggctgcctggaacgccgggcaatgaagggctggatggaccccgcggcgaccctgggcagcccggacctcccggcgagcaaggcccgcctgggcggtgcatcgaaggacccagaggcgcgcaggggctccccggactgaacggccttaaggggcagcagggccgccggggaaaaaccggccctaagggggaccccggcattcctggcctggatagatctgggttcccgggagagacaggcagccccgggatccctggccaccaaggagagatgggccccctcgggcagcgcggataccctggcaatcccgggattctgggaccgcctggcgaagacggggtcatcggcatgatgggatttcccggcgctattgggcctcccggaccgcctggcaaccccgggacccccggacagcggggctcccctgggatccccggcgtgaaaggacagagaggcacacctggggccaagggagagcaaggcgataaagggaatccgggacccagcgaaatctctcacgttattggcgacaagggcgagcctgggctgaagggattcgccggcaaccccggggaaaaaggaaatcgcggcgtgcctgggatgcccggacttaagggcctcaaaggcctgcctgggccggctggaccccctggccccagaggggatctgggatccaccggcaaccctggggagcccggactccggggcatcccgggcagcatggggaatatgggaatgcctggctctaaggggaaacgcggaacgctgggctttcccgggcgggccggaagacccggccttcctggcattcatgggctgcagggagacaagggcgagcccgggtattccgaaggaacacggcctggcccgcccgggcctaccggagatcccggcctccctggcgacatggggaagaaaggagagatgggccagcccgggccgcctggacacctgggccccgctgggcctgaaggagcccccggcagccctggctcccccgggctgccgggaaagcccggccctcatggggatcttggattcaaaggcatcaaggggctcctgggaccccctggcattcgcggcccgcccgggctgcctggatttcccggctctcctgggcccatgggaatcagaggcgaccaagggcgggatggcatccctggacccgcgggcgagaaaggggaaaccggactcctgagagccccgcctggcccccgcgggaaccctggagctcagggcgccaagggggaccggggcgctcccggattcccgggccttcctgggagaaagggagccatgggcgatgcggggccccgcggacccacaggcattgaggggtttcctggaccccctggcctgccgggcgccatcattcccgggcagaccggaaatagaggccctcccgggagccggggatcccctggcgctcccgggccgcctggaccccctggctctcacgtcatcggcattaaaggggacaagggaagcatgggccaccccgggcctaaaggacccccgggcacagccggcgacatggggccccctggacgcctcggcgctcccgggacgcctggactgcccggccctagaggggatccgggattccagggctttcccggcgtgaagggggagaaaggaaaccctggcttcctggggtccatcggaccccctggccccattgggccgaagggacctcccggcgtccggggcgaccctgggacccttaagatcatcagcctccccggatctccgggccctcccgggacacccggagaacctggcatgcaaggggagcccggacctccggggccccctggcaacctgggcccctgtggacctcgcggcaaacccgggaaggatggaaaacctggcaccccggggcccgccggagaaaagggcaataaaggctccaagggggagcctggacccgccggcagcgacgggctgcctggactcaaaggcaagagaggggattctggatcccccgctacatggaccacgcggggcttcgtgtttacccgccatagccagacaaccgcgattccgtcttgccccgaaggcacagttcctctgtacagcgggttctcctttcttttcgtgcagggaaaccagagagcccacggccaagacctggggaccctcggaagctgcctgcagcggtttacgacaatgcccttcctgttttgtaatgtcaacgatgtgtgcaatttcgcttctcgcaacgactattcctactggcttagcacccctgccctgatgcccatgaatatggcccctatcacaggcagagctctcgagccgtatatttcccggtgtaccgtttgcgaggggcccgccatcgcgattgctgtgcattctcagaccacagatatccctccctgtcctcacggatggatcagcctgtggaagggcttttccttcattatgtttacgtctgccggcagcgaagggaccggacaggccctcgcttcccccggctcttgcctggaggagttcagagccagcccgtttcttgaatgtcatgggcgcggaacatgcaactactattccaatagctactctttctggctggcgtccctcaaccctgagcggatgttcagaaaacccatccctagcaccgtcaaggctggcgaactggagaaaattatctctcgctgtcaagtgtgcatgaagaaacggcactga

SEQ ID NO: 7560 - RNA, 5013 nt, synthetic construct
  misc_feature 1..5013: note = derived and/or modified sequence opt6 fromTumstatin__Homo_sapiens__CCDS42829.1
  source 1..5013: mol_type = other RNA
atgagtgctcggacggcgccaagacctcaggtgttgttgttgcctttacttttggtcttattggcagccgcaccggcagcgtctaaaggctgtgtttgtaaagataaggggcagtgcttctgcgatggagctaaaggtgagaaaggagaaaaaggatttccaggacccccaggatcaccagggcaaaaaggtttcacgggccctgaaggattacctgggccacaaggtccgaaaggattcccgggattacctggactaactggttcgaaaggtgtcagaggaatatcaggacttccaggattttcaggttcacccggacttccaggaacacctggcaacacaggaccatatggattagtcggcgtacctgggtgtagtggatctaaaggagagcaaggatttccgggcttgccaggaactttaggctatccaggcatacctggagcagctggactgaaaggacaaaaaggtgctccagcaaaagaagaagatatagaactagatgccaaaggagacccagggttaccgggagcacccggaccacagggactacctgggccgccaggattcccaggaccagtaggtccacctggtccaccgggattttttgggtttccaggcgcaatgggtcctcgagggcccaaaggacacatgggcgaaagagtgataggtcacaaaggggagagaggcgttaagggtttaacaggcccaccaggtccaccaggtacggtaattgtaacactaaccggacccgataataggacagatttgaaaggagaaaaaggagacaaaggcgcaatgggagaaccaggaccaccaggaccaagtggcctacctggagaaagttatggaagcgaaaagggagcaccaggagatccaggactacaaggaaaaccagggaaagatggagtcccaggattcccagggtccgaaggagtaaaggggaataggggatttccaggactgatgggagaagacggaatcaaaggtcaaaaaggtgatataggacccccgggattcagaggacccacagagtattacgatacatatcaggaaaaaggcgacgaaggaactcccggtccacccggaccaagaggagcgaggggtccacaaggaccatctggaccaccaggagttccaggttcgccaggaagttctcgaccaggactaagaggagctcctgggtggccagggttgaaaggatccaagggtgagagagggagaccaggcaaggacgcgatgggtacaccaggatcgccggggtgcgcaggatcaccgggtttgccaggatccccaggcccaccgggaccacccggagatatagtattcaggaaaggcccaccgggggatcatggattaccaggatatttggggagtcctggtatccccggagttgacgggcccaaaggggaaccaggacttttgtgtacacaatgtccatatattccgggtcccccgggacttcccggacttccaggactacatggcgtgaaagggataccagggcgacaaggtgcagccggcctaaaaggatcaccgggatccccaggaaatactggtctcccaggtttcccaggatttcctggagcgcagggagaccccggattaaaaggcgaaaaaggagaaactctacagcctgaaggacaagtaggagttcctggagaccctggtcttagaggacaaccaggaaggaaaggactcgacggtatacccgggaccccgggagttaaaggactacctggtcccaaaggtgagcttgcactttctggagaaaagggcgatcagggaccgccaggagatcccgggagtccagggtcaccaggaccagctggtccagcaggaccgcctggatacggtccacaaggagagcctgggctacaaggaacacaaggggtgccaggtgcaccaggacctcctggggaagcaggaccgagaggagaattaagcgtgtctactccagtgccaggacctccaggaccaccggggccacctggtcatcccggtcctcaaggacccccaggaatcccgggttcattaggaaaatgtggtgacccaggattacctggaccagatggagaaccgggaattccaggaataggatttccaggccctccaggacctaaaggagaccaaggttttccaggaaccaaaggtagtttaggttgcccaggaaaaatgggcgaaccaggtctaccgggtaaaccaggactacctggcgcgaagggtgaaccagctgtagccatgccgggtggacccggaacacctggttttccgggcgaacgtggaaactcgggagagcacggagagattggtctcccaggattaccaggactaccaggcacaccaggtaacgaaggactggatggtccacgcggtgacccaggacaacctgggccaccaggggaacaaggaccacctggaaggtgtatagagggtcccagaggcgctcaaggactacctggattaaatggtttaaagggtcagcaaggcagaagaggtaaaacagggccaaagggcgacccaggtatacccggattggacagatctggttttcctggagaaacaggttctccgggtattccgggccaccaaggtgaaatgggcccgttaggacagaggggttaccctggtaaccccgggatcctaggtccgcctggagaggatggtgtaatagggatgatgggatttcctggagctataggaccacccggaccaccaggaaatcctggcacacctggacagcgcgggtcaccaggaatacctggcgtaaaaggccaaagaggaaccccaggggcaaaaggagaacaaggagacaaaggcaatccgggaccgtcggaaatatctcatgtaatcggagacaaaggtgaacccgggcttaaaggttttgccggcaatccgggagaaaaaggaaatagaggtgtcccaggcatgccaggtttaaaaggtttgaaaggattacccggaccagccgggccgcctggtccgagaggagacttagggtctacggggaacccaggagaaccaggccttagaggaataccaggttccatgggaaatatggggatgcctggaagtaaaggaaaaagaggtacgttagggtttcccggaagggctggacgaccgggattacccgggatacatggtcttcagggagataagggagaaccaggatactcagaaggtactagacctggaccaccaggtcccacgggagacccgggtctacccggcgatatgggaaaaaaaggagaaatgggccaacctggtccgcctggtcatctgggcccagcaggaccagagggtgcaccaggaagcccaggttcaccaggcctaccgggaaaacctggaccacatggtgatttaggatttaaaggaataaaaggattactaggaccacctggcatacgtggtccaccaggattgcccggctttccaggatctccaggtccaatggggattagaggagatcaaggtagagacggaataccggggccagcgggtgaaaaaggagaaacaggtttattacgagctccgccaggaccgcgggggaacccgggggcacaaggagcaaaaggagatagaggtgcaccgggatttccaggactgccaggtcgtaaaggagcgatgggggatgccggacccagaggccctacggggatagaaggcttccccggtcctccgggtcttcccggtgcaataataccaggacaaacaggaaaccgtggacccccagggagtagaggttctcctggagcaccaggacctccgggaccaccaggaagtcatgttatcggcataaagggcgacaaaggcagtatgggacatccaggacctaaaggacctccaggtacagccggagatatgggtccaccagggaggctaggtgccccgggaactccgggacttccaggacccagaggagatccaggatttcagggcttccctggagttaaaggagaaaaaggcaatcctggattcttagggtctataggaccaccagggccaatagggccgaaaggaccaccaggagtgagaggagaccctggaacccttaaaataataagtttacccggatcccctggtccacccgggactccaggagaaccaggtatgcaaggagaaccgggaccaccaggcccgccaggcaatctaggtccttgtggacccagggggaaacctgggaaggatggaaagccaggaaccccaggaccggccggggagaaaggtaataaaggtagtaaaggggagcccggaccagcagggagcgacggattaccaggcctaaagggtaaaagaggggactcaggttcaccggctacttggacgaccagaggctttgtgttcactagacactcacagactacagctattccctcttgtccagagggtacagtcccactatatagtggtttttcattcctttttgtacaaggaaatcaaagggcacatgggcaggatcttggaacgctagggtcgtgtctgcaaagattcactaccatgccctttctattttgtaacgtcaatgatgtatgtaattttgcgtcaagaaatgattatagctactggttgtcaacccctgcattgatgccgatgaacatggcgcccatcacaggtagagcactagaaccgtacatatctagatgtactgtatgtgaaggacctgcaatcgcaattgcagtgcattcacaaacaactgatattcctccatgccctcacgggtggatttcgttgtggaaaggattctcattcataatgtttacatctgcgggatcagaaggaacaggtcaagcacttgcctctccgggaagttgtttggaggaatttcgcgcatcgccttttctagaatgtcatggtagaggaacttgtaactattatagcaatagctacagcttttggctagcttcattgaatccggaaaggatgtttagaaaaccaattccttcaactgttaaagcaggtgaattggagaaaataatttcaagatgccaagtgtgtatgaaaaagcgccactaa

SEQ ID NO: 7561 - protein, 457 aa, synthetic construct
  REGION 1..457: note = Vasostatin__Homo_sapiens__P10645
MRSAAVLALLLCAGQVTALPVNSPMNKGDTEVMKCIVEVISDTLSKPSPMPVSQECFETLRGDERILSILRHQNLLKELQDLALQGAKERAHQQKKHSGFEDELSEVLENQSSQAELKEAVEEPSSKDVMEKREDSKEAEKSGEATDGARPQALPEPMQESKAEGNNQAPGEEEEEEEEATNTHPPASLPSQKYPGPQAEGDSEGLSQGLVDREKGLSAEPGWQAKREEEEEEEEEAEAGEEAVPEEEGPTVVLNPHPSLGYKEIRKGESRSEALAVDGAGKPGAEEAQDPEGKGEQEHSQQKEEEEEMAVVPQGLFRGGKSGELEQEEERLSKEWEDSKRWSKMDQLAKELTAEKRLEGQEEEEDNRDSSMKLSFRARAYGFRGPGPQLRRGWRPSSREDSLEAGLPLQVRGYPEEKKEEEGSANRRPEDQELESLSAIEAELEKVAHQLQALRRG

SEQ ID NO: 7562 - RNA, 1374 nt, synthetic construct
  misc_feature 1..1374: note = Vasostatin__Homo_sapiens__AAH01059
  source 1..1374: mol_type = other RNA
atgcgctccgccgctgtcctggctcttctgctctgcgccgggcaagtcactgcgctccctgtgaacagccctatgaataaaggggataccgaggtgatgaaatgcatcgttgaggtcatctccgacacactttccaagcccagccccatgcctgtcagccaggaatgttttgagacactccgaggagatgaacggatcctttccattctgagacatcagaatttactgaaggagctccaagacctcgctctccaaggcgccaaggagagggcacatcagcagaagaaacacagcggttttgaagatgaactctcagaggttcttgagaaccagagcagccaggccgagctgaaagaggcggtggaagagccatcatccaaggatgttatggagaaaagagaggattccaaggaggcagagaaaagtggtgaagccacagacggagccaggccccaggccctcccggagcccatgcaggagtccaaggctgaggggaacaatcaggcccctggggaggaagaggaggaggaggaggaggccaccaacacccaccctccagccagcctccccagccagaaatacccaggcccacaggccgagggggacagtgagggcctctctcagggtctggtggacagagagaagggcctgagtgcagagccagggtggcaggcaaagagagaagaggaggaggaggaggaggaggaggctgaggctggagaggaggctgtccccgaggaagaaggccccactgtagtgctgaacccccacccgagccttggctacaaggagatccggaaaggcgagagtcggtcggaggctctggctgtggatggagctgggaagcctggggctgaggaggctcaggaccccgaagggaagggagaacaggagcactcccagcagaaagaggaggaggaggagatggcagtggtcccgcaaggcctcttccggggtgggaagagcggagagctggagcaggaggaggagcggctctccaaggagtgggaggactccaaacgctggagcaagatggaccagctggccaaggagctgacggctgagaagcggctggaggggcaggaggaggaggaggacaaccgggacagttccatgaagctctccttccgggcccgggcctacggcttcaggggccctgggccgcagctgcgacgaggctggaggccatcctcccgggaggacagccttgaggcgggcctgcccctccaggtccgaggctaccccgaggagaagaaagaggaggagggcagcgcaaaccgcagaccagaggaccaggagctggagagcctgtcggccattgaggcagagctggagaaagtggcccaccagctgcaggcactacggcggggctga

SEQ ID NO: 7563 - RNA, 1374 nt, synthetic construct
  misc_feature 1..1374: note = derived and/or modified sequence opt1 fromVasostatin__Homo_sapiens__AAH01059
  source 1..1374: mol_type = other RNA
atgcgcagcgccgccgtgctggcgctcctgctgtgcgccggccaggtcaccgccctccccgtgaactccccgatgaacaagggggacaccgaggtgatgaagtgcatcgtcgaggtgatcagcgacacgctgtccaagcccagccccatgcccgtgtcccaggagtgcttcgagaccctgcggggcgacgagcgcatcctcagcatcctgcggcaccagaacctgctcaaggagctgcaggacctggccctccagggggccaaggagcgcgcgcaccagcagaagaagcactccggcttcgaggacgagctgagcgaggtcctggagaaccagtccagccaggccgagctcaaggaggccgtggaggagccgtccagcaaggacgtgatggagaagcgggaggactccaaggaggccgagaagtccggggaggcgaccgacggcgcccgcccccaggccctgcccgagcccatgcaggagagcaaggccgagggcaacaaccaggccccgggggaggaggaggaggaggaggaggaggcgaccaacacgcacccgcccgccagcctgccctcccagaagtaccccggcccccaggccgagggggacagcgagggcctctcccaggggctggtcgaccgggagaagggcctgagcgccgagcccggctggcaggccaagcgcgaggaggaggaggaggaggaggaggaggcggaggccggggaggaggccgtgcccgaggaggagggcccgaccgtggtcctcaacccccaccccagcctggggtacaaggagatccggaagggcgagtcccgcagcgaggccctggccgtggacggcgcggggaagcccggcgccgaggaggcccaggacccggaggggaagggcgagcaggagcactcccagcagaaggaggaggaggaggagatggccgtggtcccccaggggctgttccggggcggcaagagcggggagctggagcaggaggaggagcgcctgtccaaggagtgggaggacagcaagcggtggtccaagatggaccagctcgccaaggagctgaccgcggagaagcgcctggagggccaggaggaggaggaggacaaccgggacagctccatgaagctcagcttccgcgcccgggcctacgggttccgcggccccgggccccagctgcggcgcggctggcggccgtccagccgcgaggactccctggaggccggcctccccctccaggtgcgcgggtaccccgaggagaagaaggaggaggagggcagcgcgaaccggcgccccgaggaccaggagctggagtccctcagcgccatcgaggccgagctggagaaggtggcccaccagctgcaggccctccggcgcgggtga

SEQ ID NO: 7564 - RNA, 1374 nt, synthetic construct
  misc_feature 1..1374: note = derived and/or modified sequence opt2 fromVasostatin__Homo_sapiens__AAH01059
  source 1..1374: mol_type = other RNA
atgcgctccgccgccgtcctcgccctcctcctctgcgccggccaggtcaccgccctccccgtcaactcccccatgaacaagggcgacaccgaggtcatgaagtgcatcgtcgaggtcatctccgacaccctctccaagccctcccccatgcccgtctcccaggagtgcttcgagaccctccgcggcgacgagcgcatcctctccatcctccgccaccagaacctcctcaaggagctccaggacctcgccctccagggcgccaaggagcgcgcccaccagcagaagaagcactccggcttcgaggacgagctctccgaggtcctcgagaaccagtcctcccaggccgagctcaaggaggccgtcgaggagccctcctccaaggacgtcatggagaagcgcgaggactccaaggaggccgagaagtccggcgaggccaccgacggcgcccgcccccaggccctccccgagcccatgcaggagtccaaggccgagggcaacaaccaggcccccggcgaggaggaggaggaggaggaggaggccaccaacacccacccccccgcctccctcccctcccagaagtaccccggcccccaggccgagggcgactccgagggcctctcccagggcctcgtcgaccgcgagaagggcctctccgccgagcccggctggcaggccaagcgcgaggaggaggaggaggaggaggaggaggccgaggccggcgaggaggccgtccccgaggaggagggccccaccgtcgtcctcaacccccacccctccctcggctacaaggagatccgcaagggcgagtcccgctccgaggccctcgccgtcgacggcgccggcaagcccggcgccgaggaggcccaggaccccgagggcaagggcgagcaggagcactcccagcagaaggaggaggaggaggagatggccgtcgtcccccagggcctcttccgcggcggcaagtccggcgagctcgagcaggaggaggagcgcctctccaaggagtgggaggactccaagcgctggtccaagatggaccagctcgccaaggagctcaccgccgagaagcgcctcgagggccaggaggaggaggaggacaaccgcgactcctccatgaagctctccttccgcgcccgcgcctacggcttccgcggccccggcccccagctccgccgcggctggcgcccctcctcccgcgaggactccctcgaggccggcctccccctccaggtccgcggctaccccgaggagaagaaggaggaggagggctccgccaaccgccgccccgaggaccaggagctcgagtccctctccgccatcgaggccgagctcgagaaggtcgcccaccagctccaggccctccgccgcggctga

SEQ ID NO: 7565 - RNA, 1374 nt, synthetic construct
  misc_feature 1..1374: note = derived and/or modified sequence opt3 fromVasostatin__Homo_sapiens__AAH01059
  source 1..1374: mol_type = other RNA
atgagaagcgccgctgtgctggcactccttctgtgcgccggccaggtcaccgcgttgcccgttaactcccctatgaataagggggacacagaggtgatgaaatgtatcgtagaagtgatttctgatactttatcaaagccaagtccgatgcccgtcagccaagagtgcttcgaaacgctgaggggagacgagcggatactatccatcctccgccaccagaacctgcttaaagaactgcaggatttggctctccagggtgccaaggagcgagcacatcaacagaaaaagcactctggctttgaggacgaactgtcggaggtgctggaaaatcagtcaagccaggccgagctcaaggaggctgttgaggagcctagttccaaagatgtgatggaaaagcgtgaggactctaaagaagcagaaaagagcggggaggccaccgatggagctagaccacaagccttacccgaacctatgcaggagtccaaagcggaaggcaacaatcaggcaccaggtgaggaagaggaggaagaggaagaggccacaaacactcatccccctgcttcactgccaagtcagaagtacccggggccccaagccgaaggagacagcgagggcctttctcagggcttggtcgatagggagaaggggctgtccgcagaacctggatggcaggctaaacgggaggaagaggaggaagaggaagaggaagccgaggcgggtgaggaagccgtgccagaggaagagggccccaccgtagttctaaatcctcacccatcactcgggtataaggaaattcgcaaaggagagagcagaagtgaggcactggctgtggacggcgccggtaagcccggggctgaagaggcccaagatccggaaggaaaaggcgagcaggaacattctcagcagaaggaggaggaagaggaaatggcagtcgtgcctcaaggccttttcaggggagggaaatccggtgagctggagcaggaagaggaacggttgagcaaggagtgggaagactcgaagcgctggtctaaaatggatcagctcgccaaggagctgacagctgagaaacgattagaaggccaggaggaagaggaagacaacagagactcctcaatgaagctgagttttagggcgcgggcatacgggttccgtggacccggcccacaactccgcagaggttggaggcctagctcccgggaggattctcttgaggccgggctgcccctacaggtgcgaggctatccagaagagaaaaaggaagaggaaggaagcgctaatcgcagacccgaggaccaggagttggaatcactgagtgccatcgaggcagaactcgagaaggtcgcccaccagctgcaagctcttaggcggggctga

SEQ ID NO: 7566 - RNA, 1374 nt, synthetic construct
  misc_feature 1..1374: note = derived and/or modified sequence opt4 fromVasostatin__Homo_sapiens__AAH01059
  source 1..1374: mol_type = other RNA
atgagaagcgccgccgtgctggccctgctgctgtgcgccggccaggtgaccgccctgcccgtgaacagccccatgaacaagggcgacaccgaggtgatgaagtgcatcgtggaggtgatcagcgacaccctgagcaagcccagccccatgcccgtgagccaggagtgcttcgagaccctgagaggcgacgagagaatcctgagcatcctgagacaccagaacctgctgaaggagctgcaggacctggccctgcagggcgccaaggagagagcccaccagcagaagaagcacagcggcttcgaggacgagctgagcgaggtgctggagaaccagagcagccaggccgagctgaaggaggccgtggaggagcccagcagcaaggacgtgatggagaagagagaggacagcaaggaggccgagaagagcggcgaggccaccgacggcgccagaccccaggccctgcccgagcccatgcaggagagcaaggccgagggcaacaaccaggcccccggcgaggaggaggaggaggaggaggaggccaccaacacccacccccccgccagcctgcccagccagaagtaccccggcccccaggccgagggcgacagcgagggcctgagccagggcctggtggacagagagaagggcctgagcgccgagcccggctggcaggccaagagagaggaggaggaggaggaggaggaggaggccgaggccggcgaggaggccgtgcccgaggaggagggccccaccgtggtgctgaacccccaccccagcctgggctacaaggagatcagaaagggcgagagcagaagcgaggccctggccgtggacggcgccggcaagcccggcgccgaggaggcccaggaccccgagggcaagggcgagcaggagcacagccagcagaaggaggaggaggaggagatggccgtggtgccccagggcctgttcagaggcggcaagagcggcgagctggagcaggaggaggagagactgagcaaggagtgggaggacagcaagagatggagcaagatggaccagctggccaaggagctgaccgccgagaagagactggagggccaggaggaggaggaggacaacagagacagcagcatgaagctgagcttcagagccagagcctacggcttcagaggccccggcccccagctgagaagaggctggagacccagcagcagagaggacagcctggaggccggcctgcccctgcaggtgagaggctaccccgaggagaagaaggaggaggagggcagcgccaacagaagacccgaggaccaggagctggagagcctgagcgccatcgaggccgagctggagaaggtggcccaccagctgcaggccctgagaagaggctga

SEQ ID NO: 7567 - RNA, 1374 nt, synthetic construct
  misc_feature 1..1374: note = derived and/or modified sequence opt5 fromVasostatin__Homo_sapiens__AAH01059
  source 1..1374: mol_type = other RNA
atgagaagcgccgctgtgctggccctcctgctttgcgcgggccaggtcaccgctctgcccgttaactcccctatgaataagggggacacagaggtgatgaaatgtatcgtggaagtcatttctgatacgctcagcaagccgtcccccatgcctgtgtctcaagagtgcttcgaaaccctgcggggagacgagcgcatccttagcattctgagacaccagaacctcctgaaagaactgcaggatctcgccctgcagggcgccaaggagcgggctcatcaacagaaaaagcactccgggtttgaggacgaactttctgaggttctggaaaatcagagctcccaggccgagctcaaggaggctgtggaggagcccagctctaaagatgtcatggaaaagcgcgaggactccaaagaagccgaaaagagcggagaggcgacagatggcgccagacctcaagctctgcccgaacctatgcaggagtctaaagccgaagggaacaatcaggctccgggagaggaagaggaggaagaggaagaggccaccaacacacatccccctgcgtcccttcccagccagaagtaccctggcccccaagccgaaggcgactctgaggggctgtcccagggactcgtggatcgggagaagggcctgagcgctgaaccggggtggcaggccaaacgcgaggaagaggaggaagaggaagaggaagctgaggccggagaggaagccgttcctgaggaagagggccccaccgtggtcctgaatcctcacccctccctcgggtataaggaaatcagaaaaggagagtctcggagcgaggctctggcggtggacggcgccggcaagcccggggctgaagaggcccaagatcctgaaggaaaaggcgagcaggaacattcccagcagaaggaggaggaagaggaaatggccgtggtcccgcaagggcttttccgcggaggcaaaagcggggagctggagcaggaagaggaaagactctctaaggagtgggaagactccaagcggtggagcaaaatggatcagctggctaaggagcttacagccgagaaacgcctggaaggacaggaggaagaggaagacaacagagactctagcatgaagctctcctttcgggcgcgcgcttacggcttcagaggccccgggcctcaactgcggagaggatggcgcccctctagccgggaggattccctggaggccggcctccctctgcaggttagagggtatcccgaagagaaaaaggaagaggaaggaagcgccaatcgccggccggaggaccaggagcttgaatctctgtccgctattgaggccgaactcgagaaggtggctcaccagctgcaagcccttagacgcggctga

SEQ ID NO: 7568 - RNA, 1374 nt, synthetic construct
  misc_feature 1..1374: note = derived and/or modified sequence opt6 fromVasostatin__Homo_sapiens__AAH01059
  source 1..1374: mol_type = other RNA
atgagatcagcagcagtattagcattattattatgtgcaggacaggtaacggcactgccagtgaattccccaatgaataaaggagatacagaagtaatgaaatgtatagtagaagtaataagcgatacattaagcaaacccagtccaatgccagtatcacaagaatgttttgaaacattaagaggtgatgaaagaatattaagtatacttagacatcaaaatctattaaaagaattacaagatttagcactacagggagcaaaagaaagagcacatcaacaaaagaaacacagtggtttcgaagatgaattatcagaagtgttagaaaatcaaagttcacaagcagaactaaaagaggcagtggaagaaccaagtagcaaagatgtaatggaaaagagggaagatagtaaagaggcggaaaaaagtggagaagcgacggatggagctcgaccacaagcattaccagaacctatgcaggaaagtaaagcggaaggaaacaatcaagcaccaggagaggaagaagaagaagaagaagaagctacaaatacacatcctccagcgagcctaccgagtcaaaaatatcctggaccacaggcagaaggagattcagaaggattaagtcaaggacttgtagatagagaaaaaggactaagtgctgaacccggttggcaagcaaaaagggaagaagaagaagaagaagaagaagaagcagaagcaggagaagaagcagtaccggaagaagaaggaccaacggtcgtgctaaatccacatccaagtttaggatacaaagaaataagaaaaggagaaagcagaagtgaggcattagctgtagatggtgcaggaaaaccgggagctgaagaagctcaagacccagaaggaaaaggagaacaagaacatagccaacaaaaggaagaagaagaagaaatggctgtagtaccacaaggactattcagaggaggaaaaagcggagaattagagcaagaagaagaaagattaagtaaagaatgggaagatagtaaaagatggagtaaaatggatcaattagcaaaagaactcacggcagaaaaaagactagaaggacaagaagaagaagaagacaacagagatagttcaatgaaactaagttttagagcaagagcgtacggatttaggggaccagggccacaactaaggaggggatggagaccatcaagtagagaagatagtttagaagcaggattacctttacaagtaagaggatatccagaagaaaaaaaagaagaagaaggaagcgcgaacaggagaccagaagatcaagaattggagagcctaagtgcaatagaagcagagttagaaaaggtagcacatcaattgcaagcattacgaagaggatga

SEQ ID NO: 7569 - protein, 212 aa, synthetic construct [sequence omitted]

SEQ ID NO: 7570 - RNA, 639 nt, synthetic construct
  misc_feature 1..639: note = calreticulin__Homo_sapiens__BAG58223
  source 1..639: mol_type = other RNA
atgctgctatccgtctacttcaaggagcagtttctggacggagacgggtggacttcccgctggatcgaatccaaacacaagtcagattttggcaaattcgttctcagttccggcaagttctacggtgacgaggagaaagataaaggtttgcagacaagccaggatgcacgcttttatgctctgtcggccagtttcgagcctttcagcaacaaaggccagacgctggtggtgcagttcacggtgaaacatgagcagaacatcgactgtgggggcggctatgtgaagctgtttcctaatagtttggaccagacagacatgcacggagactcagaatacaacatcatgtttggtcccgacatctgtggccctggcaccaagaaggttcatgtcatcttcaactacaagggcaagaacgtgctgatcaacaaggacatccgttgcaaggatgatgagtttacacacctgtacacactgattgtgcggccagacaacacctatgaggtgaagattgacaacagccaggtggagtccggctccttggaagacgattgggacttcctgccacccaagaagataaaggatcctgatgcttcaaaaccggaagactgggatgagcgggccaagatcgatgatccctga

SEQ ID NO: 7571 - RNA, 639 nt, synthetic construct
  misc_feature 1..639: note = derived and/or modified sequence opt1 fromcalreticulin__Homo_sapiens__BAG58223
  source 1..639: mol_type = other RNA
atgctgctcagcgtgtacttcaaggagcagttcctggacggcgacgggtggacctcccgctggatcgagagcaagcacaagtccgacttcggcaagttcgtcctgagctccgggaagttctacggcgacgaggagaaggacaaggggctccagaccagccaggacgcccggttctacgccctgtccgcgagcttcgagcccttctccaacaagggccagacgctggtggtgcagttcaccgtcaagcacgagcagaacatcgactgcggcgggggctacgtgaagctgttcccgaacagcctcgaccagaccgacatgcacggggactccgagtacaacatcatgttcggccccgacatctgcgggcccggcaccaagaaggtgcacgtcatcttcaactacaagggcaagaacgtgctgatcaacaaggacatccgctgcaaggacgacgagttcacgcacctctacaccctgatcgtgcggcccgacaacacctacgaggtcaagatcgacaacagccaggtggagtccgggagcctggaggacgactgggacttcctcccgcccaagaagatcaaggaccccgacgcctccaagcccgaggactgggacgagcgcgccaagatcgacgacccgtga

SEQ ID NO: 7572 - RNA, 639 nt, synthetic construct
  misc_feature 1..639: note = derived and/or modified sequence opt2 fromcalreticulin__Homo_sapiens__BAG58223
  source 1..639: mol_type = other RNA
atgctcctctccgtctacttcaaggagcagttcctcgacggcgacggctggacctcccgctggatcgagtccaagcacaagtccgacttcggcaagttcgtcctctcctccggcaagttctacggcgacgaggagaaggacaagggcctccagacctcccaggacgcccgcttctacgccctctccgcctccttcgagcccttctccaacaagggccagaccctcgtcgtccagttcaccgtcaagcacgagcagaacatcgactgcggcggcggctacgtcaagctcttccccaactccctcgaccagaccgacatgcacggcgactccgagtacaacatcatgttcggccccgacatctgcggccccggcaccaagaaggtccacgtcatcttcaactacaagggcaagaacgtcctcatcaacaaggacatccgctgcaaggacgacgagttcacccacctctacaccctcatcgtccgccccgacaacacctacgaggtcaagatcgacaactcccaggtcgagtccggctccctcgaggacgactgggacttcctcccccccaagaagatcaaggaccccgacgcctccaagcccgaggactgggacgagcgcgccaagatcgacgacccctga

SEQ ID NO: 7573 - RNA, 639 nt, synthetic construct
  misc_feature 1..639: note = derived and/or modified sequence opt3 fromcalreticulin__Homo_sapiens__BAG58223
  source 1..639: mol_type = other RNA
atgctgctcagcgtgtacttcaaggagcagtttcttgacggcgatgggtggacctccagatggatcgaatctaaacacaagtcagacttcggaaaatttgtcctgagtagcggtaagttctatggcgatgaggaaaaagacaaggggttgcaaacatcccaggatgccaggttttacgctttatctgcatcgttcgagcccttttcaaacaagggacagactctggttgtgcagttcacggtaaaacatgaacaaaatattgactgcggcggtgggtatgtgaagctatttcctaacagcctcgatcagaccgacatgcacggagatagtgagtacaatataatgttcggcccagacatctgtggcccggggactaaaaaggtccatgtgatttttaactataaaggaaagaatgttctgatcaacaaggatattcggtgcaaagacgatgagttcacacacctttacaccctgatcgtgcgccccgacaatacatatgaagtcaagatagacaactcccaggtggagtctggtagcttggaagatgactgggattttctccctcccaaaaagatcaaagacccagatgcctccaagcctgaggactgggatgagcgagcgaaaattgacgatccatga

SEQ ID NO: 7574 - RNA, 639 nt, synthetic construct
  misc_feature 1..639: note = derived and/or modified sequence opt4 fromcalreticulin__Homo_sapiens__BAG58223
  source 1..639: mol_type = other RNA
atgctgctgagcgtgtacttcaaggagcagttcctggacggcgacggctggaccagcagatggatcgagagcaagcacaagagcgacttcggcaagttcgtgctgagcagcggcaagttctacggcgacgaggagaaggacaagggcctgcagaccagccaggacgccagattctacgccctgagcgccagcttcgagcccttcagcaacaagggccagaccctggtggtgcagttcaccgtgaagcacgagcagaacatcgactgcggcggcggctacgtgaagctgttccccaacagcctggaccagaccgacatgcacggcgacagcgagtacaacatcatgttcggccccgacatctgcggccccggcaccaagaaggtgcacgtgatcttcaactacaagggcaagaacgtgctgatcaacaaggacatcagatgcaaggacgacgagttcacccacctgtacaccctgatcgtgagacccgacaacacctacgaggtgaagatcgacaacagccaggtggagagcggcagcctggaggacgactgggacttcctgccccccaagaagatcaaggaccccgacgccagcaagcccgaggactgggacgagagagccaagatcgacgacccctga

SEQ ID NO: 7575 - RNA, 639 nt, synthetic construct
  misc_feature 1..639: note = derived and/or modified sequence opt5 fromcalreticulin__Homo_sapiens__BAG58223
  source 1..639: mol_type = other RNA
atgctgctcagcgtgtacttcaaggagcagtttctggacggcgatgggtggacctccagatggatcgaatctaaacacaagagcgacttcggaaaatttgtcctttcctctggcaagttctatggggatgaggaaaaagacaagggactgcaaacaagccaggatgcccggttttacgctctctccgcctctttcgagccctttagcaacaagggccagacgctggttgtgcagttcaccgtgaaacatgaacaaaatattgactgcgggggaggctatgtcaaactttttcctaactccctggatcagacagacatgcacggcgatagcgagtacaatatcatgttcgggccggacatttgtggacccggcaccaagaaggtgcatgttatctttaactataaagggaagaatgtgctcattaacaaggatatccgctgcaaagacgatgagttcacacacctgtacaccctgatcgtcagacctgacaatacatatgaagtgaagattgacaactctcaggttgagtccggaagcctcgaagatgactgggattttctgccccctaaaaagatcaaagaccccgatgcgtctaagcctgaggactgggatgagcgggctaaaattgacgatccgtga

SEQ ID NO: 7576 - RNA, 639 nt, synthetic construct
  misc_feature 1..639: note = derived and/or modified sequence opt6 fromcalreticulin__Homo_sapiens__BAG58223
  source 1..639: mol_type = other RNA
atgctactaagcgtatacttcaaagaacaattcctagacggagacggatggacatcaagatggatcgaatcaaaacacaaatcagacttcggaaaattcgtactatcatcaggaaaattttacggagacgaagaaaaagacaaaggactccaaacatcacaagacgcaagattctacgcactatcagcatcattcgaaccattctcaaacaaaggacaaacactagtcgtacaattcacagtaaaacacgaacaaaacatagactgcggaggaggatacgtaaaactattcccaaactcactagaccaaacagatatgcacggagacagcgaatacaacataatgttcggaccagacatatgcggaccaggaacaaaaaaagtacacgtaatattcaactacaaaggaaaaaacgtactaataaacaaagacataagatgcaaagacgacgaattcacacacctatacacactaatagtaagaccagataacacatacgaagtcaaaatagacaactcacaagtagaatcaggatccttagaagacgactgggacttcctaccaccaaaaaaaataaaagacccagacgcatcaaaaccagaagactgggacgaaagagcaaaaatagacgacccataa

SEQ ID NO: 7577 - protein, 296 aa, synthetic construct
  REGION 1..296: note = calreticulin__Homo_sapiens__B4E2Y9
MHGDSEYNIMFGPDICGPGTKKVHVIFNYKGKNVLINKDIRCKDDEFTHLYTLIVRPDNTYEVKIDNSQVESGSLEDDWDFLPPKKIKDPDASKPEDWDERAKIDDPTDSKPEDWDKPEHIPDPDAKKPEDWDEEMDGEWEPPVIQNPEYKGEWKPRQIDNPDYKGTWIHPEIDNPEYSPDPSIYAYDNFGVLGLDLWQVKSGTIFDNFLITNDEAYAEEFGNETWGVTKAAEKQMKDKQDEEQRLKEEEEDKKRKEEEEAEDKEDDEDKDEDEEDEEDKEEDEEEDVPGQAKDEL

SEQ ID NO: 7578 - RNA, 891 nt, synthetic construct
  misc_feature 1..891: note = calreticulin__Homo_sapiens__BAG65301
  source 1..891: mol_type = other RNA
atgcacggagactcagaatacaacatcatgtttggtcccgacatctgtggccctggcaccaagaaggttcatgtcatcttcaactacaagggcaagaacgtgctgatcaacaaggacatccgttgcaaggatgatgagtttacacacctgtacacactgattgtgcggccagacaacacctatgaggtgaagattgacaacagccaggtggagtccggctccttggaagacgattgggacttcctgccacccaagaagataaaggatcctgatgcttcaaaaccggaagactgggatgagcgggccaagatcgatgatcccacagactccaagcctgaggactgggacaagcccgagcatatccctgaccctgatgctaagaagcccgaggactgggatgaagagatggacggagagtgggaacccccagtgattcagaaccctgagtacaagggtgagtggaagccccggcagatcgacaacccagattacaagggcacttggatccacccagaaattgacaaccccgagtattctcccgatcccagtatctatgcctatgataactttggcgtgctgggcctggacctctggcaggtcaagtctggcaccatctttgacaacttcctcatcaccaacgatgaggcatacgctgaggagtttggcaacgagacgtggggcgtaacaaaggcagcagagaaacaaatgaaggacaaacaggacgaggagcagaggcttaaggaggaggaagaagacaagaaacgcaaagaggaggaggaggcagaggacaaggaggatgatgaggacaaagatgaggatgaggaggatgaggaggacaaggaggaagatgaggaggaagatgtccccggccaggccaaggacgagctgtag

SEQ ID NO: 7579 - RNA, 891 nt, synthetic construct
  misc_feature 1..891: note = derived and/or modified sequence opt1 fromcalreticulin__Homo_sapiens__BAG65301
  source 1..891: mol_type = other RNA
atgcacggcgacagcgagtacaacatcatgttcgggcccgacatctgcggcccggggaccaagaaggtgcacgtcatcttcaactacaagggcaagaacgtgctgatcaacaaggacatccgctgcaaggacgacgagttcacccacctctacacgctgatcgtgcggcccgacaacacctacgaggtcaagatcgacaactcccaggtggagagcgggtccctggaggacgactgggacttcctcccgcccaagaagatcaaggaccccgacgccagcaagcccgaggactgggacgagcgcgccaagatcgacgaccccaccgactccaagcccgaggactgggacaagccggagcacatccccgaccccgacgcgaagaagcccgaggactgggacgaggagatggacggcgagtgggagccgcccgtgatccagaaccccgagtacaagggcgagtggaagccccggcagatcgacaacccggactacaaggggacctggatccaccccgagatcgacaaccccgagtacagccccgacccgtccatctacgcctacgacaacttcggcgtcctggggctggacctctggcaggtcaagagcggcacgatcttcgacaacttcctgatcaccaacgacgaggcctacgccgaggagttcgggaacgagacctggggcgtgaccaaggccgcggagaagcagatgaaggacaagcaggacgaggagcagcgcctgaaggaggaggaggaggacaagaagcggaaggaggaggaggaggccgaggacaaggaggacgacgaggacaaggacgaggacgaggaggacgaggaggacaaggaggaggacgaggaggaggacgtgcccggccaggccaaggacgagctctga

SEQ ID NO: 7580 - RNA, 891 nt, synthetic construct
  misc_feature 1..891: note = derived and/or modified sequence opt2 fromcalreticulin__Homo_sapiens__BAG65301
  source 1..891: mol_type = other RNA
atgcacggcgactccgagtacaacatcatgttcggccccgacatctgcggccccggcaccaagaaggtccacgtcatcttcaactacaagggcaagaacgtcctcatcaacaaggacatccgctgcaaggacgacgagttcacccacctctacaccctcatcgtccgccccgacaacacctacgaggtcaagatcgacaactcccaggtcgagtccggctccctcgaggacgactgggacttcctcccccccaagaagatcaaggaccccgacgcctccaagcccgaggactgggacgagcgcgccaagatcgacgaccccaccgactccaagcccgaggactgggacaagcccgagcacatccccgaccccgacgccaagaagcccgaggactgggacgaggagatggacggcgagtgggagccccccgtcatccagaaccccgagtacaagggcgagtggaagccccgccagatcgacaaccccgactacaagggcacctggatccaccccgagatcgacaaccccgagtactcccccgacccctccatctacgcctacgacaacttcggcgtcctcggcctcgacctctggcaggtcaagtccggcaccatcttcgacaacttcctcatcaccaacgacgaggcctacgccgaggagttcggcaacgagacctggggcgtcaccaaggccgccgagaagcagatgaaggacaagcaggacgaggagcagcgcctcaaggaggaggaggaggacaagaagcgcaaggaggaggaggaggccgaggacaaggaggacgacgaggacaaggacgaggacgaggaggacgaggaggacaaggaggaggacgaggaggaggacgtccccggccaggccaaggacgagctctga

SEQ ID NO: 7581 - RNA, 891 nt, synthetic construct
  misc_feature 1..891: note = derived and/or modified sequence opt3 fromcalreticulin__Homo_sapiens__BAG65301
  source 1..891: mol_type = other RNA
atgcacggcgacagcgagtacaacatcatgttcgggcccgatatttgcggacctggtaccaagaaagtgcatgtcatatttaattataagggcaaaaacgttctgatcaataaggacattagatgtaaagatgacgaatttacacacctctacactcttatcgtgaggccagataacacgtatgaggtaaagattgacaattcccaggtggaatctgggtcactggaggatgactgggatttcttgccgcccaagaaaatcaaggaccctgatgccagtaaaccagaagactgggatgagcgggctaagatagacgaccccaccgatagcaaacctgaggactgggataagccagaacatatccccgaccctgatgcaaagaaaccagaggactgggatgaagagatggacggagagtgggaaccgcccgtcattcaaaaccctgagtacaagggcgaatggaaaccacgccagatcgataatcccgactataagggtacatggattcaccctgagatcgataacccagaatactcccccgacccgtctatatatgcctacgacaatttcggggtgttaggactggatctatggcaggttaaatcgggcactatttttgacaacttcctcatcaccaatgatgaggcgtacgctgaggaatttggcaacgagacatggggagtgaccaaggccgcagaaaaacagatgaaggacaagcaagatgaggaacagcgactgaaagaggaggaagaggacaagaaacgtaaggaagaggaagaggccgaggataaagaagacgatgaggacaaggatgaagacgaggaggatgaagaggacaaggaagaggacgaagaggaggatgtccctgggcaggctaaagacgaactttga

SEQ ID NO: 7582 - RNA, 891 nt, synthetic construct
  misc_feature 1..891: note = derived and/or modified sequence opt4 fromcalreticulin__Homo_sapiens__BAG65301
  source 1..891: mol_type = other RNA
atgcacggcgacagcgagtacaacatcatgttcggccccgacatctgcggccccggcaccaagaaggtgcacgtgatcttcaactacaagggcaagaacgtgctgatcaacaaggacatcagatgcaaggacgacgagttcacccacctgtacaccctgatcgtgagacccgacaacacctacgaggtgaagatcgacaacagccaggtggagagcggcagcctggaggacgactgggacttcctgccccccaagaagatcaaggaccccgacgccagcaagcccgaggactgggacgagagagccaagatcgacgaccccaccgacagcaagcccgaggactgggacaagcccgagcacatccccgaccccgacgccaagaagcccgaggactgggacgaggagatggacggcgagtgggagccccccgtgatccagaaccccgagtacaagggcgagtggaagcccagacagatcgacaaccccgactacaagggcacctggatccaccccgagatcgacaaccccgagtacagccccgaccccagcatctacgcctacgacaacttcggcgtgctgggcctggacctgtggcaggtgaagagcggcaccatcttcgacaacttcctgatcaccaacgacgaggcctacgccgaggagttcggcaacgagacctggggcgtgaccaaggccgccgagaagcagatgaaggacaagcaggacgaggagcagagactgaaggaggaggaggaggacaagaagagaaaggaggaggaggaggccgaggacaaggaggacgacgaggacaaggacgaggacgaggaggacgaggaggacaaggaggaggacgaggaggaggacgtgcccggccaggccaaggacgagctgtga

SEQ ID NO: 7583 - RNA, 891 nt, synthetic construct
  misc_feature 1..891: note = derived and/or modified sequence opt5 fromcalreticulin__Homo_sapiens__BAG65301
  source 1..891: mol_type = other RNA
atgcacggcgacagcgagtacaacatcatgttcgggcccgatatttgcggacctggcaccaagaaagtgcatgtcatctttaattataaggggaaaaacgttctgattaataaggacatcagatgtaaagatgacgagttcacacacctctacacgctgattgtgcggccggataacacctatgaagtgaagatcgacaattcccaggtcgaatctggaagccttgaggatgactgggattttctgccccctaagaaaatcaaggaccccgatgcctccaaacctgaagactgggatgagcgcgctaagattgacgaccccacagattctaaacctgaggactgggataagccggaacatatccccgaccctgatgccaagaaacccgaggactgggatgaagagatggacggcgagtgggaacctcccgtgattcaaaacccggagtacaagggggaatggaaacctagacagatcgataatcccgactataagggaacctggattcaccctgagatcgataaccccgaatacagccccgacccttccatttatgcgtacgacaatttcggcgttctcggcctggatctttggcaagtgaaatctgggacaatctttgacaacttcctgatcaccaatgatgaggcttacgccgaggaatttggaaacgagacatggggcgtcaccaaggccgctgaaaaacagatgaaggacaagcaggatgaggaacagcggctcaaagaggaggaagaggacaagaaacgcaaggaagaggaagaggccgaggataaagaagacgatgaggacaaggatgaagacgaggaggatgaagaggacaaggaagaggacgaagaggaggatgtgccggggcaggctaaagacgaactgtga

SEQ ID NO: 7584 - RNA, 891 nt, synthetic construct
  misc_feature 1..891: note = derived and/or modified sequence opt6 fromcalreticulin__Homo_sapiens__BAG65301
  source 1..891: mol_type = other RNA
atgcacggagatagcgaatacaatataatgttcgggccagacatatgcggaccaggaacaaaaaaagtacacgtaatattcaactacaaaggaaaaaacgtactaataaacaaagacataagatgtaaagacgacgaatttacacacctatacacactaatagtaagaccagacaacacatatgaagtaaaaatagacaacagtcaagtagaatcaggaagcctagaagacgactgggacttcttaccaccgaaaaaaataaaagacccagacgcaagcaaaccagaagactgggacgaaagagcgaaaatagacgatccaacagactcaaaaccagaagactgggacaaaccagaacacataccagacccagacgcaaaaaaaccagaagactgggacgaagaaatggatggagaatgggaacccccagtaatccaaaacccagaatacaaaggagaatggaaaccaagacaaatagacaacccagactacaaagggacatggatacacccagaaatagacaatccagaatatagcccagacccaagtatatacgcatacgacaacttcggagtattaggattagatctatggcaagtgaaaagtggaacaatatttgacaacttcttaataacaaatgatgaagcatacgcagaagaattcggaaacgaaacatggggagtaacaaaagcagcagaaaaacaaatgaaagacaaacaagacgaagaacaaagattaaaagaagaagaagaagataaaaaaagaaaagaagaagaagaagcagaagacaaagaagacgacgaagacaaagacgaagacgaagaagacgaagaagacaaagaagaagacgaagaagaagacgtaccaggacaagcaaaagacgaattataa

SEQ ID NO: 7585 - protein, 417 aa, synthetic construct
  REGION 1..417: note = calreticulin__Homo_sapiens__P27797
MLLSVPLLLGLLGLAVAEPAVYFKEQFLDGDGWTSRWIESKHKSDFGKFVLSSGKFYGDEEKDKGLQTSQDARFYALSASFEPFSNKGQTLVVQFTVKHEQNIDCGGGYVKLFPNSLDQTDMHGDSEYNIMFGPDICGPGTKKVHVIFNYKGKNVLINKDIRCKDDEFTHLYTLIVRPDNTYEVKIDNSQVESGSLEDDWDFLPPKKIKDPDASKPEDWDERAKIDDPTDSKPEDWDKPEHIPDPDAKKPEDWDEEMDGEWEPPVIQNPEYKGEWKPRQIDNPDYKGTWIHPEIDNPEYSPDPSIYAYDNFGVLGLDLWQVKSGTIFDNFLITNDEAYAEEFGNETWGVTKAAEKQMKDKQDEEQRLKEEEEDKKRKEEEEAEDKEDDEDKDEDEEDEEDKEEDEEEDVPGQAKDEL

SEQ ID NO: 7586 - RNA, 1254 nt, synthetic construct
  misc_feature 1..1254: note = calreticulin__Homo_sapiens__AAA36582
  source 1..1254: mol_type = other RNA
atgctgctatccgtgccgctgctgctcggcctcctcggcctggccgtcgccgagcccgccgtctacttcaaggagcagtttctggacggagacgggtggacttcccgctggatcgaatccaaacacaagtcagattttggcaaattcgttctcagttccggcaagttctacggtgacgaggagaaagataaaggtttgcagacaagccaggatgcacgcttttatgctctgtcggccagtttcgagcctttcagcaacaaaggccagacgctggtggtgcagttcacggtgaaacatgagcagaacatcgactgtgggggcggctatgtgaagctgtttcctaatagtttggaccagacagacatgcacggagactcagaatacaacatcatgtttggtcccgacatctgtggccctggcaccaagaaggttcatgtcatcttcaactacaagggcaagaacgtgctgatcaacaaggacatccgttgcaaggatgatgagtttacacacctgtacacactgattgtgcggccagacaacacctatgaggtgaagattgacaacagccaggtggagtccggctccttggaagacgattgggacttcctgccacccaagaagataaaggatcctgatgcttcaaaaccggaagactgggatgagcgggccaagatcgatgatcccacagactccaagcctgaggactgggacaagcccgagcatatccctgaccctgatgctaagaagcccgaggactgggatgaagagatggacggagagtgggaacccccagtgattcagaaccctgagtacaagggtgagtggaagccccggcagatcgacaacccagattacaagggcacttggatccacccagaaattgacaaccccgagtattctcccgatcccagtatctatgcctatgataactttggcgtgctgggcctggacctctggcaggtcaagtctggcaccatctttgacaacttcctcatcaccaacgatgaggcatacgctgaggagtttggcaacgagacgtggggcgtaacaaaggcagcagagaaacaaatgaaggacaaacaggacgaggagcagaggcttaaggaggaggaagaagacaagaaacgcaaagaggaggaggaggcagaggacaaggaggatgatgaggacaaagatgaggatgaggaggatgaggaggacaaggaggaagatgaggaggaagatgtccccggccaggccaaggacgagctgtag

SEQ ID NO: 7587 - RNA, 1254 nt, synthetic construct
  misc_feature 1..1254: note = derived and/or modified sequence opt1 fromcalreticulin__Homo_sapiens__AAA36582
  source 1..1254: mol_type = other RNA
atgctgctcagcgtgcccctgctgctcggcctgctggggctcgccgtcgccgagccggcggtgtacttcaaggagcagttcctggacggcgacgggtggacctcccgctggatcgagagcaagcacaagtccgacttcggcaagttcgtgctgagctccgggaagttctacggcgacgaggagaaggacaagggcctccagaccagccaggacgcccggttctacgccctgtccgccagcttcgagcccttctccaacaaggggcagacgctggtcgtgcagttcaccgtgaagcacgagcagaacatcgactgcggcgggggctacgtcaagctgttccccaacagcctcgaccagaccgacatgcacggggactccgagtacaacatcatgttcggccccgacatctgcggcccggggaccaagaaggtgcacgtgatcttcaactacaagggcaagaacgtcctgatcaacaaggacatccgctgcaaggacgacgagttcacgcacctctacaccctgatcgtgcggcccgacaacacctacgaggtgaagatcgacaacagccaggtcgagtccgggagcctggaggacgactgggacttcctcccgcccaagaagatcaaggaccccgacgcctccaagcccgaggactgggacgagcgcgcgaagatcgacgaccccaccgacagcaagcccgaggactgggacaagccggagcacatccccgaccccgacgccaagaagcccgaggactgggacgaggagatggacggcgagtgggagccgcccgtgatccagaaccccgagtacaagggcgagtggaagccccggcagatcgacaacccggactacaaggggacgtggatccaccccgagatcgacaaccccgagtactcccccgacccgagcatctacgcctacgacaacttcggcgtgctggggctggacctctggcaggtcaagtccggcaccatcttcgacaacttcctgatcaccaacgacgaggcctacgcggaggagttcgggaacgagacctggggcgtgacgaaggccgccgagaagcagatgaaggacaagcaggacgaggagcagcgcctgaaggaggaggaggaggacaagaagcggaaggaggaggaggaggccgaggacaaggaggacgacgaggacaaggacgaggacgaggaggacgaggaggacaaggaggaggacgaggaggaggacgtgcccggccaggccaaggacgagctctga

SEQ ID NO: 7588 - RNA, 1254 nt, synthetic construct
  misc_feature 1..1254: note = derived and/or modified sequence opt2 fromcalreticulin__Homo_sapiens__AAA36582
  source 1..1254: mol_type = other RNA
atgctcctctccgtccccctcctcctcggcctcctcggcctcgccgtcgccgagcccgccgtctacttcaaggagcagttcctcgacggcgacggctggacctcccgctggatcgagtccaagcacaagtccgacttcggcaagttcgtcctctcctccggcaagttctacggcgacgaggagaaggacaagggcctccagacctcccaggacgcccgcttctacgccctctccgcctccttcgagcccttctccaacaagggccagaccctcgtcgtccagttcaccgtcaagcacgagcagaacatcgactgcggcggcggctacgtcaagctcttccccaactccctcgaccagaccgacatgcacggcgactccgagtacaacatcatgttcggccccgacatctgcggccccggcaccaagaaggtccacgtcatcttcaactacaagggcaagaacgtcctcatcaacaaggacatccgctgcaaggacgacgagttcacccacctctacaccctcatcgtccgccccgacaacacctacgaggtcaagatcgacaactcccaggtcgagtccggctccctcgaggacgactgggacttcctcccccccaagaagatcaaggaccccgacgcctccaagcccgaggactgggacgagcgcgccaagatcgacgaccccaccgactccaagcccgaggactgggacaagcccgagcacatccccgaccccgacgccaagaagcccgaggactgggacgaggagatggacggcgagtgggagccccccgtcatccagaaccccgagtacaagggcgagtggaagccccgccagatcgacaaccccgactacaagggcacctggatccaccccgagatcgacaaccccgagtactcccccgacccctccatctacgcctacgacaacttcggcgtcctcggcctcgacctctggcaggtcaagtccggcaccatcttcgacaacttcctcatcaccaacgacgaggcctacgccgaggagttcggcaacgagacctggggcgtcaccaaggccgccgagaagcagatgaaggacaagcaggacgaggagcagcgcctcaaggaggaggaggaggacaagaagcgcaaggaggaggaggaggccgaggacaaggaggacgacgaggacaaggacgaggacgaggaggacgaggaggacaaggaggaggacgaggaggaggacgtccccggccaggccaaggacgagctctga

SEQ ID NO: 7589 - RNA, 1254 nt, synthetic construct
  misc_feature 1..1254: note = derived and/or modified sequence opt3 fromcalreticulin__Homo_sapiens__AAA36582
  source 1..1254: mol_type = other RNA
atgctgctcagcgtgccccttctgttgggcttactggggctagccgtcgctgagcctgcagtttacttcaaggaacagtttctcgacggagatggttggacctccagatggatcgagtctaaacacaagtcagacttcggcaaatttgtgctgagtagcgggaagttctatggagatgaagagaaagacaagggccttcaaacatcccaggatgccaggttttacgcgctgtctgcttcgttcgaaccattttcaaacaagggtcagactttggtagtgcagttcacggtcaaacatgagcaaaatattgactgcgggggaggctatgtgaagctctttccgaacagcctggatcagaccgacatgcacggcgatagtgagtacaatataatgttcgggcccgacatctgtggacctggtactaaaaaggttcatgtgatttttaactataaaggcaagaatgtcctgatcaacaaggatattcggtgcaaagacgatgagttcacacacctctacaccttaatcgtgcgcccagacaatacatatgaagtaaagatagacaactcccaggttgaatctgggagcctggaggatgactgggattttcttccccctaaaaagatcaaagacccagatgcctccaagcccgaggactgggatgaacgagcaaaaattgacgatcctaccgactcaaagccagaggattgggacaagccggaacatatccccgaccctgatgccaaaaagccagaggactgggatgaagagatggacggagagtgggaaccccctgtgattcagaatccagagtacaaaggcgaatggaagccccgtcaaatcgataacccggactacaaaggtacttggatacaccctgagattgataatcccgaatatagtccagaccctagcatctacgcttatgataacttcggggtcttgggactggacctatggcaagtgaagtctggcacaattttcgataattttctcatcaccaacgacgaggcatacgccgaggagttcggcaatgaaacgtggggagtgactaaggctgccgaaaaacagatgaaggataaacaggacgaggaacagagactgaaggaggaggaagaggacaaaaagaggaaggaagaggaggaagcggaggataaagaagacgatgaggacaaggatgaagacgaggaggatgaagaggacaaagaagaggatgaagaggaggacgtccccgggcaggcaaaggatgaactttga

SEQ ID NO: 7590 - RNA, 1254 nt, synthetic construct
  misc_feature 1..1254: note = derived and/or modified sequence opt4 fromcalreticulin__Homo_sapiens__AAA36582
  source 1..1254: mol_type = other RNA
atgctgctgagcgtgcccctgctgctgggcctgctgggcctggccgtggccgagcccgccgtgtacttcaaggagcagttcctggacggcgacggctggaccagcagatggatcgagagcaagcacaagagcgacttcggcaagttcgtgctgagcagcggcaagttctacggcgacgaggagaaggacaagggcctgcagaccagccaggacgccagattctacgccctgagcgccagcttcgagcccttcagcaacaagggccagaccctggtggtgcagttcaccgtgaagcacgagcagaacatcgactgcggcggcggctacgtgaagctgttccccaacagcctggaccagaccgacatgcacggcgacagcgagtacaacatcatgttcggccccgacatctgcggccccggcaccaagaaggtgcacgtgatcttcaactacaagggcaagaacgtgctgatcaacaaggacatcagatgcaaggacgacgagttcacccacctgtacaccctgatcgtgagacccgacaacacctacgaggtgaagatcgacaacagccaggtggagagcggcagcctggaggacgactgggacttcctgccccccaagaagatcaaggaccccgacgccagcaagcccgaggactgggacgagagagccaagatcgacgaccccaccgacagcaagcccgaggactgggacaagcccgagcacatccccgaccccgacgccaagaagcccgaggactgggacgaggagatggacggcgagtgggagccccccgtgatccagaaccccgagtacaagggcgagtggaagcccagacagatcgacaaccccgactacaagggcacctggatccaccccgagatcgacaaccccgagtacagccccgaccccagcatctacgcctacgacaacttcggcgtgctgggcctggacctgtggcaggtgaagagcggcaccatcttcgacaacttcctgatcaccaacgacgaggcctacgccgaggagttcggcaacgagacctggggcgtgaccaaggccgccgagaagcagatgaaggacaagcaggacgaggagcagagactgaaggaggaggaggaggacaagaagagaaaggaggaggaggaggccgaggacaaggaggacgacgaggacaaggacgaggacgaggaggacgaggaggacaaggaggaggacgaggaggaggacgtgcccggccaggccaaggacgagctgtga

SEQ ID NO: 7591 - RNA, 1254 nt, synthetic construct
  misc_feature 1..1254: note = derived and/or modified sequence opt5 fromcalreticulin__Homo_sapiens__AAA36582
  source 1..1254: mol_type = other RNA
atgctgctcagcgtgcccctgcttctgggcctcctggggcttgccgtcgctgagcctgccgtttacttcaaggaacagtttctggacggagatggctggacctccagatggatcgagtctaaacacaagagcgacttcgggaaatttgtgctctcctctggaaagttctatggcgatgaagagaaagacaaggggctgcaaacaagccaggatgcgcggttttacgctctgtccgcctctttcgaaccgtttagcaacaagggacagacgctcgtggtccagttcaccgtgaaacatgagcaaaatattgactgcggcggcgggtatgttaagctgtttcccaactcccttgatcagacagacatgcacggagatagcgagtacaatatcatgttcggccctgacatttgtgggcccggaaccaaaaaggtgcatgtcatctttaactataaaggcaagaatgtgctgattaacaaggatatccgctgcaaagacgatgagttcacacacctctacaccctgatcgttagacctgacaatacatatgaagtgaagattgacaactctcaggtcgaatccgggagccttgaggatgactgggattttctgccccctaaaaagatcaaagacccggatgcctctaagcccgaggactgggatgaacgggctaaaattgacgatcctaccgactccaagcccgaggattgggacaagcctgaacatatccccgacccggatgccaaaaagcctgaggactgggatgaagagatggacggagagtgggaaccccctgtgattcagaatcccgagtacaaaggcgaatggaagccccgccaaatcgataaccctgactacaaaggcacgtggattcacccggagatcgataatcccgaatatagccctgacccctctatctacgcttatgataacttcggggtgctcggactggacctgtggcaggtcaagtccggcaccattttcgataattttctcatcacaaacgacgaggcctacgcggaggagttcgggaatgaaacctggggagttacaaaggccgctgaaaaacagatgaaggataaacaggacgaggaacaaagactgaaggaggaggaagaggacaaaaagcggaaggaagaggaggaagccgaggataaagaagacgatgaggacaaggatgaagacgaggaggatgaagaggacaaagaagaggatgaagaggaggacgtgcctggccaggctaaggatgaactttga

SEQ ID NO: 7592 - RNA, 1254 nt, synthetic construct
  misc_feature 1..1254: note = derived and/or modified sequence opt6 fromcalreticulin__Homo_sapiens__AAA36582
  source 1..1254: mol_type = other RNA
atgctattatcagtaccacttctattaggattattaggattagcggtagcagaaccagcagtatactttaaagaacaattcctagatggagacggatggacaagcagatggatagaaagcaaacataaaagcgatttcggaaaatttgtattaagttcaggtaaattctatggagacgaagaaaaagataaagggttacaaacatcacaagatgcaagattctatgccttatcagcatcttttgaaccattcagtaataaaggacaaacattagtagtacaatttacagtaaaacatgaacaaaatatagattgtggtggaggttatgtaaaactatttccaaattcactagaccaaacagacatgcacggagacagcgaatacaatataatgttcggaccagatatatgtggaccaggaacaaaaaaagtacatgtaatattcaattataaaggaaaaaatgtactaataaacaaagacataagatgtaaagatgacgaattcacacacctgtacacgctaatagtaagaccagacaacacatacgaagtaaaaatagataactcacaagttgaaagtggatcactagaagacgattgggactttttaccaccaaaaaaaataaaagaccctgacgcaagtaaacccgaagactgggacgaacgagcaaaaatagacgatccaacagactcaaaaccggaagattgggataaaccagaacacataccagatccagatgcaaaaaagccagaagactgggacgaagaaatggacggagaatgggaaccaccagtaatacagaacccagaatataaaggagaatggaaaccaagacaaatagataaccccgactacaaaggaacatggatacatccagaaatagataacccagaatatagtccagatccaagtatatacgcatacgacaactttggagtcttaggactagatctatggcaagtaaaaagtggaacaatatttgacaatttcttaataacaaacgatgaagcgtacgcagaagaattcggaaacgaaacatggggagtaactaaagcagctgaaaaacaaatgaaagataaacaagatgaagaacaaaggttgaaagaagaagaagaggataaaaaaagaaaagaagaagaggaagcagaagataaagaagatgacgaagacaaagacgaagatgaagaagatgaagaagacaaagaagaagacgaagaagaagacgtaccaggacaagcaaaagatgaattataa

SEQ ID NO: 7593 - protein, 384 aa, synthetic construct
  REGION 1..384: note = calreticulin__Homo_sapiens__Q96L12
MARALVQLWAICMLRVALATVYFQEEFLDGEHWRNRWLQSTNDSRFGHFRLSSGKFYGHKEKDKGLQTTQNGRFYAISARFKPFSNKGKTLVIQYTVKHEQKMDCGGGYIKVFPADIDQKNLNGKSQYYIMFGPDICGFDIKKVHVILHFKNKYHENKKLIRCKVDGFTHLYTLILRPDLSYDVKIDGQSIESGSIEYDWNLTSLKKETSPAESKDWEQTKDNKAQDWEKHFLDASTSKQSDWNGDLDGDWPAPMLQKPPYQDGLKPEGIHKDVWLHRKMKNTDYLTQYDLSEFENIGAIGLELWQVRSGTIFDNFLITDDEEYADNFGKATWGETKGPEREMDAIQAKEEMKKAREEEEEELLSGKINRHEHYFNQFHRRNEL

SEQ ID NO: 7594 - RNA, 1155 nt, synthetic construct
  misc_feature 1..1155: note = calreticulin__Homo_sapiens__BAB71655
  source 1..1155: mol_type = other RNA
atggcccgggctttggtccagctctgggccatatgcatgctgcgagtggcgctggctaccgtctatttccaagaggaatttctagacggagagcattggagaaaccgatggttgcagtccaccaatgactcccgatttgggcattttagactttcgtcgggcaagttttatggtcataaagagaaagataaaggtctgcaaaccactcagaatggccgattctatgccatctctgcacgcttcaaaccgttcagcaataaagggaaaactctggttattcagtacacagtaaaacatgagcagaagatggactgtggagggggctacattaaggtctttcctgcagacattgaccagaagaacctgaatggaaaatcgcaatactatattatgtttggacccgatatttgtggatttgatatcaagaaagttcatgttattttacatttcaagaataagtatcacgaaaacaagaaactgatcaggtgtaaggttgatggcttcacacacctgtacactctaattttaagaccagatctttcttatgatgtgaaaattgatggtcagtcaattgaatccggcagcatagagtacgactggaacttaacatcactcaagaaggaaacgtccccggcagaatcgaaggattgggaacagactaaagacaacaaagcccaggactgggagaagcattttctggacgccagcaccagcaagcagagcgactggaacggtgacctggatggggactggccagcgccgatgctccagaagcccccgtaccaggatggcctgaaaccagaaggtattcataaagacgtctggctccaccgtaagatgaagaataccgactatttgacgcagtatgacctctcagaatttgagaacattggtgccattggcctggagctttggcaggtgagatctggaaccatttttgataactttctgatcacagatgatgaagagtatgcagataattttggcaaggccacctggggcgaaaccaagggtccagaaagggagatggatgccatacaggccaaggaggaaatgaagaaggcccgcgaggaagaggaggaagagctgctgtcgggaaaaattaacaggcacgaacattacttcaatcaatttcacagaaggaatgaactttag

SEQ ID NO: 7595 - RNA, 1155 nt, synthetic construct
  misc_feature 1..1155: note = derived and/or modified sequence opt1 fromcalreticulin__Homo_sapiens__BAB71655
  source 1..1155: mol_type = other RNA
atggcccgcgccctggtgcagctctgggcgatctgcatgctgcgggtggccctggccaccgtgtacttccaggaggagttcctcgacggcgagcactggcgcaaccggtggctgcagagcaccaacgactcccgcttcgggcacttccggctgagctccggcaagttctacgggcacaaggagaaggacaagggcctccagacgacccagaacgggcgcttctacgccatcagcgcccggttcaagcccttctccaacaagggcaagaccctggtgatccagtacaccgtcaagcacgagcagaagatggactgcggcgggggctacatcaaggtgttcccggcggacatcgaccagaagaacctgaacggcaagagccagtactacatcatgttcgggcccgacatctgcgggttcgacatcaagaaggtgcacgtcatcctccacttcaagaacaagtaccacgagaacaagaagctgatccgctgcaaggtggacggcttcacgcacctgtacaccctcatcctgcggcccgacctgtcctacgacgtgaagatcgacggccagagcatcgagtccgggagcatcgagtacgactggaacctcacctccctgaagaaggagaccagccccgccgagtccaaggactgggagcagacgaaggacaacaaggcccaggactgggagaagcacttcctggacgccagcacctccaagcagagcgactggaacggcgacctcgacggggactggccggcgcccatgctgcagaagccgccctaccaggacggcctgaagcccgagggcatccacaaggacgtctggctccaccgcaagatgaagaacaccgactacctgacccagtacgacctgtccgagttcgagaacatcggggccatcggcctcgagctgtggcaggtccggagcgggacgatcttcgacaacttcctgatcaccgacgacgaggagtacgccgacaacttcggcaaggccacctggggcgagaccaaggggcccgagcgcgagatggacgccatccaggcgaaggaggagatgaagaaggcccgggaggaggaggaggaggagctcctgtccggcaagatcaaccgccacgagcactacttcaaccagttccaccggcgcaacgagctgtga

SEQ ID NO: 7596 - RNA, 1155 nt, synthetic construct
  misc_feature 1..1155: note = derived and/or modified sequence opt2 fromcalreticulin__Homo_sapiens__BAB71655
  source 1..1155: mol_type = other RNA
atggcccgcgccctcgtccagctctgggccatctgcatgctccgcgtcgccctcgccaccgtctacttccaggaggagttcctcgacggcgagcactggcgcaaccgctggctccagtccaccaacgactcccgcttcggccacttccgcctctcctccggcaagttctacggccacaaggagaaggacaagggcctccagaccacccagaacggccgcttctacgccatctccgcccgcttcaagcccttctccaacaagggcaagaccctcgtcatccagtacaccgtcaagcacgagcagaagatggactgcggcggcggctacatcaaggtcttccccgccgacatcgaccagaagaacctcaacggcaagtcccagtactacatcatgttcggccccgacatctgcggcttcgacatcaagaaggtccacgtcatcctccacttcaagaacaagtaccacgagaacaagaagctcatccgctgcaaggtcgacggcttcacccacctctacaccctcatcctccgccccgacctctcctacgacgtcaagatcgacggccagtccatcgagtccggctccatcgagtacgactggaacctcacctccctcaagaaggagacctcccccgccgagtccaaggactgggagcagaccaaggacaacaaggcccaggactgggagaagcacttcctcgacgcctccacctccaagcagtccgactggaacggcgacctcgacggcgactggcccgcccccatgctccagaagcccccctaccaggacggcctcaagcccgagggcatccacaaggacgtctggctccaccgcaagatgaagaacaccgactacctcacccagtacgacctctccgagttcgagaacatcggcgccatcggcctcgagctctggcaggtccgctccggcaccatcttcgacaacttcctcatcaccgacgacgaggagtacgccgacaacttcggcaaggccacctggggcgagaccaagggccccgagcgcgagatggacgccatccaggccaaggaggagatgaagaaggcccgcgaggaggaggaggaggagctcctctccggcaagatcaaccgccacgagcactacttcaaccagttccaccgccgcaacgagctctga

SEQ ID NO: 7597 - RNA, 1155 nt, synthetic construct
  misc_feature 1..1155: note = derived and/or modified sequence opt3 fromcalreticulin__Homo_sapiens__BAB71655
  source 1..1155: mol_type = other RNA
atggccagagctctggtgcagctctgggcaatctgcatgcttagggtcgccctggcgaccgtttacttccaagaggaatttttggacggcgagcactggcggaaccgctggttacagagcacaaatgattcccgattcgggcattttcgtctgtcttcaggaaagttctatggtcacaaagaaaaggacaaaggcctacagactacgcagaacgggagattttacgctattagtgccaggttcaagccctttagcaataaaggaaagaccctcgtgatacaatatacagtaaagcatgagcagaaaatggattgtggcggtgggtacatcaaggtgttccctgcagacattgatcagaaaaacctgaatggaaagtcccagtattacatcatgtttggcccagacatttgcggcttcgatatcaaaaaggtccacgtgatacttcattttaagaacaaatatcacgaaaataagaaactgatccggtgtaaggttgacgggttcactcacttgtacaccctcattctgcgcccggatctgtcttacgacgtgaaaatcgatggacaatcgattgagtcaggtagcatcgagtatgactggaacctcacaagtttaaagaaagaaacctcccccgccgagtctaaggattgggaacagactaaggacaataaagctcaggactgggagaagcattttctggatgcaagcacatccaaacagtcagactggaacggcgatcttgacggggattggcctgccccaatgttgcaaaagcccccttaccaggacggactgaaaccagagggcatacacaaggatgtctggctacatagaaagatgaaaaataccgactatctcacgcagtacgatctgagtgaatttgagaacattggtgctatcgggcttgaactgtggcaagtgaggagcggaactattttcgacaatttcttgatcaccgatgacgaggaatatgccgacaacttcggcaaggcgacatggggcgagactaaagggcccgagcgggaaatggatgcaatccaggccaaggaggaaatgaaaaaggctcgcgaggaagaggaggaggaactcctgtctggaaagattaatcgacacgaacactactttaaccagttccatagaaggaacgagttatga

SEQ ID NO: 7598 - RNA, 1155 nt, synthetic construct
  misc_feature 1..1155: note = derived and/or modified sequence opt4 fromcalreticulin__Homo_sapiens__BAB71655
  source 1..1155: mol_type = other RNA
atggccagagccctggtgcagctgtgggccatctgcatgctgagagtggccctggccaccgtgtacttccaggaggagttcctggacggcgagcactggagaaacagatggctgcagagcaccaacgacagcagattcggccacttcagactgagcagcggcaagttctacggccacaaggagaaggacaagggcctgcagaccacccagaacggcagattctacgccatcagcgccagattcaagcccttcagcaacaagggcaagaccctggtgatccagtacaccgtgaagcacgagcagaagatggactgcggcggcggctacatcaaggtgttccccgccgacatcgaccagaagaacctgaacggcaagagccagtactacatcatgttcggccccgacatctgcggcttcgacatcaagaaggtgcacgtgatcctgcacttcaagaacaagtaccacgagaacaagaagctgatcagatgcaaggtggacggcttcacccacctgtacaccctgatcctgagacccgacctgagctacgacgtgaagatcgacggccagagcatcgagagcggcagcatcgagtacgactggaacctgaccagcctgaagaaggagaccagccccgccgagagcaaggactgggagcagaccaaggacaacaaggcccaggactgggagaagcacttcctggacgccagcaccagcaagcagagcgactggaacggcgacctggacggcgactggcccgcccccatgctgcagaagcccccctaccaggacggcctgaagcccgagggcatccacaaggacgtgtggctgcacagaaagatgaagaacaccgactacctgacccagtacgacctgagcgagttcgagaacatcggcgccatcggcctggagctgtggcaggtgagaagcggcaccatcttcgacaacttcctgatcaccgacgacgaggagtacgccgacaacttcggcaaggccacctggggcgagaccaagggccccgagagagagatggacgccatccaggccaaggaggagatgaagaaggccagagaggaggaggaggaggagctgctgagcggcaagatcaacagacacgagcactacttcaaccagttccacagaagaaacgagctgtga

SEQ ID NO: 7599 - RNA, 1155 nt, synthetic construct
  misc_feature 1..1155: note = derived and/or modified sequence opt5 fromcalreticulin__Homo_sapiens__BAB71655
  source 1..1155: mol_type = other RNA
atggccagagctctggtgcagctctgggccatctgcatgctgcgggtcgcgcttgctaccgtttacttccaagaggaatttctggacggcgagcactggcgcaacagatggctccagagcacaaatgattcccggttcgggcattttcgcctgtctagcggaaagttctatggccacaaagaaaaggacaaagggcttcagacgacccagaacggaagattttacgccatttccgcccggttcaagcccttttctaataaaggcaagacactggtgatccaatataccgtgaagcatgagcagaaaatggattgtgggggaggctacattaaggtcttccctgctgacatcgatcagaaaaacctcaatggcaagagccagtattacattatgtttgggccggacatctgcggattcgatatcaaaaaggtgcacgttattctgcattttaagaacaaatatcacgaaaataagaaactgatccgctgtaaggtggacggcttcacacacctctacaccctgattcttagacccgatctgtcctacgacgtcaaaatcgatgggcaatctattgagagcggatccatcgagtatgactggaacctcacaagcctgaagaaagaaacctctcctgccgagtccaaggattgggaacagacgaaggacaataaagctcaggactgggagaagcattttcttgatgccagcacctctaaacagtccgactggaacggcgatctggacggggattggcccgcgcctatgctccaaaagcccccttaccaggacggactgaaaccggagggcattcacaaggatgtgtggctgcatcggaagatgaaaaatacagactatctcacccagtacgatctgagcgagttcgagaacatcggcgccatcgggcttgaactgtggcaagttcgctctggaacaattttcgacaattttctcatcaccgatgacgaggaatatgctgacaacttcggcaaggccacgtggggagagacaaaagggcccgagagagaaatggatgctattcaggccaaggaggaaatgaaaaaggcgcgggaggaagaggaggaagaactgctttccggcaagatcaatcgccacgaacactactttaaccagttccatagacggaacgagctgtga

SEQ ID NO: 7600 - RNA, 1155 nt, synthetic construct
  misc_feature 1..1155: note = derived and/or modified sequence opt6 fromcalreticulin__Homo_sapiens__BAB71655
  source 1..1155: mol_type = other RNA
atggccagagcactagtccaattatgggcaatatgcatgttacgagttgcactagctacagtatactttcaagaagaattcctagacggagaacactggcgaaacagatggctacaatcaacaaatgattcaagattcggacacttcagactaagtagcggaaaattctatggacacaaagaaaaagacaaaggcctacaaacaacacaaaatggaagattttatgcaatatcagcaagattcaaaccattctcaaataaaggaaaaacactagtaatacaatacacagtaaaacatgaacagaaaatggactgcggaggaggatacatcaaggtcttcccagcagacatagaccaaaaaaacttaaacggcaaatcacaatactacataatgtttggaccagacatctgtggattcgacataaaaaaagtacatgtaatactacacttcaaaaataaataccacgaaaataaaaaactaataagatgcaaagtagacggatttacacacttatacacactaatattacgaccagacctatcatacgacgtaaaaatcgacggacaatcaatagaatcaggatcaatagaatacgactggaacctaacatcattaaaaaaagaaacatcaccagcagaatcaaaagactgggaacaaacaaaagacaacaaagcacaagactgggaaaaacacttcctagacgcaagcacaagcaaacaatcagactggaacggagatctagacggagactggccagcaccaatgttacaaaaaccaccttatcaagacggactaaaaccagaaggaatacataaagacgtatggttacacaggaaaatgaaaaatacagactacctaacacaatacgacttatcagaattcgaaaacataggagcaataggactagaactatggcaagtaagaagtggaacaatattcgacaatttcctaataacagacgacgaagaatacgcagacaatttcggtaaagcaacatggggcgaaacaaaaggaccagaaagagaaatggacgcaatacaagcaaaagaagaaatgaaaaaagcaagagaagaagaagaagaagaactacttagtggcaaaataaacagacacgaacactacttcaaccaatttcacagaagaaatgaattataa

SEQ ID NO: 7601 - protein, 999 aa, synthetic construct
  REGION 1..999: note = GRP170_(ORP150)__Homo_sapiens__Q9Y4L1
MADKVRRQRPRRRVCWALVAVLLADLLALSDTLAVMSVDLGSESMKVAIVKPGVPMEIVLNKESRRKTPVIVTLKENERFFGDSAASMAIKNPKATLRYFQHLLGKQADNPHVALYQARFPEHELTFDPQRQTVHFQISSQLQFSPEEVLGMVLNYSRSLAEDFAEQPIKDAVITVPVFFNQAERRAVLQAARMAGLKVLQLINDNTATALSYGVFRRKDINTTAQNIMFYDMGSGSTVCTIVTYQMVKTKEAGMQPQLQIRGVGFDRTLGGLEMELRLRERLAGLFNEQRKGQRAKDVRENPRAMAKLLREANRLKTVLSANADHMAQIEGLMDDVDFKAKVTRVEFEELCADLFERVPGPVQQALQSAEMSLDEIEQVILVGGATRVPRVQEVLLKAVGKEELGKNINADEAAAMGAVYQAAALSKAFKVKPFVVRDAVVYPILVEFTREVEEEPGIHSLKHNKRVLFSRMGPYPQRKVITFNRYSHDFNFHINYGDLGFLGPEDLRVFGSQNLTTVKLKGVGDSFKKYPDYESKGIKAHFNLDESGVLSLDRVESVFETLVEDSAEEESTLTKLGNTISSLFGGGTTPDAKENGTDTVQEEEESPAEGSKDEPGEQVELKEEAEAPVEDGSQPPPPEPKGDATPEGEKATEKENGDKSEAQKPSEKAEAGPEGVAPAPEGEKKQKPARKRRMVEEIGVELVVLDLPDLPEDKLAQSVQKLQDLTLRDLEKQEREKAANSLEAFIFETQDKLYQPEYQEVSTEEQREEISGKLSAASTWLEDEGVGATTVMLKEKLAELRKLCQGLFFRVEERKKWPERLSALDNLLNHSSMFLKGARLIPEMDQIFTEVEMTTLEKVINETWAWKNATLAEQAKLPATEKPVLLSKDIEAKMMALDREVQYLLNKAKFTKPRPRPKDKNGTRAEPPLNASASDQGEKVIPPAGQTEDAEPISEPEKVETGSEPGDTEPLELGGPGAEPEQKEQSTGQKRPLKNDEL

SEQ ID NO: 7602 - RNA, 3000 nt, synthetic construct
  misc_feature 1..3000: note = GRP170_(ORP150)__Homo_sapiens__AAC50947
  source 1..3000: mol_type = other RNA
atggcagacaaagttaggaggcagaggccgaggaggcgagtctgttgggccttggtggctgtgctcttggcagacctgttggcactgagtgatacactggcagtgatgtctgtggacctgggcagtgagtccatgaaggtggccattgtcaaacctggagtgcccatggaaattgtcttgaataaggaatctcggaggaaaacaccggtgatcgtgaccctgaaagaaaatgaaagattctttggagacagtgcagcaagcatggcgattaagaatccaaaggctacgctacgttacttccagcacctcctggggaagcaggcagataacccccatgtagctctttaccaggcccgcttcccggagcacgagctgactttcgacccacagaggcagactgtgcactttcagatcagctcgcagctgcagttctcacctgaggaagtgttgggcatggttctcaattattctcgttctctagctgaagattttgcagagcagcccatcaaggatgcagtgatcaccgtgccagtcttcttcaaccaggccgagcgccgagctgtgctgcaggctgctcgtatggctggcctcaaagtgctgcagctcatcaatgacaacaccgccactgccctcagctatggtgtcttccgccggaaagatattaacaccactgcccagaatatcatgttctatgacatgggctcaggcagcaccgtatgcaccattgtgacctaccagatggtgaagactaaggaagctgggatgcagccacagctgcagatccggggagtaggatttgaccgtaccctggggggcctggagatggagctccggcttcgagaacgcctggctgggcttttcaatgagcagcgcaagggtcagagagcaaaggatgtgcgggagaacccgcgtgccatggccaagctgctgcgtgaggctaatcggctcaaaaccgtcctcagtgccaacgctgaccacatggcacagattgaaggcctgatggatgatgtggacttcaaggcaaaagtgactcgtgtggaatttgaggagttgtgtgcagacttgtttgagcgggtgcctgggcctgtacagcaggccctccagagtgccgaaatgagtctggatgagattgagcaggtgatcctggtgggtggggccactcgggtccccagagttcaggaggtgctgctgaaggccgtgggcaaggaggagctggggaagaacatcaatgcagatgaagcagccgccatgggggcagtgtaccaggcagctgcgctcagcaaagcctttaaagtgaagccatttgtcgtccgagatgcagtggtctaccccatcctggtggagttcacgagggaggtggaggaggagcctgggattcacagcctgaagcacaataaacgggtactcttctctcggatggggccctaccctcaacgcaaagtcatcacctttaaccgctacagccatgatttcaacttccacatcaactacggcgacctgggcttcctggggcctgaagatcttcgggtatttggctcccagaatctgaccacagtgaagctaaaaggggtgggtgacagcttcaagaagtatcctgactacgagtccaagggcatcaaggctcacttcaacctggatgagagtggcgtgctcagtctagacagggtggagtctgtatttgagacactggtagaggacagcgcagaagaggaatctactctcaccaaacttggcaacaccatttccagcctgtttggaggcggtaccacaccagatgccaaggagaatggtactgatactgtccaggaggaagaggagagccctgcagaggggagcaaggacgagcctggggagcaggtggagctcaaggaggaagctgaggccccagtggaggatggctctcagcccccaccccctgaacctaagggagatgcaacccctgagggagaaaaggccacagaaaaagaaaatggggacaagtctgaggcccagaaaccaagtgagaaggcagaggcagggcctgagggcgtcgctccagccccagagggagagaagaagcagaagcccgccaggaagcggcgaatggtagaggagatcggggtggagctggttgttctggacctgcctgacttgccagaggataagctggctcagtcggtgcagaaacttcaggacttgacactccgagacctggagaagcaggaacgggaaaaagctgccaacagcttggaagcgttcatatttgagacccaggacaagctgtaccagcccgagtaccaggaagtgtccacagaggagcagcgtgaggagatctctgggaagctcagcgccgcatccacctggctggaggatgagggtgttggagccaccacagtgatgttgaaggagaagctggctgagctgaggaagctgtgccaagggctgttttttcgggtagaggagcgcaagaagtggcccgaacggctgtctgccctcgataatctcctcaaccattccagcatgttcctcaagggggcccggctcatcccagagatggaccagatcttcactgaggtggagatgacaacgttagagaaagtcatcaatgagacctgggcctggaagaatgcaactctggccgagcaggctaagctgcccgccacagagaagcctgtgttgctctcaaaagacattgaagctaagatgatggccctggaccgagaggtgcagtatctgctcaataaggccaagtttaccaagccccggccccggcctaaggacaagaatgggacccgggcagagccacccctcaatgccagtgccagtgaccagggggagaaggtcatccctccagcaggccagactgaagatgcagagcccatttcagaacctgagaaagtagagactggatccgagccaggagacactgagcctttggagttaggaggtcctggagcagaacctgaacagaaagaacaatcgacaggacagaagcggcctttgaagaacgacgaactataa

SEQ ID NO: 7603 - RNA, 3000 nt, synthetic construct
  misc_feature 1..3000: note = derived and/or modified sequence opt1 fromGRP170_(ORP150)__Homo_sapiens__AAC50947
  source 1..3000: mol_type = other RNA
atggccgacaaggtgcgccggcagcgcccccggcgccgggtctgctgggccctggtggcggtgctcctggccgacctgctcgccctgagcgacaccctggccgtcatgtccgtggacctcggcagcgagtccatgaaggtggccatcgtcaagccgggggtgcccatggagatcgtgctgaacaaggagagccgccggaagacccccgtcatcgtgacgctgaaggagaacgagcgcttcttcggcgactccgcggccagcatggccatcaagaaccccaaggccaccctccggtacttccagcacctcctggggaagcaggcggacaacccgcacgtggccctgtaccaggcccgcttccccgagcacgagctgaccttcgacccccagcggcagaccgtccacttccagatctccagccagctgcagttctcccccgaggaggtgctcggcatggtgctgaactacagccgctccctggccgaggacttcgccgagcagccgatcaaggacgcggtcatcacggtgcccgtgttcttcaaccaggccgagcggcgcgccgtcctccaggccgcccggatggcggggctgaaggtgctgcagctcatcaacgacaacaccgccaccgccctgagctacggcgtgttccgccggaaggacatcaacaccacggcccagaacatcatgttctacgacatgggctccgggagcaccgtctgcaccatcgtgacctaccagatggtgaagacgaaggaggccggcatgcagccccagctgcagatccgcggggtcggcttcgaccggaccctcgggggcctggagatggagctgcgcctccgggagcgcctggcgggcctgttcaacgagcagcgcaaggggcagcgggccaaggacgtgcgcgagaacccccgggccatggccaagctcctgcgcgaggccaaccggctgaagaccgtcctctccgcgaacgccgaccacatggcccagatcgagggcctgatggacgacgtggacttcaaggccaaggtgacccgcgtcgagttcgaggagctgtgcgcggacctcttcgagcgggtgccggggcccgtgcagcaggccctgcagagcgccgagatgtccctggacgagatcgagcaggtcatcctcgtgggcggcgccacgcgcgtgccccgggtccaggaggtgctgctgaaggccgtggggaaggaggagctcggcaagaacatcaacgcggacgaggccgccgccatgggggccgtctaccaggcggccgccctgagcaaggccttcaaggtgaagcccttcgtggtccgcgacgccgtggtgtacccgatcctggtcgagttcacccgggaggtggaggaggagcccggcatccactccctcaagcacaacaagcgcgtgctgttcagccggatggggccctacccccagcgcaaggtcatcaccttcaaccggtacagccacgacttcaacttccacatcaactacggcgacctgggcttcctcgggccggaggacctgcgcgtgttcggctcccagaacctgaccacggtgaagctgaagggggtcggcgacagcttcaagaagtaccccgactacgagtccaaggggatcaaggcgcacttcaacctcgacgagagcggcgtgctgtccctggaccgggtggagagcgtcttcgagaccctcgtggaggactccgccgaggaggagagcaccctgaccaagctgggcaacacgatctccagcctcttcgggggcgggaccacccccgacgccaaggagaacggcaccgacacggtgcaggaggaggaggagtcccccgccgaggggagcaaggacgagccgggcgagcaggtcgagctgaaggaggaggcggaggcccccgtggaggacggctcccagccgccgccgcccgagcccaagggggacgccacccccgagggcgagaaggccaccgagaaggagaacggggacaagagcgaggcccagaagccctccgagaaggcggaggccggccccgagggcgtggcccccgcccccgagggggagaagaagcagaagcccgcccgcaagcggcgcatggtcgaggagatcggcgtggagctggtggtcctcgacctgcccgacctgcccgaggacaagctcgcgcagagcgtgcagaagctgcaggacctgaccctccgcgacctggagaagcaggagcgggagaaggccgccaactccctggaggccttcatcttcgagacgcaggacaagctctaccagccggagtaccaggaggtgagcaccgaggagcagcgcgaggagatctccgggaagctgagcgccgcgagcacctggctggaggacgagggcgtcggggccaccacggtgatgctcaaggagaagctggccgagctgcggaagctctgccagggcctgttcttccgcgtggaggagcggaagaagtggcccgagcgcctgtccgccctcgacaacctgctgaaccacagctccatgttcctcaagggcgcgcggctgatccccgagatggaccagatcttcaccgaggtcgagatgaccaccctggagaaggtgatcaacgagacctgggcctggaagaacgccacgctcgccgagcaggccaagctgcccgcgaccgagaagccggtgctgctcagcaaggacatcgaggccaagatgatggccctggaccgcgaggtccagtacctgctcaacaaggccaagttcaccaagccccggccccgccccaaggacaagaacgggacccgggccgagccgcccctgaacgcgtccgccagcgaccagggcgagaaggtgatcccgcccgccgggcagacggaggacgccgagcccatctccgagcccgagaaggtggagaccggcagcgagcccggggacaccgagcccctggagctcggcggcccgggggccgagcccgagcagaaggagcagtccaccggccagaagcgccccctgaagaacgacgagctgtga

SEQ ID NO: 7604 - RNA, 3000 nt, synthetic construct
  misc_feature 1..3000: note = derived and/or modified sequence opt2 fromGRP170_(ORP150)__Homo_sapiens__AAC50947
  source 1..3000: mol_type = other RNA
atggccgacaaggtccgccgccagcgcccccgccgccgcgtctgctgggccctcgtcgccgtcctcctcgccgacctcctcgccctctccgacaccctcgccgtcatgtccgtcgacctcggctccgagtccatgaaggtcgccatcgtcaagcccggcgtccccatggagatcgtcctcaacaaggagtcccgccgcaagacccccgtcatcgtcaccctcaaggagaacgagcgcttcttcggcgactccgccgcctccatggccatcaagaaccccaaggccaccctccgctacttccagcacctcctcggcaagcaggccgacaacccccacgtcgccctctaccaggcccgcttccccgagcacgagctcaccttcgacccccagcgccagaccgtccacttccagatctcctcccagctccagttctcccccgaggaggtcctcggcatggtcctcaactactcccgctccctcgccgaggacttcgccgagcagcccatcaaggacgccgtcatcaccgtccccgtcttcttcaaccaggccgagcgccgcgccgtcctccaggccgcccgcatggccggcctcaaggtcctccagctcatcaacgacaacaccgccaccgccctctcctacggcgtcttccgccgcaaggacatcaacaccaccgcccagaacatcatgttctacgacatgggctccggctccaccgtctgcaccatcgtcacctaccagatggtcaagaccaaggaggccggcatgcagccccagctccagatccgcggcgtcggcttcgaccgcaccctcggcggcctcgagatggagctccgcctccgcgagcgcctcgccggcctcttcaacgagcagcgcaagggccagcgcgccaaggacgtccgcgagaacccccgcgccatggccaagctcctccgcgaggccaaccgcctcaagaccgtcctctccgccaacgccgaccacatggcccagatcgagggcctcatggacgacgtcgacttcaaggccaaggtcacccgcgtcgagttcgaggagctctgcgccgacctcttcgagcgcgtccccggccccgtccagcaggccctccagtccgccgagatgtccctcgacgagatcgagcaggtcatcctcgtcggcggcgccacccgcgtcccccgcgtccaggaggtcctcctcaaggccgtcggcaaggaggagctcggcaagaacatcaacgccgacgaggccgccgccatgggcgccgtctaccaggccgccgccctctccaaggccttcaaggtcaagcccttcgtcgtccgcgacgccgtcgtctaccccatcctcgtcgagttcacccgcgaggtcgaggaggagcccggcatccactccctcaagcacaacaagcgcgtcctcttctcccgcatgggcccctacccccagcgcaaggtcatcaccttcaaccgctactcccacgacttcaacttccacatcaactacggcgacctcggcttcctcggccccgaggacctccgcgtcttcggctcccagaacctcaccaccgtcaagctcaagggcgtcggcgactccttcaagaagtaccccgactacgagtccaagggcatcaaggcccacttcaacctcgacgagtccggcgtcctctccctcgaccgcgtcgagtccgtcttcgagaccctcgtcgaggactccgccgaggaggagtccaccctcaccaagctcggcaacaccatctcctccctcttcggcggcggcaccacccccgacgccaaggagaacggcaccgacaccgtccaggaggaggaggagtcccccgccgagggctccaaggacgagcccggcgagcaggtcgagctcaaggaggaggccgaggcccccgtcgaggacggctcccagccccccccccccgagcccaagggcgacgccacccccgagggcgagaaggccaccgagaaggagaacggcgacaagtccgaggcccagaagccctccgagaaggccgaggccggccccgagggcgtcgcccccgcccccgagggcgagaagaagcagaagcccgcccgcaagcgccgcatggtcgaggagatcggcgtcgagctcgtcgtcctcgacctccccgacctccccgaggacaagctcgcccagtccgtccagaagctccaggacctcaccctccgcgacctcgagaagcaggagcgcgagaaggccgccaactccctcgaggccttcatcttcgagacccaggacaagctctaccagcccgagtaccaggaggtctccaccgaggagcagcgcgaggagatctccggcaagctctccgccgcctccacctggctcgaggacgagggcgtcggcgccaccaccgtcatgctcaaggagaagctcgccgagctccgcaagctctgccagggcctcttcttccgcgtcgaggagcgcaagaagtggcccgagcgcctctccgccctcgacaacctcctcaaccactcctccatgttcctcaagggcgcccgcctcatccccgagatggaccagatcttcaccgaggtcgagatgaccaccctcgagaaggtcatcaacgagacctgggcctggaagaacgccaccctcgccgagcaggccaagctccccgccaccgagaagcccgtcctcctctccaaggacatcgaggccaagatgatggccctcgaccgcgaggtccagtacctcctcaacaaggccaagttcaccaagccccgcccccgccccaaggacaagaacggcacccgcgccgagccccccctcaacgcctccgcctccgaccagggcgagaaggtcatcccccccgccggccagaccgaggacgccgagcccatctccgagcccgagaaggtcgagaccggctccgagcccggcgacaccgagcccctcgagctcggcggccccggcgccgagcccgagcagaaggagcagtccaccggccagaagcgccccctcaagaacgacgagctctga

SEQ ID NO: 7605 - RNA, 3000 nt, synthetic construct
  misc_feature 1..3000: note = derived and/or modified sequence opt3 fromGRP170_(ORP150)__Homo_sapiens__AAC50947
  source 1..3000: mol_type = other RNA
atggccgacaaggtgagaaggcagcggccccgccgacgtgtctgctgggctctggttgcagtgctccttgccgatctgttggcgttaagcgacaccctggctgtaatgtccgtggatctaggctctgagtcaatgaaagtcgccatcgtgaagcctggggttccaatggaaattgtgctcaacaaagagagtagaaggaagacaccggtcatagtgactctgaaagaaaatgagcggttctttggagacagcgcagcctccatggctatcaagaaccccaaggcaacgcttcgctacttccaacacctgttgggtaaacaggccgataatcctcatgtagctctctatcaggccagatttccagaacacgagctgaccttcgacccccagaggcaaacagttcattttcagatttcttcgcagctgcagttctcacctgaggaagtgctcggcatggtcttaaactacagccggagtctggcggaggattttgcagaacaaccaatcaaggacgccgtgattactgtgcccgtcttctttaatcaggctgagcgccgagccgttcttcaggcagctagaatggccgggttgaaagtgctgcagctaatcaacgataataccgcgacagccctctcctatggagtattcaggcggaaggacataaacaccactgcacaaaatatcatgttttacgatatgggctctggtagcacagtgtgtaccattgtcacgtatcagatggtgaaaactaaggaggctgggatgcagcctcaactgcagatccgtggagttggcttcgaccgcacccttggcgggctggaaatggagttgagactcagggaacggctggccggattatttaacgagcagcgaaagggtcagcgcgctaaagatgtgagagaaaatccaagggccatggcaaagctgctccgggaggccaaccgccttaaaacagtcctgtccgctaatgcggaccacatggcacaaattgagggcttgatggacgatgtggacttcaaggccaaagtaactagagttgagttcgaggaactatgcgctgatctgtttgagagggtgccggggcccgtccagcaggccctccagtcagcagaaatgagtctggacgagatcgagcaagtgatacttgtcggaggcgccacccgtgtgcctcgggttcaggaagtgctgttgaaggctgtaggtaaagaggaactcgggaagaacattaatgccgatgaggcagcggctatgggagccgtctaccaggcagccgctctgagcaaggccttcaaagtgaagccatttgttgtgcgagacgcagtcgtgtatcccatcttagtagagttcacaagagaggtggaggaagaacctggcattcattctctgaaacacaacaagagggttctattttcccgcatgggcccatacccccagcggaaagtcatcaccttcaacagatactcacacgattttaatttccatatcaactatggggacctcggatttctgggtccggaagatcttagggtgttcggcagccaaaatttgacgactgtgaagctgaagggggtcggagacagttttaaaaagtaccctgattatgagtctaaaggcattaaggctcacttcaacctcgacgagtccggtgttctgagccttgaccgcgtggaatcggtgtttgagacactggtagaagattctgccgaggaagagtccaccttgactaaactcgggaatacaatatcaagtctgttcggcggaggcaccacgcccgacgcgaaggagaacgggaccgatacagtccaggaagaggaagagagcccagccgaaggatccaaggacgagcctggtgaacaggtggaattaaaagaggaagctgaggcacccgttgaagatggctctcagccaccccctccagagccgaagggggacgccactcccgagggagaaaaagctaccgagaaggaaaatggcgataaaagcgaggcccaaaagccttcagagaaggcagaagcgggtccagagggggtggcccccgctcctgaaggcgagaaaaagcagaaaccagcccgaaagcggcgtatggtcgaagagatcggagtggagctggttgtgctagacctccccgatctgccggaagacaaacttgcacagagtgtacaaaagttgcaggatctgacactcagagacctggagaaacaggaaagggagaaggctgccaactccttagaagcattcatttttgagactcaggataagctgtaccaacctgagtatcaggaagtcagcaccgaggaacagcgcgaggaaatctctggcaaactttcagccgctagtacatggttggaggacgagggggtgggagcgaccactgtgatgctcaaggaaaaactggccgagctacggaagctgtgtcagggtctcttctttagagtcgaagagaggaaaaagtggccagagcgactgagcgcacttgacaatttgctgaaccattcctctatgttcttaaagggcgctcgcctcatacccgaaatggatcaaatttttacggaggttgaaatgacaaccctggagaaagtgatcaatgaaacttgggcctggaagaacgccacccttgctgagcaggcaaaactgcctgccacagagaagcccgtattgctctcgaaagacatcgaagcgaagatgatggctctggatcgggaggtgcagtacctactgaataaggccaaattcaccaagccaagacctaggcccaaagacaagaacgggactcgtgcagaaccaccgctcaatgccagcgcttccgatcagggagagaaagtcattcctcccgcaggccaaacagaagacgccgagccaatctcagagcccgaaaaggtggagacgggtagtgaacctggggataccgagccactggaacttggcggacccggcgcggagcctgagcagaaggaacagtctactgggcaaaaacgcccgttgaagaacgacgagctgtga

SEQ ID NO: 7606 - RNA, 3000 nt, synthetic construct
  misc_feature 1..3000: note = derived and/or modified sequence opt4 fromGRP170_(ORP150)__Homo_sapiens__AAC50947
  source 1..3000: mol_type = other RNA
atggccgacaaggtgagaagacagagacccagaagaagagtgtgctgggccctggtggccgtgctgctggccgacctgctggccctgagcgacaccctggccgtgatgagcgtggacctgggcagcgagagcatgaaggtggccatcgtgaagcccggcgtgcccatggagatcgtgctgaacaaggagagcagaagaaagacccccgtgatcgtgaccctgaaggagaacgagagattcttcggcgacagcgccgccagcatggccatcaagaaccccaaggccaccctgagatacttccagcacctgctgggcaagcaggccgacaacccccacgtggccctgtaccaggccagattccccgagcacgagctgaccttcgacccccagagacagaccgtgcacttccagatcagcagccagctgcagttcagccccgaggaggtgctgggcatggtgctgaactacagcagaagcctggccgaggacttcgccgagcagcccatcaaggacgccgtgatcaccgtgcccgtgttcttcaaccaggccgagagaagagccgtgctgcaggccgccagaatggccggcctgaaggtgctgcagctgatcaacgacaacaccgccaccgccctgagctacggcgtgttcagaagaaaggacatcaacaccaccgcccagaacatcatgttctacgacatgggcagcggcagcaccgtgtgcaccatcgtgacctaccagatggtgaagaccaaggaggccggcatgcagccccagctgcagatcagaggcgtgggcttcgacagaaccctgggcggcctggagatggagctgagactgagagagagactggccggcctgttcaacgagcagagaaagggccagagagccaaggacgtgagagagaaccccagagccatggccaagctgctgagagaggccaacagactgaagaccgtgctgagcgccaacgccgaccacatggcccagatcgagggcctgatggacgacgtggacttcaaggccaaggtgaccagagtggagttcgaggagctgtgcgccgacctgttcgagagagtgcccggccccgtgcagcaggccctgcagagcgccgagatgagcctggacgagatcgagcaggtgatcctggtgggcggcgccaccagagtgcccagagtgcaggaggtgctgctgaaggccgtgggcaaggaggagctgggcaagaacatcaacgccgacgaggccgccgccatgggcgccgtgtaccaggccgccgccctgagcaaggccttcaaggtgaagcccttcgtggtgagagacgccgtggtgtaccccatcctggtggagttcaccagagaggtggaggaggagcccggcatccacagcctgaagcacaacaagagagtgctgttcagcagaatgggcccctacccccagagaaaggtgatcaccttcaacagatacagccacgacttcaacttccacatcaactacggcgacctgggcttcctgggccccgaggacctgagagtgttcggcagccagaacctgaccaccgtgaagctgaagggcgtgggcgacagcttcaagaagtaccccgactacgagagcaagggcatcaaggcccacttcaacctggacgagagcggcgtgctgagcctggacagagtggagagcgtgttcgagaccctggtggaggacagcgccgaggaggagagcaccctgaccaagctgggcaacaccatcagcagcctgttcggcggcggcaccacccccgacgccaaggagaacggcaccgacaccgtgcaggaggaggaggagagccccgccgagggcagcaaggacgagcccggcgagcaggtggagctgaaggaggaggccgaggcccccgtggaggacggcagccagccccccccccccgagcccaagggcgacgccacccccgagggcgagaaggccaccgagaaggagaacggcgacaagagcgaggcccagaagcccagcgagaaggccgaggccggccccgagggcgtggcccccgcccccgagggcgagaagaagcagaagcccgccagaaagagaagaatggtggaggagatcggcgtggagctggtggtgctggacctgcccgacctgcccgaggacaagctggcccagagcgtgcagaagctgcaggacctgaccctgagagacctggagaagcaggagagagagaaggccgccaacagcctggaggccttcatcttcgagacccaggacaagctgtaccagcccgagtaccaggaggtgagcaccgaggagcagagagaggagatcagcggcaagctgagcgccgccagcacctggctggaggacgagggcgtgggcgccaccaccgtgatgctgaaggagaagctggccgagctgagaaagctgtgccagggcctgttcttcagagtggaggagagaaagaagtggcccgagagactgagcgccctggacaacctgctgaaccacagcagcatgttcctgaagggcgccagactgatccccgagatggaccagatcttcaccgaggtggagatgaccaccctggagaaggtgatcaacgagacctgggcctggaagaacgccaccctggccgagcaggccaagctgcccgccaccgagaagcccgtgctgctgagcaaggacatcgaggccaagatgatggccctggacagagaggtgcagtacctgctgaacaaggccaagttcaccaagcccagacccagacccaaggacaagaacggcaccagagccgagccccccctgaacgccagcgccagcgaccagggcgagaaggtgatcccccccgccggccagaccgaggacgccgagcccatcagcgagcccgagaaggtggagaccggcagcgagcccggcgacaccgagcccctggagctgggcggccccggcgccgagcccgagcagaaggagcagagcaccggccagaagagacccctgaagaacgacgagctgtga

SEQ ID NO: 7607 - RNA, 3000 nt, synthetic construct
  misc_feature 1..3000: note = derived and/or modified sequence opt5 fromGRP170_(ORP150)__Homo_sapiens__AAC50947
  source 1..3000: mol_type = other RNA
atggccgacaaggtgagacggcagcgccccagacggcgcgtctgctgggctctggttgccgtgctcctggcggatcttctggctctcagcgacaccctggccgtgatgtccgtcgatcttggctctgagagcatgaaagtggccatcgttaagcctggggtgccgatggaaatcgtcctgaacaaagagtccagacggaagacacccgtgatcgttacgctcaaagaaaatgagcgcttctttggagactctgctgccagcatggctattaagaaccctaaggccaccctgagatacttccaacatctgctcggcaaacaggcggataatccccacgtggccctgtatcaggctcggtttcctgaacacgagcttacattcgacccccagcgccaaaccgtccattttcagatctcctctcagctgcagttcagccctgaggaagtgctcgggatggtgctgaactactccagaagccttgccgaggattttgctgaacaaccgattaaggacgccgtcatcacagttcccgtgttctttaatcaggcggagcggcgcgccgtgctgcaggctgccagaatggctggactcaaagtcctgcagctgatcaacgataataccgccacagccctctcttatggcgtgttccggcgcaaggacattaacaccacggctcaaaatatcatgttttacgatatggggtccggaagcaccgtttgtacaattgtgacctatcagatggtcaaaacaaaggaggcgggcatgcagcctcaactgcagatcagaggcgtggggttcgaccggacccttggaggcctggaaatggagctcagactgcgcgaacggcttgccgggctgtttaacgagcagagaaagggacagcgcgctaaagatgttcgggaaaatcccagagccatggccaagctcctgcgcgaggctaaccggctgaaaacggtgctctctgccaatgcggaccacatggctcaaattgagggcctgatggacgatgtcgacttcaaggccaaagtgacaagagtcgagttcgaggaactttgcgccgatctgtttgagcgcgtgcctgggcccgttcagcaggctctccagtccgccgaaatgagcctggacgagatcgagcaagtgattcttgtcggaggcgctacccgggtgccgagagttcaggaagtgctgctcaaggccgtcggcaaagaggaactggggaagaacatcaatgcggatgaggccgctgccatgggagctgtgtaccaggccgcggccctgtctaaggctttcaaagtgaagccttttgttgtccgcgacgccgtggtgtatcccatcctcgtcgagttcacacgggaggtggaggaagaacctggcattcattccctgaaacacaacaagagagttctttttagccggatggggccctacccccagcgcaaagtgatcaccttcaacagatactcccacgattttaatttccatattaactatggagacctgggctttctcgggcctgaagatctgcgggtcttcggatctcaaaatctgaccacagtgaagctcaagggcgttggcgacagctttaaaaagtacccggattatgagtccaaagggatcaaggctcacttcaacctcgacgagagcggagtgctgtctctggacagagtcgaatccgtgtttgagacgctcgttgaagatagcgccgaggaagagtctaccctgacaaaacttggcaataccattagctccctgttcgggggaggcacaacccccgacgccaaggagaacgggacggatacagtgcaggaagaggaagagtctcctgctgaaggcagcaaggacgagcccggagagcaggtcgaactcaaagaggaagcggaggcccctgtggaagatggctcccagcccccgcctcccgagcctaagggggacgctacccccgagggagaaaaagccaccgagaaggaaaatggcgataaaagcgaggcccaaaagccttctgagaaggctgaagccgggcccgagggagtggcgccggctcctgaaggcgagaaaaagcagaaacccgcccgcaagcggagaatggtcgaagagatcggggttgagctggtggtgctggaccttcccgatctccctgaagacaaactggcccagtccgtccaaaagctgcaggatctcacactgcgcgaccttgagaaacaggaaagagagaaggctgccaacagcctggaagcgttcatctttgagacccaggataagctctaccaaccggagtatcaggaagtgtctacagaggaacagcgggaggaaatttccggcaaactgagcgctgcctccacgtggctggaggacgagggagttggcgccaccacagtgatgcttaaggaaaaactcgctgagctgcgcaagctgtgtcaggggcttttctttagagtcgaagaacggaaaaagtggcccgagcgcctgtctgcccttgacaatctgctcaaccatagctccatgttcctgaagggagctagactgatccctgaaatggatcaaatttttaccgaggtggaaatgacaacccttgagaaagttatcaatgaaacgtgggcctggaagaacgcgaccctcgccgagcaggctaaactgcccgccacagagaagcctgtgctgctctctaaagacattgaagctaagatgatggccctggatcgggaggtccagtaccttctgaataaggccaaattcaccaagccccgccctagacccaaagacaagaacggcacacgggctgaaccgcctctcaatgcgagcgcctccgatcagggggagaaagtgattccccctgctggacaaaccgaagacgccgagcccatcagcgagccggaaaaggttgagacgggctctgaacctggggatacagagcccctggaactgggcggacctggcgccgagcccgagcagaaggaacagtccaccgggcaaaaacgcccccttaagaacgacgagctgtga

SEQ ID NO: 7608 - RNA, 3000 nt, synthetic construct
  misc_feature 1..3000: note = derived and/or modified sequence opt6 fromGRP170_(ORP150)__Homo_sapiens__AAC50947
  source 1..3000: mol_type = other RNA
atggcagacaaagtaagacgacaaagacctaggagaagagtttgttgggcattagttgcagtactattagcagatctattagctctatctgatactttagctgttatgagtgtcgatcttggaagtgagtcaatgaaagtagcaatagtaaaaccaggtgtaccaatggagatagttctaaataaagaaagtagaagaaaaacgccagtaatcgtcactctaaaagaaaacgaaagatttttcggtgactcggcagcaagcatggcaattaaaaatcctaaagcaaccttaagatacttccaacatcttcttggaaaacaggcagataacccacatgtggcactatatcaggcaagattccccgaacatgaattaacattcgatccacaacgacagacggtacactttcaaatttcatcacaattacaattttcacccgaagaagtacttggaatggtactaaactatagcagatcattggctgaggattttgctgaacaaccaataaaagatgcagtaataacagtgcccgtattctttaaccaagcagaaagaagggcagtactacaagctgcaagaatggccggattaaaggtacttcaactaataaatgataatactgcaacagcattgtcatacggtgtcttccgaagaaaagatataaacacaacagcccaaaatataatgttttatgatatgggttcagggtccaccgtatgcactattgttacataccagatggtaaaaacaaaagaagcaggtatgcaaccacagttgcagatacgaggagtaggatttgaccgtacactaggtggattggaaatggaactgaggctacgagaaagattggcgggtttatttaatgaacaacgcaaaggtcaacgggctaaagacgtaagagaaaatcccagggctatggccaagctattaagagaagcaaatagactaaaaactgttctgtcagcaaacgcagaccatatggcacaaatagaaggtctaatggatgacgtcgactttaaagcgaaagtgacccgggttgaattcgaagaactctgtgccgatttatttgaacgagtccctggaccagttcaacaagcactacaaagtgcagaaatgtcactagacgaaatcgagcaagtaattctagtgggaggagcaacacgagtcccaagagtccaagaagtcctacttaaagccgtaggaaaagaagaactcggaaaaaatataaatgcagacgaagctgcggcgatgggagctgtatatcaagcagcagcacttagcaaagcgttcaaggttaaacccttcgtagtgagagacgcagttgtataccccatattagtagaattcacacgggaagtcgaggaagaacctggaatacattctttaaaacataataaaagggtactatttagtagaatgggaccatacccacaaagaaaagttataacttttaatcgatacagtcatgactttaatttccatataaattacggggatctaggcttcctaggaccagaagacctgcgagtattcgggagccaaaacttaaccacagtcaaactaaaaggagtcggagatagcttcaaaaaatatcccgactacgaaagtaaaggaataaaagcccactttaatttagatgaatcaggagttctaagtttagatcgtgtcgaaagtgtctttgaaacacttgtagaagacagcgcagaggaggaaagtacgcttaccaaactagggaatacaatatcaagtctatttggaggggggacaacaccagatgcaaaagaaaatggtactgacaccgtgcaagaagaagaagaatcgccagccgaaggatcgaaagacgaaccaggggaacaagtcgaattaaaagaagaagcagaagcaccagttgaagatggtagccaaccgcctcccccggaacctaaaggtgacgcaacacctgaaggagaaaaagcaacagaaaaagagaatggtgataaatcagaagcacaaaaacctagtgaaaaagcagaagcgggtcccgaaggagtagcaccagcaccagaaggtgaaaaaaaacaaaagccagcacgaaaaagaagaatggtagaagaaataggagtcgaacttgtcgttctagacttaccggatttaccagaagataagctagcacaaagtgtacaaaaattgcaagacttaactcttagggacctagaaaaacaggagcgcgaaaaagctgcaaatagtttagaagcatttatctttgaaacgcaagacaaactgtaccaaccagaatatcaggaagtaagtactgaagaacaaagagaagaaattagtggaaaactgtcagcagcttcaacttggttagaagatgaaggagttggagctacaaccgtcatgcttaaagaaaaactagctgaactaagaaaattatgtcaaggcttattctttagggtagaagaaagaaaaaaatggcctgaacgcttatccgcattagataatttgctaaatcactcgagtatgtttttgaaaggtgctcgattaatccccgaaatggaccaaatattcactgaagtagaaatgaccacattagagaaagtaattaatgaaacatgggcatggaaaaacgcaaccttagccgaacaagctaaactaccagccacggagaaaccggttctattatccaaagacatagaagcgaagatgatggccctcgatagagaagtacagtatttattgaacaaagcaaaatttacaaaaccaagacccaggcccaaagataaaaacggtacaagagcagaaccaccgctaaacgcatcagcatcagaccaaggagagaaagtaatacccccagccggacaaacagaagacgcagaaccaataagtgaaccagaaaaagttgagaccggatcagaacctggagacacagaaccattagaactaggaggccccggcgcagaacctgaacaaaaagaacaaagtacaggacaaaaaaggccgctaaagaacgacgagttataa

SEQ ID NO: 7609 - protein, 654 aa, synthetic construct
  REGION 1..654: note = GRP78_(BiP)__Homo_sapiens__P11021
MKLSLVAAMLLLLSAARAEEEDKKEDVGTVVGIDLGTTYSCVGVFKNGRVEIIANDQGNRITPSYVAFTPEGERLIGDAAKNQLTSNPENTVFDAKRLIGRTWNDPSVQQDIKFLPFKVVEKKTKPYIQVDIGGGQTKTFAPEEISAMVLTKMKETAEAYLGKKVTHAVVTVPAYFNDAQRQATKDAGTIAGLNVMRIINEPTAAAIAYGLDKREGEKNILVFDLGGGTFDVSLLTIDNGVFEVVATNGDTHLGGEDFDQRVMEHFIKLYKKKTGKDVRKDNRAVQKLRREVEKAKRALSSQHQARIEIESFYEGEDFSETLTRAKFEELNMDLFRSTMKPVQKVLEDSDLKKSDIDEIVLVGGSTRIPKIQQLVKEFFNGKEPSRGINPDEAVAYGAAVQAGVLSGDQDTGDLVLLDVCPLTLGIETVGGVMTKLIPRNTVVPTKKSQIFSTASDNQPTVTIKVYEGERPLTKDNHLLGTFDLTGIPPAPRGVPQIEVTFEIDVNGILRVTAEDKGTGNKNKITITNDQNRLTPEEIERMVNDAEKFAEEDKKLKERIDTRNELESYAYSLKNQIGDKEKLGGKLSSEDKETMEKAVEEKIEWLESHQDADIEDFKAKKKELEEIVQPIISKLYGSAGPPPTGEEDTAEKDEL

SEQ ID NO: 7610 - RNA, 1965 nt, synthetic construct
  misc_feature 1..1965: note = GRP78_(BiP)__Homo_sapiens__AAF42836
  source 1..1965: mol_type = other RNA
atgaagctctccctggtggccgcgatgctgctgctgctcagcgcggcgcgggccgaggaggaggacaagaaggaggacgtgggcacggtggtcggcatcgacctggggaccacctactcctgcgtcggcgtgttcaagaacggccgcgtggagatcatcgccaacgatcagggcaaccgcatcacgccgtcctatgtcgccttcactcctgaaggggaacgtctgattggcgatgccgccaagaaccagctcacctccaaccccgagaacacggtctttgacgccaagcggctcatcggccgcacgtggaatgacccgtctgtgcagcaggacatcaagttcttgccgttcaaggtggttgaaaagaaaactaaaccatacattcaagttgatattggaggtgggcaaacaaagacatttgctcctgaagaaatttctgccatggttctcactaaaatgaaagaaaccgctgaggcttatttgggaaagaaggttacccatgcagttgttactgtaccagcctattttaatgatgcccaacgccaagcaaccaaagacgctggaactattgctggcctaaatgttatgaggatcatcaacgagcctacggcagctgctattgcttatggcctggataagagggagggggagaagaacatcctggtgtttgacctgggtggcggaaccttcgatgtgtctcttctcaccattgacaatggtgtcttcgaagttgtggccactaatggagatactcatctgggtggagaagactttgaccagcgtgtcatggaacacttcatcaaactgtacaaaaagaagacgggcaaagatgtcaggaaagacaatagagctgtgcagaaactccggcgcgaggtagaaaaggccaaacgggccctgtcttctcagcatcaagcaagaattgaaattgagtccttctatgaaggagaagacttttctgagaccctgactcgggccaaatttgaagagctcaacatggatctgttccggtctactatgaagcccgtccagaaagtgttggaagattctgatttgaagaagtctgatattgatgaaattgttcttgttggtggctcgactcgaattccaaagattcagcaactggttaaagagttcttcaatggcaaggaaccatcccgtggcataaacccagatgaagctgtagcgtatggtgctgctgtccaggctggtgtgctctctggtgatcaagatacaggtgacctggtactgcttgatgtatgtccccttacacttggtattgaaactgtgggaggtgtcatgaccaaactgattccaaggaacacagtggtgcctaccaagaagtctcagatcttttctacagcttctgataatcaaccaactgttacaatcaaggtctatgaaggtgaaagacccctgacaaaagacaatcatcttctgggtacatttgatctgactggaattcctcctgctcctcgtggggtcccacagattgaagtcacctttgagatagatgtgaatggtattcttcgagtgacagctgaagacaagggtacagggaacaaaaataagatcacaatcaccaatgaccagaatcgcctgacacctgaagaaatcgaaaggatggttaatgatgctgagaagtttgctgaggaagacaaaaagctcaaggagcgcattgatactagaaatgagttggaaagctatgcctattctctaaagaatcagattggagataaagaaaagctgggaggtaaactttcctctgaagataaggagaccatggaaaaagctgtagaagaaaagattgaatggctggaaagccaccaagatgctgacattgaagacttcaaagctaagaagaaggaactggaagaaattgttcaaccaattatcagcaaactctatggaagtgcaggccctcccccaactggtgaagaggatacagcagaaaaagatgagttgtag

SEQ ID NO: 7611 - RNA, 1965 nt, synthetic construct
  misc_feature 1..1965: note = derived and/or modified sequence opt1 fromGRP78_(BiP)__Homo_sapiens__AAF42836
  source 1..1965: mol_type = other RNA
atgaagctgagcctcgtggccgccatgctgctgctcctgtccgcggcccgcgccgaggaggaggacaagaaggaggacgtcggcaccgtggtggggatcgacctgggcaccacgtacagctgcgtcggggtgttcaagaacggccgggtggagatcatcgccaacgaccaggggaaccgcatcaccccctcctacgtcgccttcaccccggagggcgagcggctcatcggcgacgcggccaagaaccagctgaccagcaaccccgagaacacggtgttcgacgccaagcgcctgatcgggcggacctggaacgacccctccgtgcagcaggacatcaagttcctccccttcaaggtcgtggagaagaagaccaagccgtacatccaggtggacatcggcgggggccagaccaagacgttcgcccccgaggagatcagcgcgatggtcctgaccaagatgaaggagaccgccgaggcctacctggggaagaaggtgacccacgccgtggtcacggtgcccgcctacttcaacgacgcgcagcgccaggccaccaaggacgccggcaccatcgccggcctcaacgtgatgcggatcatcaacgagcccaccgccgcggccatcgcctacgggctggacaagcgcgagggcgagaagaacatcctggtcttcgacctcgggggcggcacgttcgacgtgtccctgctgaccatcgacaacggggtgttcgaggtcgtggccaccaacggcgacacccacctcgggggcgaggacttcgaccagcgggtgatggagcacttcatcaagctgtacaagaagaagacggggaaggacgtccgcaaggacaaccgggccgtgcagaagctgcgccgggaggtcgagaaggcgaagcgcgccctcagctcccagcaccaggcccggatcgagatcgagagcttctacgagggcgaggacttctccgagaccctgacccgcgccaagttcgaggagctgaacatggacctcttccggagcaccatgaagccggtgcagaaggtgctggaggactccgacctgaagaagtccgacatcgacgagatcgtcctcgtgggcgggagcacgcgcatccccaagatccagcagctggtgaaggagttcttcaacggcaaggagcccagccgggggatcaaccccgacgaggccgtcgcgtacggcgccgccgtgcaggccggggtgctgtccggcgaccaggacaccggcgacctcgtcctgctggacgtgtgcccgctcaccctggggatcgagaccgtgggcggggtcatgacgaagctgatcccccgcaacaccgtggtgcccaccaagaagtcccagatcttcagcaccgcgagcgacaaccagcccacggtcaccatcaaggtgtacgagggcgagcggccgctcaccaaggacaaccacctcctggggaccttcgacctgacgggcatcccgcccgcgccccgcggcgtgccccagatcgaggtcaccttcgagatcgacgtgaacgggatcctgcgcgtgaccgccgaggacaagggcaccgggaacaagaacaagatcaccatcacgaacgaccagaaccggctgacccccgaggagatcgagcgcatggtcaacgacgccgagaagttcgccgaggaggacaagaagctcaaggagcggatcgacacccgcaacgagctggagagctacgcctactccctgaagaaccagatcggcgacaaggagaagctcggcgggaagctgagctccgaggacaaggagaccatggagaaggccgtggaggagaagatcgagtggctggagagccaccaggacgccgacatcgaggacttcaaggccaagaagaaggagctcgaggagatcgtgcagcccatcatctccaagctgtacggcagcgccgggcccccgcccacgggcgaggaggacaccgcggagaaggacgagctgtga

SEQ ID NO: 7612 - RNA, 1965 nt, synthetic construct
  misc_feature 1..1965: note = derived and/or modified sequence opt2 fromGRP78_(BiP)__Homo_sapiens__AAF42836
  source 1..1965: mol_type = other RNA
atgaagctctccctcgtcgccgccatgctcctcctcctctccgccgcccgcgccgaggaggaggacaagaaggaggacgtcggcaccgtcgtcggcatcgacctcggcaccacctactcctgcgtcggcgtcttcaagaacggccgcgtcgagatcatcgccaacgaccagggcaaccgcatcaccccctcctacgtcgccttcacccccgagggcgagcgcctcatcggcgacgccgccaagaaccagctcacctccaaccccgagaacaccgtcttcgacgccaagcgcctcatcggccgcacctggaacgacccctccgtccagcaggacatcaagttcctccccttcaaggtcgtcgagaagaagaccaagccctacatccaggtcgacatcggcggcggccagaccaagaccttcgcccccgaggagatctccgccatggtcctcaccaagatgaaggagaccgccgaggcctacctcggcaagaaggtcacccacgccgtcgtcaccgtccccgcctacttcaacgacgcccagcgccaggccaccaaggacgccggcaccatcgccggcctcaacgtcatgcgcatcatcaacgagcccaccgccgccgccatcgcctacggcctcgacaagcgcgagggcgagaagaacatcctcgtcttcgacctcggcggcggcaccttcgacgtctccctcctcaccatcgacaacggcgtcttcgaggtcgtcgccaccaacggcgacacccacctcggcggcgaggacttcgaccagcgcgtcatggagcacttcatcaagctctacaagaagaagaccggcaaggacgtccgcaaggacaaccgcgccgtccagaagctccgccgcgaggtcgagaaggccaagcgcgccctctcctcccagcaccaggcccgcatcgagatcgagtccttctacgagggcgaggacttctccgagaccctcacccgcgccaagttcgaggagctcaacatggacctcttccgctccaccatgaagcccgtccagaaggtcctcgaggactccgacctcaagaagtccgacatcgacgagatcgtcctcgtcggcggctccacccgcatccccaagatccagcagctcgtcaaggagttcttcaacggcaaggagccctcccgcggcatcaaccccgacgaggccgtcgcctacggcgccgccgtccaggccggcgtcctctccggcgaccaggacaccggcgacctcgtcctcctcgacgtctgccccctcaccctcggcatcgagaccgtcggcggcgtcatgaccaagctcatcccccgcaacaccgtcgtccccaccaagaagtcccagatcttctccaccgcctccgacaaccagcccaccgtcaccatcaaggtctacgagggcgagcgccccctcaccaaggacaaccacctcctcggcaccttcgacctcaccggcatcccccccgccccccgcggcgtcccccagatcgaggtcaccttcgagatcgacgtcaacggcatcctccgcgtcaccgccgaggacaagggcaccggcaacaagaacaagatcaccatcaccaacgaccagaaccgcctcacccccgaggagatcgagcgcatggtcaacgacgccgagaagttcgccgaggaggacaagaagctcaaggagcgcatcgacacccgcaacgagctcgagtcctacgcctactccctcaagaaccagatcggcgacaaggagaagctcggcggcaagctctcctccgaggacaaggagaccatggagaaggccgtcgaggagaagatcgagtggctcgagtcccaccaggacgccgacatcgaggacttcaaggccaagaagaaggagctcgaggagatcgtccagcccatcatctccaagctctacggctccgccggccccccccccaccggcgaggaggacaccgccgagaaggacgagctctga

SEQ ID NO: 7613 - RNA, 1965 nt, synthetic construct
  misc_feature 1..1965: note = derived and/or modified sequence opt3 fromGRP78_(BiP)__Homo_sapiens__AAF42836
  source 1..1965: mol_type = other RNA
atgaagctgagcctcgtggccgctatgcttctgttgttatccgcagccagagcggaggaagaggacaaaaaggaagatgtcggcaccgttgtggggatcgacctgggaacaacttactcttgcgtaggtgtgttcaaaaacggcagggtcgagattatagctaatgatcaggggaaccggatcacgccctcatatgtggcctttacccctgaaggagagcgcctaattggcgacgcagccaagaatcaactcacaagtaacccagagaatactgttttcgatgctaaacgactgatcggtcgtacctggaacgacccgagcgtgcagcaggatattaagtttcttcccttcaaggtcgtggaaaagaagacaaaaccttacatccaggtagacatagggggaggccaaaccaagacttttgcaccagaggaaatctccgccatggttctgacaaaaatgaaggagaccgctgaggcctatttgggcaagaaagtgacgcacgcggtcgtgactgtgcccgcatacttcaatgatgcccagagacaggctaccaaggacgccgggacaattgcaggactcaacgtcatgaggatcattaatgaacctactgctgccgcgatcgcctatggtctggataaacgggagggcgaaaagaacatactggtttttgacctcgggggaggcaccttcgatgtgtctttactgacaattgacaatggtgtatttgaggtggtcgcaaccaacggggacacgcatcttggaggcgaagatttcgaccagcgcgtgatggagcactttatcaaattgtacaagaaaaagactggcaaggatgttagaaaagacaatagggctgtgcaaaagctgcggcgcgaggtcgaaaaagccaagcgagctctatcgtcacagcatcaggccagaattgagatcgaatctttctatgagggggaagattttagtgagacactcaccagggcaaaattcgaggaactgaacatggaccttttccggtccactatgaagccagtgcagaaggtactggaggattctgacttgaaaaagagcgatatcgacgaaattgttctcgtgggaggttccacacgtatacccaaaatccaacagctggtcaaggagtttttcaatggcaaagaaccttcacgcgggattaacccagatgaggccgtggcttacggagcggcagtccaggccggcgtgttaagtggtgaccaagacaccggggatctggttctccttgacgtgtgtccgctgacgttgggcatcgagaccgtaggaggcgtcatgacaaagctaatacccagaaacactgtggttcctaccaagaaaagccagatttttagcacagcttccgataatcagccaactgtgaccatcaaggtctacgaaggggagaggcccctgacaaaagacaaccacctcctgggaaccttcgatcttactggtatccctccagcaccccggggcgtgccgcagattgaagtaacgtttgagatcgacgtgaatgggattctgcgagttacagccgaggataagggaaccggcaacaaaaataagataactatcaccaacgaccaaaatcgcttgacacctgaagagattgaaagaatggtcaacgatgccgagaagttcgctgaagaggacaaaaagctcaaagagaggatcgatacccggaatgaactggagtcatatgcctacagcttaaagaaccagatcggtgacaaagaaaagctagggggcaaactgagttctgaggataaggaaactatggagaaggcagtggaggagaaaattgaatggctcgaatcccatcaggacgcggacatagaggattttaaggctaaaaagaaagaactggaggagatcgtgcagcccattatcagcaaactttatggatcggccggcccacctcccacaggggaagaggacacggcagaaaaggatgagttgtga

SEQ ID NO: 7614 - RNA, 1965 nt, synthetic construct
  misc_feature 1..1965: note = derived and/or modified sequence opt4 fromGRP78_(BiP)__Homo_sapiens__AAF42836
  source 1..1965: mol_type = other RNA
atgaagctgagcctggtggccgccatgctgctgctgctgagcgccgccagagccgaggaggaggacaagaaggaggacgtgggcaccgtggtgggcatcgacctgggcaccacctacagctgcgtgggcgtgttcaagaacggcagagtggagatcatcgccaacgaccagggcaacagaatcacccccagctacgtggccttcacccccgagggcgagagactgatcggcgacgccgccaagaaccagctgaccagcaaccccgagaacaccgtgttcgacgccaagagactgatcggcagaacctggaacgaccccagcgtgcagcaggacatcaagttcctgcccttcaaggtggtggagaagaagaccaagccctacatccaggtggacatcggcggcggccagaccaagaccttcgcccccgaggagatcagcgccatggtgctgaccaagatgaaggagaccgccgaggcctacctgggcaagaaggtgacccacgccgtggtgaccgtgcccgcctacttcaacgacgcccagagacaggccaccaaggacgccggcaccatcgccggcctgaacgtgatgagaatcatcaacgagcccaccgccgccgccatcgcctacggcctggacaagagagagggcgagaagaacatcctggtgttcgacctgggcggcggcaccttcgacgtgagcctgctgaccatcgacaacggcgtgttcgaggtggtggccaccaacggcgacacccacctgggcggcgaggacttcgaccagagagtgatggagcacttcatcaagctgtacaagaagaagaccggcaaggacgtgagaaaggacaacagagccgtgcagaagctgagaagagaggtggagaaggccaagagagccctgagcagccagcaccaggccagaatcgagatcgagagcttctacgagggcgaggacttcagcgagaccctgaccagagccaagttcgaggagctgaacatggacctgttcagaagcaccatgaagcccgtgcagaaggtgctggaggacagcgacctgaagaagagcgacatcgacgagatcgtgctggtgggcggcagcaccagaatccccaagatccagcagctggtgaaggagttcttcaacggcaaggagcccagcagaggcatcaaccccgacgaggccgtggcctacggcgccgccgtgcaggccggcgtgctgagcggcgaccaggacaccggcgacctggtgctgctggacgtgtgccccctgaccctgggcatcgagaccgtgggcggcgtgatgaccaagctgatccccagaaacaccgtggtgcccaccaagaagagccagatcttcagcaccgccagcgacaaccagcccaccgtgaccatcaaggtgtacgagggcgagagacccctgaccaaggacaaccacctgctgggcaccttcgacctgaccggcatcccccccgcccccagaggcgtgccccagatcgaggtgaccttcgagatcgacgtgaacggcatcctgagagtgaccgccgaggacaagggcaccggcaacaagaacaagatcaccatcaccaacgaccagaacagactgacccccgaggagatcgagagaatggtgaacgacgccgagaagttcgccgaggaggacaagaagctgaaggagagaatcgacaccagaaacgagctggagagctacgcctacagcctgaagaaccagatcggcgacaaggagaagctgggcggcaagctgagcagcgaggacaaggagaccatggagaaggccgtggaggagaagatcgagtggctggagagccaccaggacgccgacatcgaggacttcaaggccaagaagaaggagctggaggagatcgtgcagcccatcatcagcaagctgtacggcagcgccggccccccccccaccggcgaggaggacaccgccgagaaggacgagctgtga

SEQ ID NO: 7615 - RNA, 1965 nt, synthetic construct
  misc_feature 1..1965: note = derived and/or modified sequence opt5 fromGRP78_(BiP)__Homo_sapiens__AAF42836
  source 1..1965: mol_type = other RNA
atgaagctgagcctcgtggccgctatgctgcttctgctctccgccgcgagagctgaggaagaggacaaaaaggaagatgtcggcaccgttgtggggatcgacctgggaacaacgtactcttgcgtgggcgtcttcaaaaacgggcgggtggagattatcgccaatgatcagggaaaccgcattacccccagctatgttgcctttacacctgaaggcgagagacttatcggggacgctgccaagaatcaactgacctccaacccggagaatacagtgttcgatgctaaacggctcattggacgcacctggaacgacccctctgtccagcaggatatcaagtttctgcctttcaaggtggttgaaaagaagacaaaaccctacatccaggtggacattggcggcgggcaaaccaagacgtttgcccctgaggaaatcagcgcgatggtcctgaccaaaatgaaggagacagccgaggcttatctcggaaagaaagtgacccacgccgtggtcacagttcccgcttacttcaatgatgcccagagacaggcgaccaaggacgccggcacgattgctgggctgaacgtgatgcggatcattaatgaacctacagccgctgccatcgcctatggacttgataaacgcgagggcgaaaagaacattctggtgtttgacctcgggggaggcaccttcgatgtctccctgcttacaatcgacaatggcgtgtttgaggttgtggctaccaacggggacacccatctgggaggcgaagatttcgaccagagagtcatggagcactttatcaaactctacaagaaaaagacagggaaggatgtgcggaaagacaatcgcgcggttcaaaagctgagacgggaggtggaaaaagccaagcgcgctctgtctagccagcatcaggccagaattgagatcgaatccttctatgagggagaagattttagcgagacgctcacccgggccaaattcgaggaactgaacatggaccttttccgctctacaatgaagccggtccagaaggtgctggaggattccgacctcaaaaagagcgatattgacgaaatcgtcctggtgggcgggtctacccggattcccaaaatccaacagcttgttaaggagtttttcaatggaaaagaaccttccagaggcatcaaccccgatgaggctgtggcctacggcgcggctgtccaggccggggtgctgagcggagaccaagacacaggcgatctcgttctgctggacgtgtgtcctctcaccctggggattgagacggtcggaggcgtgatgacaaaacttatccccagaaacaccgtggttccgaccaagaaatctcagatcttttccacagccagcgataatcagcctaccgtcacaattaaggtgtacgaaggggagcgccccctgacgaaagacaaccacctcctgggcaccttcgatcttacaggcattcctcccgctccccggggagtgcctcagatcgaagtcacctttgagatcgacgtgaatgggattctgagagttacagccgaggataagggaaccggcaacaaaaataagatcacgattaccaacgaccaaaatcgcctcacaccggaagagatcgaacggatggtgaacgatgctgagaagttcgccgaagaggacaaaaagctgaaagagagaattgatacccgcaatgaactggagtcctatgcgtactctctcaagaaccagatcggggacaaagaaaagctgggaggcaaacttagctccgaggataaggaaacaatggagaaggccgtcgaggagaaaattgaatggctggaaagccatcaggacgctgacatcgaggattttaaggccaaaaagaaagaactcgaggagatcgtgcagcccattatctctaagctgtatgggtccgctggccctccccctaccggagaagaggacacggccgaaaaggatgagctgtga

SEQ ID NO: 7616 - RNA, 1965 nt, synthetic construct
  misc_feature 1..1965: note = derived and/or modified sequence opt6 fromGRP78_(BiP)__Homo_sapiens__AAF42836
  source 1..1965: mol_type = other RNA
atgaaactatcattagtagccgcaatgcttttacttctaagcgcagcccgtgccgaagaagaagataaaaaagaagatgtaggaacagtagtcggaatagatttaggaacaacatatagctgtgtaggggtctttaaaaacggaagagtagaaattatcgcaaatgaccaaggaaatagaataacaccttcatatgttgcatttacaccagaaggagaacgattaattggagacgctgctaaaaatcaactaacttctaatccagaaaacacagtgttcgacgcaaaaagattaataggaaggacatggaatgatccaagtgtacaacaagacataaaattcctaccattcaaagtcgtagagaaaaaaacaaaaccatacatacaagtagatataggagggggacaaacaaaaacattcgcccccgaagagatatcagcaatggtattaaccaaaatgaaagaaacagcggaagcatatttaggcaaaaaagtaacacatgcagtagtaaccgtacccgcatactttaatgacgcccaaagacaagcaacaaaagacgcaggaacaatagcaggactgaatgtaatgcgtataataaatgaacccacagccgcagcaatagcatacggattagataaaagagaaggagaaaaaaatattctcgtgttcgatctgggaggtggcacatttgacgtaagtctattaacaatagataacggagttttcgaagtagtagcaactaacggcgacacccatttaggaggagaagattttgaccaacgagtaatggaacacttcataaaattatataaaaaaaaaaccggaaaagacgtcagaaaagacaacagagctgtacaaaaactacgaagagaagtagaaaaagctaaaagagccctgtcaagtcaacaccaagcaagaatagaaatagaatccttctatgaaggagaagacttcagcgaaacactaaccagagcaaaattcgaagaactaaatatggacctctttagaagcacaatgaaaccagtacaaaaagtattagaagattcggacttaaaaaaatcagatatagatgaaatagtactagttggagggtcaacaagaataccaaagatacaacaacttgtaaaagagttctttaacggaaaagaaccaagcaggggaataaatccagacgaagcagtagcttatggagcagcagtacaagcaggagtattaagtggagatcaagatacaggagatctagtactattagacgtatgcccattaactctcggaatagaaactgtaggaggcgtaatgacaaaattaatcccaagaaacaccgtagtcccaacaaaaaaatcacaaatattttcaacagcaagtgacaaccaaccaacagttacaataaaggtttacgaaggagaaagaccattaacaaaagataatcacctattaggaacatttgacttaacaggaataccacctgcacccagaggagtcccacaaatcgaagtaacatttgaaatagatgtaaacggaatattaagggtcacagctgaagataaaggcacaggtaacaaaaacaaaataacaataactaatgaccaaaatagattaacaccagaagaaatagaaaggatggtaaacgatgcagaaaaattcgcagaagaagacaaaaaattaaaagagagaatcgatactagaaacgaacttgaatcttacgcttacagcctaaaaaatcaaataggagacaaagaaaaacttggcggaaaactatctagcgaagacaaagaaactatggaaaaagcggtagaggaaaaaatagaatggttggaatctcatcaagacgcagacatagaagacttcaaagcaaaaaaaaaagaactcgaagagatagtacaaccaataatcagtaaactatatggaagcgcaggaccacctccaacgggagaagaagacaccgcagaaaaagacgaactataa

SEQ ID NO: 7617 - protein, 803 aa, synthetic construct
  REGION 1..803: note = GRP94_(gp96)__Homo_sapiens__P14625
MRALWVLGLCCVLLTFGSVRADDEVDVDGTVEEDLGKSREGSRTDDEVVQREEEAIQLDGLNASQIRELREKSEKFAFQAEVNRMMKLIINSLYKNKEIFLRELISNASDALDKIRLISLTDENALSGNEELTVKIKCDKEKNLLHVTDTGVGMTREELVKNLGTIAKSGTSEFLNKMTEAQEDGQSTSELIGQFGVGFYSAFLVADKVIVTSKHNNDTQHIWESDSNEFSVIADPRGNTLGRGTTITLVLKEEASDYLELDTIKNLVKKYSQFINFPIYVWSSKTETVEEPMEEEEAAKEEKEESDDEAAVEEEEEEKKPKTKKVEKTVWDWELMNDIKPIWQRPSKEVEEDEYKAFYKSFSKESDDPMAYIHFTAEGEVTFKSILFVPTSAPRGLFDEYGSKKSDYIKLYVRRVFITDDFHDMMPKYLNFVKGVVDSDDLPLNVSRETLQQHKLLKVIRKKLVRKTLDMIKKIADDKYNDTFWKEFGTNIKLGVIEDHSNRTRLAKLLRFQSSHHPTDITSLDQYVERMKEKQDKIYFMAGSSRKEAESSPFVERLLKKGYEVIYLTEPVDEYCIQALPEFDGKRFQNVAKEGVKFDESEKTKESREAVEKEFEPLLNWMKDKALKDKIEKAVVSQRLTESPCALVASQYGWSGNMERIMKAQAYQTGKDISTNYYASQKKTFEINPRHPLIRDMLRRIKEDEDDKTVLDLAVVLFETATLRSGYLLPDTKAYGDRIERMLRLSLNIDPDAKVEEEPEEEPEETAEDTTEDTEQDEDEEMDVGTDEEEETAKESTAEKDEL

SEQ ID NO: 7618 - RNA, 2412 nt, synthetic construct
  misc_feature 1..2412: note = GRP94_(gp96)__Homo_sapiens__AAH66656
  source 1..2412: mol_type = other RNA
atgagggccctgtgggtgctgggcctctgctgcgtcctgctgaccttcgggtcggtcagagctgacgatgaagttgatgtggatggtacagtagaagaggatctgggtaaaagtagagaaggatcaaggacggatgatgaagtagtacagagagaggaagaagctattcagttggatggattaaatgcatcacaaataagagaacttagagagaagtcggaaaagtttgccttccaagccgaagttaacagaatgatgaaacttatcatcaattcattgtataaaaataaagagattttcctgagagaactgatttcaaatgcttctgatgctttagataagataaggctaatatcactgactgatgaaaatgctctttctggaaatgaggaactaacagtcaaaattaagtgtgataaggagaagaacctgctgcatgtcacagacaccggtgtaggaatgaccagagaagagttggttaaaaaccttggtaccatagccaaatctgggacaagcgagtttttaaacaaaatgactgaagcacaggaagatggccagtcaacttctgaattgattggccagtttggtgtcggtttctattccgccttccttgtagcagataaggttattgtcacttcaaaacacaacaacgatacccagcacatctgggagtctgactccaatgaattttctgtaattgctgacccaagaggaaacactctaggacggggaacgacaattacccttgtcttaaaagaagaagcatctgattaccttgaattggatacaattaaaaatctcgtcaaaaaatattcacagttcataaactttcctatttatgtatggagcagcaagactgaaactgttgaggagcccatggaggaagaagaagcagccaaagaagagaaagaagaatctgatgatgaagctgcagtagaggaagaagaagaagaaaagaaaccaaagactaaaaaagttgaaaaaactgtctgggactgggaacttatgaatgatatcaaaccaatatggcagagaccatcaaaagaagtagaagaagatgaatacaaagctttctacaaatcattttcaaaggaaagtgatgaccccatggcttatattcactttactgctgaaggggaagttaccttcaaatcaattttatttgtacccacatctgctccacgtggtctgtttgacgaatatggatctaaaaagagcgattacattaagctctatgtgcgccgtgtattcatcacagacgacttccatgatatgatgcctaaatacctcaattttgtcaagggtgtggtggactcagatgatctccccttgaatgtttcccgcgagactcttcagcaacataaactgcttaaggtgattaggaagaagcttgttcgtaaaacgctggacatgatcaagaagattgctgatgataaatacaatgatactttttggaaagaatttggtaccaacatcaagcttggtgtgattgaagaccactcgaatcgaacacgtcttgctaaacttcttaggttccagtcttctcatcatccaactgacattactagcctagaccagtatgtggaaagaatgaaggaaaaacaagacaaaatctacttcatggctgggtccagcagaaaagaggctgaatcttctccatttgttgagcgacttctgaaaaagggctatgaagttatttacctcacagaacctgtggatgaatactgtattcaggcccttcccgaatttgatgggaagaggttccagaatgttgccaaggaaggagtgaagttcgatgaaagtgagaaaactaaggagagtcgtgaagcagttgagaaagaatttgagcctctgctgaattggatgaaagataaagcccttaaggacaagattgaaaaggctgtggtgtctcagcgcctgacagaatctccgtgtgctttggtggccagccagtacggatggtctggcaacatggagagaatcatgaaagcacaagcgtaccaaacgggcaaggacatctctacaaattactatgcgagtcagaagaaaacatttgaaattaatcccagacacccgctgatcagagacatgcttcgacgaattaaggaagatgaagatgataaaacagttttggatcttgctgtggttttgtttgaaacagcaacgcttcggtcagggtatcttttaccagacactaaagcatatggagatagaatagaaagaatgcttcgcctcagtttgaacattgaccctgatgcaaaggtggaagaagagcctgaagaagaacctgaagagacagcagaagacacaacagaagacacagagcaagacgaagatgaagaaatggatgtgggaacagatgaagaagaagaaacagcaaaggaatctacagctgaaaaagatgaattgtaa

SEQ ID NO: 7619 - RNA, 2412 nt, synthetic construct
  misc_feature 1..2412: note = derived and/or modified sequence opt1 fromGRP94_(gp96)__Homo_sapiens__AAH66656
  source 1..2412: mol_type = other RNA
atgcgcgccctgtgggtgctcggcctgtgctgcgtcctgctcaccttcgggagcgtgcgggccgacgacgaggtggacgtcgacggcaccgtggaggaggacctggggaagtcccgcgagggcagccggacggacgacgaggtggtccagcgcgaggaggaggcgatccagctggacgggctcaacgcctcccagatccgggagctgcgcgagaagtccgagaagttcgccttccaggccgaggtgaaccggatgatgaagctgatcatcaacagcctctacaagaacaaggagatcttcctgcgcgagctgatcagcaacgcctccgacgcgctcgacaagatccggctgatcagcctgaccgacgagaacgccctctccggcaacgaggagctgaccgtgaagatcaagtgcgacaaggagaagaacctgctccacgtcaccgacacgggcgtggggatgacccgcgaggagctggtgaagaacctgggcaccatcgccaagagcgggacctccgagttcctcaacaagatgacggaggcccaggaggacggccagagcacctccgagctgatcgggcagttcggcgtcggcttctacagcgcgttcctggtggccgacaaggtgatcgtcacctccaagcacaacaacgacacccagcacatctgggagagcgactccaacgagttcagcgtgatcgccgacccccgggggaacacgctcggccgcgggaccaccatcaccctggtgctgaaggaggaggcctccgactacctcgagctggacacgatcaagaacctggtcaagaagtacagccagttcatcaacttcccgatctacgtgtggagctccaagaccgagaccgtggaggagcccatggaggaggaggaggccgcgaaggaggagaaggaggagagcgacgacgaggccgccgtcgaggaggaggaggaggagaagaagcccaagaccaagaaggtggagaagacggtgtgggactgggagctcatgaacgacatcaagcccatctggcagcggccgtccaaggaggtcgaggaggacgagtacaaggccttctacaagagcttctccaaggagagcgacgaccccatggcctacatccacttcaccgcggagggcgaggtgaccttcaagtccatcctgttcgtccccaccagcgcgccccgcggcctgttcgacgagtacgggtccaagaagtccgactacatcaagctctacgtgcggcgcgtgttcatcacggacgacttccacgacatgatgccgaagtacctgaacttcgtcaagggcgtggtggacagcgacgacctgcccctcaacgtcagccgggagaccctgcagcagcacaagctgctcaaggtgatccgcaagaagctggtgcggaagaccctggacatgatcaagaagatcgccgacgacaagtacaacgacaccttctggaaggagttcgggacgaacatcaagctcggcgtcatcgaggaccactccaaccgcacccggctggccaagctgctccgcttccagagctcccaccaccccaccgacatcaccagcctggaccagtacgtggagcgcatgaaggagaagcaggacaagatctacttcatggccgggtccagccggaaggaggccgagtccagccccttcgtggagcgcctgctcaagaagggctacgaggtcatctacctgacggagccggtggacgagtactgcatccaggccctgcccgagttcgacggcaagcggttccagaacgtggccaaggagggggtcaagttcgacgagagcgagaagaccaaggagtcccgcgaggccgtggagaaggagttcgagcccctgctcaactggatgaaggacaaggccctgaaggacaagatcgagaaggcggtggtcagccagcggctgaccgagtccccctgcgccctcgtggccagccagtacggctggtccgggaacatggagcgcatcatgaaggcccaggcgtaccagaccggcaaggacatcagcacgaactactacgcctcccagaagaagaccttcgagatcaacccgcggcaccccctgatccgcgacatgctgcggcgcatcaaggaggacgaggacgacaagaccgtgctcgacctggccgtcgtgctgttcgagaccgccaccctccggagcgggtacctgctgcccgacacgaaggcctacggcgaccgcatcgagcggatgctccgcctgtccctgaacatcgaccccgacgcgaaggtggaggaggagccggaggaggagcccgaggagaccgccgaggacaccaccgaggacacggagcaggacgaggacgaggagatggacgtcggcaccgacgaggaggaggagaccgccaaggagagcaccgccgagaaggacgagctctga

SEQ ID NO: 7620 - RNA, 2412 nt, synthetic construct
  misc_feature 1..2412: note = derived and/or modified sequence opt2 fromGRP94_(gp96)__Homo_sapiens__AAH66656
  source 1..2412: mol_type = other RNA
atgcgcgccctctgggtcctcggcctctgctgcgtcctcctcaccttcggctccgtccgcgccgacgacgaggtcgacgtcgacggcaccgtcgaggaggacctcggcaagtcccgcgagggctcccgcaccgacgacgaggtcgtccagcgcgaggaggaggccatccagctcgacggcctcaacgcctcccagatccgcgagctccgcgagaagtccgagaagttcgccttccaggccgaggtcaaccgcatgatgaagctcatcatcaactccctctacaagaacaaggagatcttcctccgcgagctcatctccaacgcctccgacgccctcgacaagatccgcctcatctccctcaccgacgagaacgccctctccggcaacgaggagctcaccgtcaagatcaagtgcgacaaggagaagaacctcctccacgtcaccgacaccggcgtcggcatgacccgcgaggagctcgtcaagaacctcggcaccatcgccaagtccggcacctccgagttcctcaacaagatgaccgaggcccaggaggacggccagtccacctccgagctcatcggccagttcggcgtcggcttctactccgccttcctcgtcgccgacaaggtcatcgtcacctccaagcacaacaacgacacccagcacatctgggagtccgactccaacgagttctccgtcatcgccgacccccgcggcaacaccctcggccgcggcaccaccatcaccctcgtcctcaaggaggaggcctccgactacctcgagctcgacaccatcaagaacctcgtcaagaagtactcccagttcatcaacttccccatctacgtctggtcctccaagaccgagaccgtcgaggagcccatggaggaggaggaggccgccaaggaggagaaggaggagtccgacgacgaggccgccgtcgaggaggaggaggaggagaagaagcccaagaccaagaaggtcgagaagaccgtctgggactgggagctcatgaacgacatcaagcccatctggcagcgcccctccaaggaggtcgaggaggacgagtacaaggccttctacaagtccttctccaaggagtccgacgaccccatggcctacatccacttcaccgccgagggcgaggtcaccttcaagtccatcctcttcgtccccacctccgccccccgcggcctcttcgacgagtacggctccaagaagtccgactacatcaagctctacgtccgccgcgtcttcatcaccgacgacttccacgacatgatgcccaagtacctcaacttcgtcaagggcgtcgtcgactccgacgacctccccctcaacgtctcccgcgagaccctccagcagcacaagctcctcaaggtcatccgcaagaagctcgtccgcaagaccctcgacatgatcaagaagatcgccgacgacaagtacaacgacaccttctggaaggagttcggcaccaacatcaagctcggcgtcatcgaggaccactccaaccgcacccgcctcgccaagctcctccgcttccagtcctcccaccaccccaccgacatcacctccctcgaccagtacgtcgagcgcatgaaggagaagcaggacaagatctacttcatggccggctcctcccgcaaggaggccgagtcctcccccttcgtcgagcgcctcctcaagaagggctacgaggtcatctacctcaccgagcccgtcgacgagtactgcatccaggccctccccgagttcgacggcaagcgcttccagaacgtcgccaaggagggcgtcaagttcgacgagtccgagaagaccaaggagtcccgcgaggccgtcgagaaggagttcgagcccctcctcaactggatgaaggacaaggccctcaaggacaagatcgagaaggccgtcgtctcccagcgcctcaccgagtccccctgcgccctcgtcgcctcccagtacggctggtccggcaacatggagcgcatcatgaaggcccaggcctaccagaccggcaaggacatctccaccaactactacgcctcccagaagaagaccttcgagatcaacccccgccaccccctcatccgcgacatgctccgccgcatcaaggaggacgaggacgacaagaccgtcctcgacctcgccgtcgtcctcttcgagaccgccaccctccgctccggctacctcctccccgacaccaaggcctacggcgaccgcatcgagcgcatgctccgcctctccctcaacatcgaccccgacgccaaggtcgaggaggagcccgaggaggagcccgaggagaccgccgaggacaccaccgaggacaccgagcaggacgaggacgaggagatggacgtcggcaccgacgaggaggaggagaccgccaaggagtccaccgccgagaaggacgagctctga

SEQ ID NO: 7621 - RNA, 2412 nt, synthetic construct
  misc_feature 1..2412: note = derived and/or modified sequence opt3 fromGRP94_(gp96)__Homo_sapiens__AAH66656
  source 1..2412: mol_type = other RNA
atgagagccctgtgggtgctcggcctttgctgtgtcctgttgaccttcgggagcgttagggctgacgatgaggtggacgtagatggaacagtggaagaggacttaggtaagtcccgggaaggctctcgcactgatgacgaggtcgtgcagcgagaagaggaggcaatccaactggatgggctaaacgcctcacagattcgtgaactcagagagaaaagtgaaaagtttgcgttccaggctgaggttaataggatgatgaaactgataatcaacagcctttacaagaataaagagatttttctgcgggaattgatctccaacgcctctgacgcactcgataagattcgcctgatctcgctgacggacgagaatgccctctcaggaaacgaagagttaaccgtgaagataaaatgcgataaggagaaaaatctgcttcacgtcacagacactggcgtgggtatgaccagagaggagttggtaaagaacctggggacaatcgctaaaagcggaaccagtgagttcctaaataagatgactgaagcacaggaagatggccaatccacatctgagctcattggccagtttggggttggattctatagcgcctttctggtggctgacaaggtcatcgtgacctccaaacataacaatgacacgcagcacatttgggaatcagatagtaacgagttcagcgtgatcgccgaccccaggggtaatactcttggccgggggaccacaataactctggtcttgaaggaggaagcgtctgattacctcgagctggacaccattaaaaacttagttaagaaatattcccagtttatcaatttccctatttacgtgtggtcaagcaagacagaaaccgtagaggaaccaatggaggaggaagaggcagccaaagaagagaaggaggaaagtgatgacgaggctgccgtggaagaggaagaggaggaaaagaaaccgaagacgaaaaaggtcgagaaaactgtgtgggattgggaactgatgaacgacatcaagcccatctggcaacgcccttctaaggaggttgaagaggatgagtataaagcattttacaagtccttcagcaaagaatcggacgatccaatggcttatattcattttacagccgagggagaagtgaccttcaagtctatactcttcgtccccacttccgcgcctcgaggcctttttgacgagtacggtagtaaaaagtcagactacatcaagctgtatgtgagaagggtattcattacagatgactttcacgatatgatgccaaaatacttgaacttcgttaagggggtggtcgacagcgatgacctacccctgaatgtgtcccgggaaaccctccagcagcataaactgcttaaggtcatccgtaaaaagctggtgcgcaagacgttggatatgattaaaaagatagccgacgataaatataacgacaccttttggaaggagttcggaacaaatatcaaactcggcgttatcgaggatcactctaacagaactaggctggcaaagttactgcggtttcagagctcacaccatcctaccgacattacaagtctagatcaatacgtggaacgaatgaaagagaagcaggacaagatctatttcatggctggctccagccgcaaagaagccgagtcttcaccatttgtagagagactcctgaagaaagggtacgaagtcatttatcttactgagccggtggacgaatactgtatacaggctttgcccgagttcgatggaaagaggtttcaaaatgttgccaaagaaggtgtgaagttcgacgagagtgagaagaccaaagaaagccgggaggcagtcgaaaaggagtttgaacctctgctcaactggatgaaagataaggccctgaaagacaagatcgagaaggctgtggtatcccagcgccttacagagtctccatgcgcgctggtggcatcgcagtacggctggagcgggaatatggaaagaattatgaaagcccaggcttatcaaaccggaaaggatatctccactaactactatgcctcacagaaaaagacgttcgagatcaatcccaggcaccctttgattcgtgacatgctccggcgaataaaagaagatgaggacgataagacagttctggacttagcagtcgtgctgttcgaaaccgccactctaagaagtggctacctcctgccagataccaaggcttatggtgacaggatcgagcgcatgcttcggttgtctctgaacattgatcccgacgccaaagtggaggaagaaccggaagaggagcctgaagagacagcagaagacaccactgaggatacagaacaggacgaggatgaggaaatggacgtcgggacggatgaggaagaggaaaccgcgaaggagagcactgctgagaaagacgaactctga

SEQ ID NO: 7622 - RNA, 2412 nt, synthetic construct
  misc_feature 1..2412: note = derived and/or modified sequence opt4 fromGRP94_(gp96)__Homo_sapiens__AAH66656
  source 1..2412: mol_type = other RNA
atgagagccctgtgggtgctgggcctgtgctgcgtgctgctgaccttcggcagcgtgagagccgacgacgaggtggacgtggacggcaccgtggaggaggacctgggcaagagcagagagggcagcagaaccgacgacgaggtggtgcagagagaggaggaggccatccagctggacggcctgaacgccagccagatcagagagctgagagagaagagcgagaagttcgccttccaggccgaggtgaacagaatgatgaagctgatcatcaacagcctgtacaagaacaaggagatcttcctgagagagctgatcagcaacgccagcgacgccctggacaagatcagactgatcagcctgaccgacgagaacgccctgagcggcaacgaggagctgaccgtgaagatcaagtgcgacaaggagaagaacctgctgcacgtgaccgacaccggcgtgggcatgaccagagaggagctggtgaagaacctgggcaccatcgccaagagcggcaccagcgagttcctgaacaagatgaccgaggcccaggaggacggccagagcaccagcgagctgatcggccagttcggcgtgggcttctacagcgccttcctggtggccgacaaggtgatcgtgaccagcaagcacaacaacgacacccagcacatctgggagagcgacagcaacgagttcagcgtgatcgccgaccccagaggcaacaccctgggcagaggcaccaccatcaccctggtgctgaaggaggaggccagcgactacctggagctggacaccatcaagaacctggtgaagaagtacagccagttcatcaacttccccatctacgtgtggagcagcaagaccgagaccgtggaggagcccatggaggaggaggaggccgccaaggaggagaaggaggagagcgacgacgaggccgccgtggaggaggaggaggaggagaagaagcccaagaccaagaaggtggagaagaccgtgtgggactgggagctgatgaacgacatcaagcccatctggcagagacccagcaaggaggtggaggaggacgagtacaaggccttctacaagagcttcagcaaggagagcgacgaccccatggcctacatccacttcaccgccgagggcgaggtgaccttcaagagcatcctgttcgtgcccaccagcgcccccagaggcctgttcgacgagtacggcagcaagaagagcgactacatcaagctgtacgtgagaagagtgttcatcaccgacgacttccacgacatgatgcccaagtacctgaacttcgtgaagggcgtggtggacagcgacgacctgcccctgaacgtgagcagagagaccctgcagcagcacaagctgctgaaggtgatcagaaagaagctggtgagaaagaccctggacatgatcaagaagatcgccgacgacaagtacaacgacaccttctggaaggagttcggcaccaacatcaagctgggcgtgatcgaggaccacagcaacagaaccagactggccaagctgctgagattccagagcagccaccaccccaccgacatcaccagcctggaccagtacgtggagagaatgaaggagaagcaggacaagatctacttcatggccggcagcagcagaaaggaggccgagagcagccccttcgtggagagactgctgaagaagggctacgaggtgatctacctgaccgagcccgtggacgagtactgcatccaggccctgcccgagttcgacggcaagagattccagaacgtggccaaggagggcgtgaagttcgacgagagcgagaagaccaaggagagcagagaggccgtggagaaggagttcgagcccctgctgaactggatgaaggacaaggccctgaaggacaagatcgagaaggccgtggtgagccagagactgaccgagagcccctgcgccctggtggccagccagtacggctggagcggcaacatggagagaatcatgaaggcccaggcctaccagaccggcaaggacatcagcaccaactactacgccagccagaagaagaccttcgagatcaaccccagacaccccctgatcagagacatgctgagaagaatcaaggaggacgaggacgacaagaccgtgctggacctggccgtggtgctgttcgagaccgccaccctgagaagcggctacctgctgcccgacaccaaggcctacggcgacagaatcgagagaatgctgagactgagcctgaacatcgaccccgacgccaaggtggaggaggagcccgaggaggagcccgaggagaccgccgaggacaccaccgaggacaccgagcaggacgaggacgaggagatggacgtgggcaccgacgaggaggaggagaccgccaaggagagcaccgccgagaaggacgagctgtga

SEQ ID NO: 7623 - RNA, 2412 nt, synthetic construct
  misc_feature 1..2412: note = derived and/or modified sequence opt5 fromGRP94_(gp96)__Homo_sapiens__AAH66656
  source 1..2412: mol_type = other RNA
atgagagccctgtgggtgctcggcctgtgctgtgtccttctgaccttcgggagcgttcgggctgacgatgaggtggacgtggatggaacagtcgaagaggacctcggcaagtcccgcgaagggtctagaacggatgacgaggtggttcagcgggaagaggaggccatccaactggatggacttaacgcgagccagattcgcgaactgagagagaaatccgaaaagtttgctttccaggccgaggtgaatcggatgatgaaactcatcattaactctctgtacaagaataaagagatctttctgcgcgaactcattagcaacgcctccgacgctctggataagatcagacttatctctctgaccgacgagaatgccctcagcggcaacgaagaactgacagtcaagattaaatgcgataaggagaaaaatcttctgcacgtgaccgacacaggggttggaatgacccgggaggagctcgtgaagaacctgggcacaatcgctaaatccggcaccagcgagttcctgaataagatgacggaggcccaggaagatgggcaatctacctccgagctcattggacagtttggcgtcgggttctatagcgcgtttctggtggccgacaaggtgatcgtcacatctaaacataacaatgacacccagcacatttgggaatccgatagcaacgagttctctgttatcgctgacccccgcggaaatacacttggcagagggaccacgattacactggtgctcaaggaggaagcctccgattacctggagcttgacaccatcaaaaacctggtgaagaaatatagccagtttatcaatttccctatttacgtctggtcctctaagacagaaaccgtggaggaaccgatggaggaggaagaggctgccaaagaagagaaggaggaaagcgatgacgaggcggccgttgaagaggaagaggaggaaaagaaacccaagaccaaaaaggtggagaaaacagtctgggattgggaactcatgaacgacatcaagcctatttggcaacggccctccaaggaggtggaagaggatgagtataaagccttttacaagagcttctctaaagaatccgacgatcctatggcttatatccattttacggctgagggagaagttaccttcaagagcattctgttcgtgcccacatctgcccctcgcggcctgtttgacgagtacggcagcaaaaagtccgactacatcaagctctatgtcagacgggtgttcatcaccgatgactttcacgatatgatgccgaaatacctgaacttcgtcaagggggtggttgactctgatgaccttcccctgaatgtgagccgcgaaacactccagcagcataaactgcttaaggtcattcggaaaaagctggtgagaaagaccctcgatatgatcaaaaagattgccgacgataaatataacgacacgttttggaaggagttcggaacaaatatcaaactgggcgttattgaggatcactccaacagaacccgcctggctaagctcctgcggtttcagagctctcaccatcctaccgacatcacatcccttgatcaatacgtggaaagaatgaaagagaagcaggacaagatctatttcatggcggggagctctcgcaaagaagccgagtccagcccctttgtcgagcggctgctcaagaaaggatacgaagtgatttatctgaccgagcctgtggacgaatactgtatccaggctctgcccgagttcgatggcaagagatttcaaaatgttgccaaagaaggggtcaagttcgacgagtccgagaagacaaaagaatctcgcgaggccgtggaaaaggagtttgaaccgcttctcaactggatgaaagataaggctctgaaagacaagattgagaaggccgtggtcagccagcggctgacggagtccccttgcgcgctcgtggcttctcagtacggatggagcggcaatatggaaagaatcatgaaagcccaggcctatcaaaccggcaaggatatttccacaaactactatgctagccagaaaaagaccttcgagatcaatccccgccaccctctgattcgggacatgcttagacgcatcaaagaagatgaggacgataagacagttctggacctcgccgtggtcctgttcgaaaccgctacgctgcggtctgggtaccttctccccgataccaaggcctatggagacagaatcgagcggatgctgcgcctgtccctcaacattgatcccgacgcgaaagtggaggaagaacctgaagaggagccggaagagacagccgaagacaccacagaggataccgaacaggacgaggatgaggaaatggacgttggcacggatgaggaagaggaaacagctaaggagagcaccgccgagaaagacgaactgtga

SEQ ID NO: 7624 - RNA, 2412 nt, synthetic construct
  misc_feature 1..2412: note = derived and/or modified sequence opt6 fromGRP94_(gp96)__Homo_sapiens__AAH66656
  source 1..2412: mol_type = other RNA
atgagagcgctctgggtactaggattatgttgcgtactattaacgtttgggtctgtaagagcagacgatgaggtagatgtagacggaactgttgaagaagatttaggaaaaagccgagaaggatcaagaacagatgacgaagtcgtacaaagagaagaagaagcaatacaacttgatggactaaacgcaagtcaaataagagaattaagagaaaaatcagaaaaatttgcgtttcaagcagaagtaaacagaatgatgaaactaataatcaacagtctatataaaaacaaagaaattttcttaagagaactcataagcaatgctagtgatgcactagataaaatacgattaatatcattaacagatgaaaatgcactaagcggaaatgaggaattaacagtaaaaataaaatgcgataaagaaaaaaacctgttacatgtcacagatacaggcgttggtatgactagagaagaactagttaaaaatcttggtactatagcaaaaagtggaacatcagaattcctaaataaaatgacagaagcacaagaagatggacaaagtacgtcagaactaataggacaatttggagtgggattttattccgcattcctagtagcggacaaagtgatagtgactagcaaacacaacaatgacacacaacatatatgggaatcagatagtaatgagttcagtgtcatcgctgatccaagaggaaacacactaggtagaggaacaactataacactggtcctaaaagaagaagccagcgattatctagaattagacactataaaaaatctagttaaaaaatacagccaattcataaacttcccaatatacgtatggtccagtaaaaccgaaacagttgaagaacctatggaagaagaagaagccgcgaaagaggaaaaagaagaatcagatgacgaagcagcagtagaagaagaagaagaagagaaaaaaccaaaaactaagaaagtagaaaaaacggtatgggattgggaactcatgaatgacataaaaccaatatggcaaagaccatctaaagaagttgaagaagatgaatacaaggcattttataaatcatttagcaaagaaagcgatgatccaatggcatatatacactttacagcagaaggagaagtaactttcaaatcaatattattcgtaccgacaagtgctccaagaggattattcgacgaatatggatcaaaaaaaagtgactatattaaactatacgtaaggagagtattcataaccgatgattttcacgatatgatgcctaaatacctcaacttcgtaaaaggagttgtggactcggacgacttaccactaaacgttagccgagaaacactccaacaacacaagttgttaaaggtaatacgcaaaaaacttgtaagaaaaacactagatatgataaaaaagatcgcagatgacaaatacaacgatacattctggaaagaattcggtacaaatattaaactcggagtgattgaagatcacagtaatagaacgagattagcaaaactacttagattccagtcaagtcatcacccaacagacatcacgtcactagaccaatatgtcgaaagaatgaaagaaaaacaagataagatatattttatggcaggatcatcaagaaaagaagcagaaagtagcccttttgtagaaagattattgaaaaaaggatacgaagtaatatatttaaccgaacctgttgacgaatattgtattcaagcactccccgaatttgacggaaaaagattccaaaatgtcgccaaagaaggagttaaattcgatgaatcagaaaaaacaaaagagtcaagagaagcagtagaaaaagaattcgaaccactactaaactggatgaaagacaaagcattaaaagataaaatagaaaaagcagtagtaagccaaagattaacggaatcgccatgcgcactagtagcatcacaatacggatggagtggcaatatggaacgaataatgaaagcacaggcctaccaaacagggaaagacataagcacaaattattacgcaagtcaaaaaaaaacattcgaaatcaatcctaggcacccattaattcgagacatgctaagaaggataaaagaagatgaagacgataaaacggtactagatctagcagtagttcttttcgaaacagcaaccctacgatcaggttatttactccccgatacgaaagcttacggcgacagaatcgaaagaatgctaagactaagtctcaatatcgacccagatgcaaaagttgaagaagaacccgaagaagaacctgaagaaacagcagaagatacaacagaagacacagaacaagatgaagatgaagagatggatgtaggaacagacgaagaagaggaaactgcaaaagaatcaacagcagaaaaagacgaactataa

SEQ ID NO: 7625 - protein, 646 aa, synthetic construct
  REGION 1..646: note = HSC70__Homo_sapiens__P11142
MSKGPAVGIDLGTTYSCVGVFQHGKVEIIANDQGNRTTPSYVAFTDTERLIGDAAKNQVAMNPTNTVFDAKRLIGRRFDDAVVQSDMKHWPFMVVNDAGRPKVQVEYKGETKSFYPEEVSSMVLTKMKEIAEAYLGKTVTNAVVTVPAYFNDSQRQATKDAGTIAGLNVLRIINEPTAAAIAYGLDKKVGAERNVLIFDLGGGTFDVSILTIEDGIFEVKSTAGDTHLGGEDFDNRMVNHFIAEFKRKHKKDISENKRAVRRLRTACERAKRTLSSSTQASIEIDSLYEGIDFYTSITRARFEELNADLFRGTLDPVEKALRDAKLDKSQIHDIVLVGGSTRIPKIQKLLQDFFNGKELNKSINPDEAVAYGAAVQAAILSGDKSENVQDLLLLDVTPLSLGIETAGGVMTVLIKRNTTIPTKQTQTFTTYSDNQPGVLIQVYEGERAMTKDNNLLGKFELTGIPPAPRGVPQIEVTFDIDANGILNVSAVDKSTGKENKITITNDKGRLSKEDIERMVQEAEKYKAEDEKQRDKVSSKNSLESYAFNMKATVEDEKLQGKINDEDKQKILDKCNEIINWLDKNQTAEKEEFEHQQKELEKVCNPIITKLYQSAGGMPGGMPGGFPGGGAPPSGGASSGPTIEEVD

SEQ ID NO: 7626 - RNA, 1941 nt, synthetic construct
  misc_feature 1..1941: note = HSC70__Homo_sapiens__AAH16179
  source 1..1941: mol_type = other RNA
atgtccaagggacctgcagttggtattgatcttggcaccacctactcttgtgtgggtgttttccagcacggaaaagtcgagataattgccaatgatcagggaaaccgaaccactccaagctatgtcgcctttacggacactgaacggttgatcggtgatgccgcaaagaatcaagttgcaatgaaccccaccaacacagtttttgatgccaaacgtctgattggacgcagatttgatgatgctgttgtccagtctgatatgaaacattggccctttatggtggtgaatgatgctggcaggcccaaggtccaagtagaatacaagggagagaccaaaagcttctatccagaggaggtgtcttctatggttctgacaaagatgaaggaaattgcagaagcctaccttgggaagactgttaccaatgctgtggtcacagtgccagcttactttaatgactctcagcgtcaggctaccaaagatgctggaactattgctggtctcaatgtacttagaattattaatgagccaactgctgctgctattgcttacggcttagacaaaaaggttggagcagaaagaaacgtgctcatctttgacctgggaggtggcacttttgatgtgtcaatcctcactattgaggatggaatctttgaggtcaagtctacagctggagacacccacttgggtggagaagattttgacaaccgaatggtcaaccattttattgctgagtttaagcgcaagcataagaaggacatcagtgagaacaagagagctgtaagacgcctccgtactgcttgtgaacgtgctaagcgtaccctctcttccagcacccaggccagtattgagatcgattctctctatgaaggaatcgacttctatacctccattacccgtgcccgatttgaagaactgaatgctgacctgttccgtggcaccctggacccagtagagaaagcccttcgagatgccaaactagacaagtcacagattcatgatattgtcctggttggtggttctactcgtatccccaagattcagaagcttctccaagacttcttcaatggaaaagaactgaataagagcatcaaccctgatgaagctgttgcttatggtgcagctgtccaggcagccatcttgtctggagacaagtctgagaatgttcaagatttgctgctcttggatgtcactcctctttcccttggtattgaaactgctggtggagtcatgactgtcctcatcaagcgtaataccaccattcctaccaagcagacacagaccttcactacctattctgacaaccagcctggtgtgcttattcaggtttatgaaggcgagcgtgccatgacaaaggataacaacctgcttggcaagtttgaactcacaggcatacctcctgcaccccgaggtgttcctcagattgaagtcacttttgacattgatgccaatggtatactcaatgtctctgctgtggacaagagtacgggaaaagagaacaagattactatcactaatgacaagggccgtttgagcaaggaagacattgaacgtatggtccaggaagctgagaagtacaaagctgaagatgagaagcagagggacaaggtgtcatccaagaattcacttgagtcctatgccttcaacatgaaagcaactgttgaagatgagaaacttcaaggcaagattaacgatgaggacaaacagaagattctggacaagtgtaatgaaattatcaactggcttgataagaatcagactgccgagaaggaagaatttgaacatcaacagaaagagctggagaaagtttgcaaccccatcatcaccaagctgtaccagagtgcaggaggcatgccaggaggaatgcctgggggatttcctggtggtggagctcctccctctggtggtgcttcctcagggcccaccattgaagaggttgattaa

SEQ ID NO: 7627 - RNA, 1941 nt, synthetic construct
  misc_feature 1..1941: note = derived and/or modified sequence opt1 fromHSC70__Homo_sapiens__AAH16179
  source 1..1941: mol_type = other RNA
atgagcaagggccccgccgtggggatcgacctgggcaccacctactcctgcgtcggggtgttccagcacggcaaggtggagatcatcgccaacgaccaggggaaccgcacgacccccagctacgtcgcgttcaccgacaccgagcggctcatcggcgacgccgccaagaaccaggtggccatgaaccccacgaacaccgtgttcgacgccaagcgcctgatcggccggcgcttcgacgacgcggtcgtgcagtccgacatgaagcactggcccttcatggtggtcaacgacgccgggcggcccaaggtccaggtggagtacaagggcgagaccaagagcttctacccggaggaggtgtccagcatggtgctgaccaagatgaaggagatcgccgaggcctacctcgggaagacggtgaccaacgcggtcgtgaccgtgcccgcctacttcaacgactcccagcgccaggccaccaaggacgccggcacgatcgccgggctgaacgtcctgcggatcatcaacgagcccaccgcggccgccatcgcctacggcctcgacaagaaggtgggcgccgagcgcaacgtgctgatcttcgacctcgggggcgggaccttcgacgtcagcatcctgaccatcgaggacggcatcttcgaggtgaagtccacggcgggcgacacccacctcgggggcgaggacttcgacaaccggatggtgaaccacttcatcgccgagttcaagcgcaagcacaagaaggacatcagcgagaacaagcgggccgtccgccggctgcgcaccgcctgcgagcgggccaagcgcaccctgtccagctccacgcaggcgagcatcgagatcgactccctgtacgaggggatcgacttctacaccagcatcacccgggcccgcttcgaggagctgaacgccgacctcttccggggcaccctggaccccgtggagaaggccctgcgcgacgccaagctcgacaagtcccagatccacgacatcgtcctggtcgggggcagcacgcggatcccgaagatccagaagctgctccaggacttcttcaacggcaaggagctgaacaagtccatcaaccccgacgaggcggtggcctacggggccgccgtgcaggcggccatcctgagcggcgacaagagcgagaacgtgcaggacctcctgctgctcgacgtgacgcccctgtccctggggatcgagaccgccggcggggtcatgaccgtgctcatcaagcgcaacaccaccatccccaccaagcagacccagacgttcaccacctacagcgacaaccagccgggcgtgctgatccaggtctacgagggcgagcgcgccatgaccaaggacaacaacctgctcgggaagttcgagctgacgggcatcccgcccgcgccccgcggggtgccccagatcgaggtgaccttcgacatcgacgccaacggcatcctgaacgtctccgccgtggacaagagcaccgggaaggagaacaagatcaccatcaccaacgacaagggccggctctccaaggaggacatcgagcggatggtgcaggaggccgagaagtacaaggccgaggacgagaagcagcgcgacaaggtcagctccaagaacagcctggagtcctacgccttcaacatgaaggcgacggtggaggacgagaagctgcagggcaagatcaacgacgaggacaagcagaagatcctcgacaagtgcaacgagatcatcaactggctggacaagaaccagaccgccgagaaggaggagttcgagcaccagcagaaggagctggagaaggtgtgcaaccccatcatcaccaagctctaccagagcgccgggggcatgcccgggggcatgcccggcgggttcccgggcgggggcgccccgccctccgggggcgccagctccggccccaccatcgaggaggtcgactga

SEQ ID NO: 7628 - RNA, 1941 nt, synthetic construct
  misc_feature 1..1941: note = derived and/or modified sequence opt2 fromHSC70__Homo_sapiens__AAH16179
  source 1..1941: mol_type = other RNA
atgtccaagggccccgccgtcggcatcgacctcggcaccacctactcctgcgtcggcgtcttccagcacggcaaggtcgagatcatcgccaacgaccagggcaaccgcaccaccccctcctacgtcgccttcaccgacaccgagcgcctcatcggcgacgccgccaagaaccaggtcgccatgaaccccaccaacaccgtcttcgacgccaagcgcctcatcggccgccgcttcgacgacgccgtcgtccagtccgacatgaagcactggcccttcatggtcgtcaacgacgccggccgccccaaggtccaggtcgagtacaagggcgagaccaagtccttctaccccgaggaggtctcctccatggtcctcaccaagatgaaggagatcgccgaggcctacctcggcaagaccgtcaccaacgccgtcgtcaccgtccccgcctacttcaacgactcccagcgccaggccaccaaggacgccggcaccatcgccggcctcaacgtcctccgcatcatcaacgagcccaccgccgccgccatcgcctacggcctcgacaagaaggtcggcgccgagcgcaacgtcctcatcttcgacctcggcggcggcaccttcgacgtctccatcctcaccatcgaggacggcatcttcgaggtcaagtccaccgccggcgacacccacctcggcggcgaggacttcgacaaccgcatggtcaaccacttcatcgccgagttcaagcgcaagcacaagaaggacatctccgagaacaagcgcgccgtccgccgcctccgcaccgcctgcgagcgcgccaagcgcaccctctcctcctccacccaggcctccatcgagatcgactccctctacgagggcatcgacttctacacctccatcacccgcgcccgcttcgaggagctcaacgccgacctcttccgcggcaccctcgaccccgtcgagaaggccctccgcgacgccaagctcgacaagtcccagatccacgacatcgtcctcgtcggcggctccacccgcatccccaagatccagaagctcctccaggacttcttcaacggcaaggagctcaacaagtccatcaaccccgacgaggccgtcgcctacggcgccgccgtccaggccgccatcctctccggcgacaagtccgagaacgtccaggacctcctcctcctcgacgtcacccccctctccctcggcatcgagaccgccggcggcgtcatgaccgtcctcatcaagcgcaacaccaccatccccaccaagcagacccagaccttcaccacctactccgacaaccagcccggcgtcctcatccaggtctacgagggcgagcgcgccatgaccaaggacaacaacctcctcggcaagttcgagctcaccggcatcccccccgccccccgcggcgtcccccagatcgaggtcaccttcgacatcgacgccaacggcatcctcaacgtctccgccgtcgacaagtccaccggcaaggagaacaagatcaccatcaccaacgacaagggccgcctctccaaggaggacatcgagcgcatggtccaggaggccgagaagtacaaggccgaggacgagaagcagcgcgacaaggtctcctccaagaactccctcgagtcctacgccttcaacatgaaggccaccgtcgaggacgagaagctccagggcaagatcaacgacgaggacaagcagaagatcctcgacaagtgcaacgagatcatcaactggctcgacaagaaccagaccgccgagaaggaggagttcgagcaccagcagaaggagctcgagaaggtctgcaaccccatcatcaccaagctctaccagtccgccggcggcatgcccggcggcatgcccggcggcttccccggcggcggcgcccccccctccggcggcgcctcctccggccccaccatcgaggaggtcgactga

SEQ ID NO: 7629 - RNA, 1941 nt, synthetic construct
  misc_feature 1..1941: note = derived and/or modified sequence opt3 fromHSC70__Homo_sapiens__AAH16179
  source 1..1941: mol_type = other RNA
atgagcaagggccccgccgtggggatcgacctgggaaccacatactcctgcgtcggtgttttccagcacggcaaagtggagattatagctaacgatcaagggaatagaactacgccttcttatgtagcatttaccgacacagaaaggctcatcggagatgccgcgaagaaccaggtggctatgaatccaactaacaccgtcttcgacgccaaacggcttattggccgccgatttgatgacgcagtggttcagtcagatatgaagcattggccgttcatggtggtcaatgacgccggtcgtcccaaagtgcaggtagagtacaagggggaaacaaagagtttttatcctgaggaagttagctccatggtgctgaccaaaatgaaggagatcgctgaggcatacttgggaaaaactgtcacaaacgccgtggtgaccgtcccagcttatttcaatgattctcaaagacaggccacgaaggacgcgggcactattgcaggcttaaacgttctgaggatcataaatgaacccaccgccgctgccatcgcatacgggctagataaaaaggtgggagctgagcggaacgtactcatttttgacctgggtggcgggacattcgatgtgtcgatccttactattgaagacggaatctttgaggtcaagtcaaccgccggcgacacacacctgggtggggaggatttcgacaatcgcatggtgaaccattttatagcggaatttaaaagaaagcacaaaaaggatattagcgagaataaaagggccgttcggcgcttgcgaaccgcatgtgaaagagctaagaggacgctcagttcctctactcaggccagcatcgagattgactccctgtatgaaggaatcgatttttacacatcaatcacccgggctcgtttcgaggagctgaacgccgacctcttccgcggcactttagatcctgtggaaaaagcactgagagacgccaaacttgataagagtcagattcatgacatagtcttggtgggcgggagcacaaggatcccaaagattcaaaagctgctacaggatttcttcaatggaaaagagctcaacaagtctatcaaccccgacgaagctgtagcgtacggtgcagccgttcaggctgccatactgtccggcgacaaatcagagaatgtgcaggatcttctgttgctcgacgtcacccctctgagcttagggattgaaacggcaggaggcgtgatgaccgtcctgatcaagcggaacacaactatcccaaccaagcaaacacagacttttaccacatatagtgataatcagccgggtgtgctcattcaagtttacgagggggagcgagccatgaccaaagacaacaatcttctgggcaagttcgaattgactggaatccctcccgctccacgcggcgtgccccagattgaggtaacgtttgatatagacgccaacgggatcctaaatgtctctgcagtggataaatccacaggaaaggaaaacaaaattaccatcactaatgacaagggtagactgagcaaggaggatatcgaaaggatggttcaggaggcggagaaatataaggctgaagacgagaaacagcgggataaggtgtcgtctaaaaactccctcgaatcatacgccttcaatatgaaggcaaccgtcgaggacgagaagctgcaaggcaaaattaacgatgaagacaagcagaaaatacttgacaagtgcaatgagatcattaactggctggataaaaatcagacagccgaaaaggaggaatttgagcaccagcaaaaagagttggaaaaggtgtgtaaccctatcattaccaagctctatcagagtgctgggggaatgccaggcggtatgcccgggggcttcccgggaggcggggcccctcccagcggaggtgcatcctctggcccaactatcgaggaagtagactga

SEQ ID NO: 7630 - RNA, 1941 nt, synthetic construct
  misc_feature 1..1941: note = derived and/or modified sequence opt4 fromHSC70__Homo_sapiens__AAH16179
  source 1..1941: mol_type = other RNA
atgagcaagggccccgccgtgggcatcgacctgggcaccacctacagctgcgtgggcgtgttccagcacggcaaggtggagatcatcgccaacgaccagggcaacagaaccacccccagctacgtggccttcaccgacaccgagagactgatcggcgacgccgccaagaaccaggtggccatgaaccccaccaacaccgtgttcgacgccaagagactgatcggcagaagattcgacgacgccgtggtgcagagcgacatgaagcactggcccttcatggtggtgaacgacgccggcagacccaaggtgcaggtggagtacaagggcgagaccaagagcttctaccccgaggaggtgagcagcatggtgctgaccaagatgaaggagatcgccgaggcctacctgggcaagaccgtgaccaacgccgtggtgaccgtgcccgcctacttcaacgacagccagagacaggccaccaaggacgccggcaccatcgccggcctgaacgtgctgagaatcatcaacgagcccaccgccgccgccatcgcctacggcctggacaagaaggtgggcgccgagagaaacgtgctgatcttcgacctgggcggcggcaccttcgacgtgagcatcctgaccatcgaggacggcatcttcgaggtgaagagcaccgccggcgacacccacctgggcggcgaggacttcgacaacagaatggtgaaccacttcatcgccgagttcaagagaaagcacaagaaggacatcagcgagaacaagagagccgtgagaagactgagaaccgcctgcgagagagccaagagaaccctgagcagcagcacccaggccagcatcgagatcgacagcctgtacgagggcatcgacttctacaccagcatcaccagagccagattcgaggagctgaacgccgacctgttcagaggcaccctggaccccgtggagaaggccctgagagacgccaagctggacaagagccagatccacgacatcgtgctggtgggcggcagcaccagaatccccaagatccagaagctgctgcaggacttcttcaacggcaaggagctgaacaagagcatcaaccccgacgaggccgtggcctacggcgccgccgtgcaggccgccatcctgagcggcgacaagagcgagaacgtgcaggacctgctgctgctggacgtgacccccctgagcctgggcatcgagaccgccggcggcgtgatgaccgtgctgatcaagagaaacaccaccatccccaccaagcagacccagaccttcaccacctacagcgacaaccagcccggcgtgctgatccaggtgtacgagggcgagagagccatgaccaaggacaacaacctgctgggcaagttcgagctgaccggcatcccccccgcccccagaggcgtgccccagatcgaggtgaccttcgacatcgacgccaacggcatcctgaacgtgagcgccgtggacaagagcaccggcaaggagaacaagatcaccatcaccaacgacaagggcagactgagcaaggaggacatcgagagaatggtgcaggaggccgagaagtacaaggccgaggacgagaagcagagagacaaggtgagcagcaagaacagcctggagagctacgccttcaacatgaaggccaccgtggaggacgagaagctgcagggcaagatcaacgacgaggacaagcagaagatcctggacaagtgcaacgagatcatcaactggctggacaagaaccagaccgccgagaaggaggagttcgagcaccagcagaaggagctggagaaggtgtgcaaccccatcatcaccaagctgtaccagagcgccggcggcatgcccggcggcatgcccggcggcttccccggcggcggcgccccccccagcggcggcgccagcagcggccccaccatcgaggaggtggactga

SEQ ID NO: 7631 - RNA, 1941 nt, synthetic construct
  misc_feature 1..1941: note = derived and/or modified sequence opt5 fromHSC70__Homo_sapiens__AAH16179
  source 1..1941: mol_type = other RNA
atgagcaagggccccgccgtggggatcgacctgggaaccacatactcctgcgtcggcgttttccagcacgggaaagtggagattatcgctaacgatcaaggaaatagaacgaccccttcttatgtggcctttacagacaccgaacggctcattggcgatgcggctaagaaccaggtcgccatgaatccgacaaacaccgtgttcgacgccaaacgcctgatcgggagacggtttgatgacgctgttgtgcagagcgatatgaagcattggcccttcatggtcgtgaatgacgccggacgccctaaagttcaggtggagtacaagggcgaaacaaagtccttttatcccgaggaagtctctagcatggtgcttaccaaaatgaaggagattgctgaggcctacctgggcaaaacggtgaccaacgcggtcgttacagtgcctgcctatttcaatgattcccaaagacaggctaccaaggacgccgggacaatcgctggactcaacgtgctgcggatcattaatgaacccaccgccgcggccatcgcttacggccttgataaaaaggtcggggccgagcgcaacgtgctgatttttgacctcggaggcgggacgttcgatgtttctatcctgacaattgaagacggaatctttgaggtgaagtctaccgctggcgacacacacctgggcggggaggatttcgacaatagaatggtcaaccattttattgccgaatttaaacggaagcacaaaaaggatatctccgagaataaacgcgccgtgagacggctccgcaccgcttgtgaaagagcgaagcggaccctgagcagctccacacaggccagcatcgagattgactctctttatgaaggaatcgatttttacacgtccattacccgcgctagattcgaggagctgaacgccgacctcttccggggcacactggatcctgttgaaaaagcccttagagacgctaagctggataagagccagatccatgacattgtgctcgtcgggggatctacccgcatcccgaaaatccaaaagctgctgcaggatttcttcaatggcaaagagctcaacaagtccattaaccccgacgaagccgtggcgtacggggctgccgtccaggccgctatcctgagcggagacaaatccgagaatgtgcaggatcttctgctcctggacgttacacctctttctctgggcattgaaaccgccggcggggtgatgacggtcctcatcaagcggaacacaaccattcccaccaagcaaacacagacctttacaacgtatagcgataatcagcctggagtgctgatccaagtttacgagggcgagagagctatgaccaaagacaacaatctgctcgggaagttcgaactgacaggaatcccgcccgcccctcgcggcgtgccccagattgaggtcacctttgatatcgacgcgaacgggattcttaatgtgtccgccgtggataaaagcacaggcaaggaaaacaaaatcaccattacgaatgacaagggacggctgtctaaggaggatatcgaaagaatggttcaggaggctgagaaatataaggccgaagacgagaaacagcgcgataaggtctccagcaaaaactctctcgaaagctacgctttcaatatgaaggccaccgtggaggacgagaagctgcaaggcaaaattaacgatgaagacaagcagaaaatccttgacaagtgcaatgagatcattaactggctggataaaaatcagacagcggaaaaggaggaatttgagcaccagcaaaaagagctcgaaaaggtgtgtaaccctatcattaccaagctgtatcagtccgccgggggaatgcccggcgggatgcccggaggcttccctgggggcggagctccgccctctggcggggccagctccggacctacaatcgaggaagtcgactga

SEQ ID NO: 7632 - RNA, 1941 nt, synthetic construct
  misc_feature 1..1941: note = derived and/or modified sequence opt6 fromHSC70__Homo_sapiens__AAH16179
  source 1..1941: mol_type = other RNA
atgtctaagggtcccgcagttgggattgatttaggaactacttattcatgcgtaggagtattccaacacggaaaagtagaaattatagcaaacgaccaaggaaatcgaacaacaccaagttatgtcgcctttactgatactgaaagactcataggagacgctgcaaaaaaccaagttgcaatgaacccaactaatacagtattcgatgcaaaaagactaataggtagaagattcgacgacgctgtagtacaaagtgatatgaaacactggccatttatggtagtgaatgacgccggtagaccaaaagtacaagtagaatataaaggtgaaaccaaaagtttttacccagaagaagtaagctcaatggtattaaccaaaatgaaagagatagcagaagcgtatttaggaaaaacagtaactaacgcagtagtcaccgtaccagcatactttaatgattctcaaagacaagcaacaaaagatgcaggaacaatcgccggattaaatgtactaagaatcataaatgaacctacagcagcagcaatagcatacggattagataaaaaagtaggcgcagaaagaaatgtactaatatttgacctcggaggaggaacatttgacgtttcaattttaaccatagaagacggaattttcgaagtaaaatcaacagcaggagacactcatctaggtggcgaagattttgacaatcgaatggtaaaccatttcattgcagaatttaaaagaaaacataaaaaggatatatcagaaaacaaaagagcagtcagaaggttaagaacagcatgtgaaagagcaaaaagaacattatcttcaagtacgcaagcaagtatagaaatcgacagtttatatgaaggaattgatttttacacatcaatcacacgagctaggtttgaagaactaaatgcagacctcttcagaggaacattggatccagtagagaaagctctacgagatgctaaactagacaaatcacaaatacatgacatagtgctggtaggcggatcaacaagaatcccgaaaatacaaaaattactacaagatttctttaatggaaaagaacttaacaaatcaataaatccagacgaagctgtagcatacggtgcagcagtgcaagcagcaattttatccggagacaaatcagaaaacgtgcaagatttattactactagacgttacaccactaagtctaggtatagaaacagcgggaggagtaatgacagtattaataaaacgaaataccacaatacccactaaacaaacgcaaacatttacaacatattcagacaatcaacctggcgtgctgatccaagtatacgaaggagaaagagcaatgacaaaagataacaaccttttaggcaaatttgaactaacaggtataccacctgcaccaaggggagtaccacaaatcgaagttacattcgacatagacgcaaacggaatattaaatgtaagtgcagtagacaaatcaacaggtaaagaaaacaagataactataacaaacgataaaggaagactatctaaagaagacatagaacgaatggtacaagaagcagaaaaatacaaagccgaggacgaaaaacaaagagataaagtaagtagcaaaaatagtttagaatcatacgcattcaatatgaaagcaactgtggaggacgaaaaattgcaaggaaaaataaatgatgaagacaaacaaaagatattagataaatgtaatgaaataataaactggctagataaaaatcaaacagcagaaaaagaagaatttgaacatcaacaaaaagaattggaaaaagtatgcaatccaataataacaaaactatatcaaagcgcagggggcatgcccggcggaatgcccggaggctttccaggaggaggagctccaccatcaggtggcgcttcaagtggtcccacaatagaagaagtagattaa

SEQ ID NO: 7633 - protein, 858 aa, synthetic construct
  REGION 1..858: note = HSP110__Homo_sapiens__Q92598
MSVVGLDVGSQSCYIAVARAGGIETIANEFSDRCTPSVISFGSKNRTIGVAAKNQQITHANNTVSNFKRFHGRAFNDPFIQKEKENLSYDLVPLKNGGVGIKVMYMGEEHLFSVEQITAMLLTKLKETAENSLKKPVTDCVISVPSFFTDAERRSVLDAAQIVGLNCLRLMNDMTAVALNYGIYKQDLPSLDEKPRIVVFVDMGHSAFQVSACAFNKGKLKVLGTAFDPFLGGKNFDEKLVEHFCAEFKTKYKLDAKSKIRALLRLYQECEKLKKLMSSNSTDLPLNIECFMNDKDVSGKMNRSQFEELCAELLQKIEVPLYSLLEQTHLKVEDVSAVEIVGGATRIPAVKERIAKFFGKDISTTLNADEAVARGCALQCAILSPAFKVREFSVTDAVPFPISLIWNHDSEDTEGVHEVFSRNHAAPFSKVLTFLRRGPFELEAFYSDPQGVPYPEAKIGRFVVQNVSAQKDGEKSRVKVKVRVNTHGIFTISTASMVEKVPTEENEMSSEADMECLNQRPPENPDTDKNVQQDNSEAGTQPQVQTDAQQTSQSPPSPELTSEENKIPDADKANEKKVDQPPEAKKPKIKVVNVELPIEANLVWQLGKDLLNMYIETEGKMIMQDKLEKERNDAKNAVEEYVYEFRDKLCGPYEKFICEQDHQNFLRLLTETEDWLYEEGEDQAKQAYVDKLEELMKIGTPVKVRFQEAEERPKMFEELGQRLQHYAKIAADFRNKDEKYNHIDESEMKKVEKSVNEVMEWMNNVMNAQAKKSLDQDPVVRAQEIKTKIKELNNTCEPVVTQPKPKIESPKLERTPNGPNIDKKEEDLEDKNNFGAEPPHQNGECYPNEKNSVNMDLD

SEQ ID NO: 7634 - RNA, 2577 nt, synthetic construct
  misc_feature 1..2577: note = HSP110__Homo_sapiens__AAH37553
  source 1..2577: mol_type = other RNA
atgtcggtggtggggttggacgtgggctcgcagagctgctacatcgcggtagcccgggccgggggcatcgagaccatcgccaatgagttcagcgaccggtgcaccccgtcagtcatatcatttggatcaaaaaatagaacaatcggagttgcagccaaaaatcagcaaatcactcatgcaaacaatacggtgtctaacttcaaaagatttcatggccgagcattcaatgaccccttcattcaaaaggagaaggaaaacttgagttacgatttggttccattgaaaaatggtggagttggaataaaggtaatgtacatgggtgaagaacatctatttagtgtggagcagataacagccatgttgttgactaagctgaaggaaactgctgaaaacagcctcaagaaaccagtaacagattgtgttatttcagtcccctccttctttacagatgctgagaggcgatctgtgttagatgctgcacagattgttggcctaaactgtttaagacttatgaatgacatgacagctgttgctttgaattacggaatttataagcaggatctcccaagcctggatgagaaacctcggatagtggtttttgttgatatgggacattcagcttttcaagtgtctgcttgtgcttttaacaagggaaaattgaaggtactgggaacagcttttgatcctttcttaggaggaaaaaacttcgatgaaaagttagtggaacatttttgtgcagaatttaaaactaagtacaagttggatgcaaaatccaaaatacgagcactcctacgtctgtatcaggaatgtgaaaaactgaaaaagctaatgagctctaacagcacagaccttccactgaatatcgaatgctttatgaatgataaagatgtttccggaaagatgaacaggtcacaatttgaagaactctgtgctgaacttctgcaaaagatagaagtacccctttattcactgttggaacaaactcatctcaaagtagaagatgtgagtgcagttgagattgttggaggcgctacacgaattccagctgtgaaggaaagaattgccaaattctttggaaaagatattagcacaacactcaatgcagatgaagcagtagccagaggatgtgcattacagtgtgcaatactttccccggcatttaaagttagagaattttccgtcacagatgcagttccttttccaatatctctgatctggaaccatgattcagaagatactgaaggtgttcatgaagtctttagtcgaaaccatgctgctcctttctccaaagttctcacctttctgagaagggggccttttgagctagaagctttctattctgatccccaaggagttccatatccagaagcaaaaataggccgctttgtagttcagaatgtttctgcacagaaagatggagaaaaatctagagtaaaagtcaaagtgcgagtcaacacccatggcattttcaccatctctacggcatctatggtggagaaagtcccaactgaggagaatgaaatgtcttctgaagctgacatggagtgtctgaatcagagaccaccagaaaacccagacactgataaaaatgtccagcaagacaacagtgaagctggaacacagccccaggtacaaactgatgctcaacaaacctcacagtctcccccttcacctgaacttacctcagaagaaaacaaaatcccagatgctgacaaagcaaatgaaaaaaaagttgaccagcctccagaagctaaaaagcccaaaataaaggtggtgaatgttgagctgcctattgaagccaacttggtctggcagttagggaaagaccttcttaacatgtatattgagacagagggtaagatgataatgcaagataaattggaaaaagaaaggaatgatgctaaaaatgcagttgaggaatatgtgtatgagttcagagacaagctgtgtggaccatatgaaaaatttatatgtgagcaggatcatcaaaattttttgagactcctcacagaaactgaagactggctgtatgaagaaggagaggaccaagctaaacaagcatatgttgacaagttggaagaattaatgaaaattggcactccagttaaagttcggtttcaggaagctgaagaacggccaaaaatgtttgaagaactaggacagaggctgcagcattatgccaagatagcagctgacttcagaaataaggatgagaaatacaaccatattgatgagtctgaaatgaaaaaagtggagaagtctgttaatgaagtgatggaatggatgaataatgtcatgaatgctcaggctaaaaagagtcttgatcaggatccagttgtacgtgctcaggaaattaaaacaaaaatcaaggaattgaacaacacatgtgaacccgttgtaacacaaccgaaaccaaaaattgaatcacccaaactggaaagaactccaaatggcccaaatattgataaaaaggaagaagatttagaagacaaaaacaattttggtgctgaacctccacatcagaatggtgaatgttaccctaatgagaaaaattctgttaatatggacttggactag

SEQ ID NO: 7635 - RNA, 2577 nt, synthetic construct
  misc_feature 1..2577: note = derived and/or modified sequence opt1 fromHSP110__Homo_sapiens__AAH37553
  source 1..2577: mol_type = other RNA
atgagcgtggtcggcctggacgtggggtcccagagctgctacatcgccgtggcccgcgcgggcgggatcgagaccatcgccaacgagttctccgaccggtgcacccccagcgtcatctccttcggcagcaagaaccgcaccatcggggtggccgccaagaaccagcagatcacccacgccaacaacaccgtgtccaacttcaagcggttccacggccgcgcgttcaacgacccgttcatccagaaggagaaggagaacctcagctacgacctggtccccctgaagaacggcggggtgggcatcaaggtgatgtacatgggggaggagcacctcttctccgtcgagcagatcaccgccatgctgctgacgaagctcaaggagaccgccgagaacagcctgaagaagcccgtgaccgactgcgtgatctccgtccccagcttcttcaccgacgccgagcggcgctccgtgctggacgcggcccagatcgtgggcctcaactgcctgcggctgatgaacgacatgacggccgtcgccctcaactacgggatctacaagcaggacctgccgagcctggacgagaagccccgcatcgtggtgttcgtcgacatgggccactccgccttccaggtgagcgcgtgcgccttcaacaagggcaagctcaaggtgctggggaccgccttcgaccccttcctgggcgggaagaacttcgacgagaagctcgtcgagcacttctgcgccgagttcaagaccaagtacaagctggacgccaagtccaagatccgggcgctgctccgcctgtaccaggagtgcgagaagctgaagaagctcatgagctccaacagcaccgacctgcccctgaacatcgagtgcttcatgaacgacaaggacgtgagcggcaagatgaaccggtcccagttcgaggagctctgcgccgagctgctgcagaagatcgaggtgccgctctacagcctgctggagcagacgcacctcaaggtcgaggacgtgtccgccgtcgagatcgtgggcggggccacccgcatccccgccgtgaaggagcggatcgcgaagttcttcggcaaggacatcagcaccaccctgaacgccgacgaggccgtcgcccgcgggtgcgccctgcagtgcgcgatcctctcccccgccttcaaggtgcgggagttcagcgtgacggacgccgtccccttcccgatctccctgatctggaaccacgacagcgaggacaccgagggcgtgcacgaggtgttctcccgcaaccacgccgcgcccttcagcaaggtcctgaccttcctccggcgcgggcccttcgagctggaggccttctactccgacccccagggcgtgccgtaccccgaggccaagatcggccggttcgtggtccagaacgtgagcgcccagaaggacggggagaagtcccgcgtgaaggtcaaggtgcgggtgaacacccacggcatcttcacgatcagcaccgcctccatggtcgagaaggtgcccaccgaggagaacgagatgagctccgaggcggacatggagtgcctgaaccagcggcccccggagaaccccgacaccgacaagaacgtgcagcaggacaacagcgaggccgggacgcagccccaggtccagaccgacgcccagcagacctcccagagcccgcccagccccgagctcacctccgaggagaacaagatccccgacgccgacaaggccaacgagaagaaggtggaccagcccccggaggcgaagaagcccaagatcaaggtggtcaacgtggagctgcccatcgaggccaacctggtgtggcagctcggcaaggacctgctgaacatgtacatcgagacggaggggaagatgatcatgcaggacaagctcgagaaggagcgcaacgacgccaagaacgccgtcgaggagtacgtgtacgagttccgcgacaagctgtgcggcccgtacgagaagttcatctgcgagcaggaccaccagaacttcctgcgcctgctcaccgagaccgaggactggctgtacgaggagggcgaggaccaggccaagcaggcgtacgtggacaagctggaggagctcatgaagatcgggacccccgtcaaggtgcggttccaggaggccgaggagcgccccaagatgttcgaggagctgggccagcggctgcagcactacgccaagatcgccgcggacttccgcaacaaggacgagaagtacaaccacatcgacgagagcgagatgaagaaggtggagaagtccgtcaacgaggtgatggagtggatgaacaacgtgatgaacgcccaggccaagaagtccctcgaccaggaccccgtcgtgcgggcccaggagatcaagacgaagatcaaggagctgaacaacacgtgcgagccggtggtcacccagcccaagcccaagatcgagagccccaagctggagcgcaccccgaacgggcccaacatcgacaagaaggaggaggacctcgaggacaagaacaacttcggcgccgagccgccccaccagaacggggagtgctaccccaacgagaagaacagcgtgaacatggacctggactga

SEQ ID NO: 7636 - RNA, 2577 nt, synthetic construct
  misc_feature 1..2577: note = derived and/or modified sequence opt2 fromHSP110__Homo_sapiens__AAH37553
  source 1..2577: mol_type = other RNA
atgtccgtcgtcggcctcgacgtcggctcccagtcctgctacatcgccgtcgcccgcgccggcggcatcgagaccatcgccaacgagttctccgaccgctgcaccccctccgtcatctccttcggctccaagaaccgcaccatcggcgtcgccgccaagaaccagcagatcacccacgccaacaacaccgtctccaacttcaagcgcttccacggccgcgccttcaacgaccccttcatccagaaggagaaggagaacctctcctacgacctcgtccccctcaagaacggcggcgtcggcatcaaggtcatgtacatgggcgaggagcacctcttctccgtcgagcagatcaccgccatgctcctcaccaagctcaaggagaccgccgagaactccctcaagaagcccgtcaccgactgcgtcatctccgtcccctccttcttcaccgacgccgagcgccgctccgtcctcgacgccgcccagatcgtcggcctcaactgcctccgcctcatgaacgacatgaccgccgtcgccctcaactacggcatctacaagcaggacctcccctccctcgacgagaagccccgcatcgtcgtcttcgtcgacatgggccactccgccttccaggtctccgcctgcgccttcaacaagggcaagctcaaggtcctcggcaccgccttcgaccccttcctcggcggcaagaacttcgacgagaagctcgtcgagcacttctgcgccgagttcaagaccaagtacaagctcgacgccaagtccaagatccgcgccctcctccgcctctaccaggagtgcgagaagctcaagaagctcatgtcctccaactccaccgacctccccctcaacatcgagtgcttcatgaacgacaaggacgtctccggcaagatgaaccgctcccagttcgaggagctctgcgccgagctcctccagaagatcgaggtccccctctactccctcctcgagcagacccacctcaaggtcgaggacgtctccgccgtcgagatcgtcggcggcgccacccgcatccccgccgtcaaggagcgcatcgccaagttcttcggcaaggacatctccaccaccctcaacgccgacgaggccgtcgcccgcggctgcgccctccagtgcgccatcctctcccccgccttcaaggtccgcgagttctccgtcaccgacgccgtccccttccccatctccctcatctggaaccacgactccgaggacaccgagggcgtccacgaggtcttctcccgcaaccacgccgcccccttctccaaggtcctcaccttcctccgccgcggccccttcgagctcgaggccttctactccgacccccagggcgtcccctaccccgaggccaagatcggccgcttcgtcgtccagaacgtctccgcccagaaggacggcgagaagtcccgcgtcaaggtcaaggtccgcgtcaacacccacggcatcttcaccatctccaccgcctccatggtcgagaaggtccccaccgaggagaacgagatgtcctccgaggccgacatggagtgcctcaaccagcgcccccccgagaaccccgacaccgacaagaacgtccagcaggacaactccgaggccggcacccagccccaggtccagaccgacgcccagcagacctcccagtcccccccctcccccgagctcacctccgaggagaacaagatccccgacgccgacaaggccaacgagaagaaggtcgaccagccccccgaggccaagaagcccaagatcaaggtcgtcaacgtcgagctccccatcgaggccaacctcgtctggcagctcggcaaggacctcctcaacatgtacatcgagaccgagggcaagatgatcatgcaggacaagctcgagaaggagcgcaacgacgccaagaacgccgtcgaggagtacgtctacgagttccgcgacaagctctgcggcccctacgagaagttcatctgcgagcaggaccaccagaacttcctccgcctcctcaccgagaccgaggactggctctacgaggagggcgaggaccaggccaagcaggcctacgtcgacaagctcgaggagctcatgaagatcggcacccccgtcaaggtccgcttccaggaggccgaggagcgccccaagatgttcgaggagctcggccagcgcctccagcactacgccaagatcgccgccgacttccgcaacaaggacgagaagtacaaccacatcgacgagtccgagatgaagaaggtcgagaagtccgtcaacgaggtcatggagtggatgaacaacgtcatgaacgcccaggccaagaagtccctcgaccaggaccccgtcgtccgcgcccaggagatcaagaccaagatcaaggagctcaacaacacctgcgagcccgtcgtcacccagcccaagcccaagatcgagtcccccaagctcgagcgcacccccaacggccccaacatcgacaagaaggaggaggacctcgaggacaagaacaacttcggcgccgagcccccccaccagaacggcgagtgctaccccaacgagaagaactccgtcaacatggacctcgactga

SEQ ID NO: 7637 - RNA, 2577 nt, synthetic construct
  misc_feature 1..2577: note = derived and/or modified sequence opt3 fromHSP110__Homo_sapiens__AAH37553
  source 1..2577: mol_type = other RNA
atgagcgtggtcggcctggacgttgggtcccagtcttgctacatcgccgtggctagagcaggaggtattgagaccatagccaacgagttctcagataggtgtacacccagtgtaatcagctttggctccaagaatcggactattggggtggcggctaaaaaccaacagatcacgcacgccaataacaccgtctctaatttcaagcgctttcatggacgagcattcaacgacccttttattcagaaagagaaggaaaatctctcgtatgatcttgtgccactgaaaaacggcggtgttgggatcaaggtgatgtacatgggagaggaacacttgttctcagtcgagcagataacagccatgttactgactaagctaaaagagaccgctgaaaatagcctcaagaaaccggtgacagactgcgtaatcagtgttccctcctttttcaccgatgcagagcgtagatctgtgctggacgccgctcaaattgtcggccttaactgtctgaggttgatgaatgatatgactgccgtggcgctcaactatggcatctacaagcaggacctgcctagcctggatgaaaaaccacggattgtggtctttgttgacatggggcattccgcattccaggtgtcagcctgcgcttttaataagggaaagctcaaagtattaggtacagccttcgatccctttctgggcgggaagaacttcgacgagaaacttgtggagcacttctgtgcagaatttaagaccaaatataagttggatgctaaaagtaagatccgcgccctgctaagactctaccaggagtgcgaaaagctgaaaaagctgatgagctctaattccacggaccttcctttgaacatagagtgtttcatgaacgacaaagatgtctcaggaaagatgaataggagccaatttgaagaactctgcgcggagctgttacagaaaattgaagtgccactgtatagtctccttgagcagactcatctgaaggttgaagacgtgtctgccgtcgagatcgtgggcggtgcaacccggattcccgctgtaaaggaacgcatcgccaaattctttgggaaggatatctccacaactttgaacgctgacgaggccgttgcacgaggatgtgccctacagtgcgctattctgagccctgcgttcaaagtgagagagttttcggtcaccgatgcagtgccattcccgatatctctcatctggaatcacgactccgaagatacagagggcgtccacgaagtgttttcaaggaaccatgccgctcccttcagtaaggttctgacctttcttcggcgtggccctttcgagctggaagccttttacagcgacccacaaggggtgccctaccctgaggcaaaaattggacgcttcgtagtccagaatgtgtccgcccagaaggatggtgagaagtctagagttaaagtgaaggtcagggtgaacacgcacggcatcttcactataagcacagcttcaatggtagaaaaagtgccaaccgaggaaaatgagatgagttccgaggccgacatggaatgtttgaaccaacggcccccggagaatcctgatactgacaagaacgttcagcaggacaatagcgaagcagggacacagccccaagtccagaccgatgcgcagcagacgtctcaatcaccacctagtcccgagctcaccagcgaagagaacaaaattccagacgctgataaggccaatgagaagaaagtggaccagccccctgaagcaaagaaaccaaagatcaaagtggtcaacgttgagctgccgatcgaagccaatttagtgtggcagctgggaaaggatctactcaacatgtatattgagacagaaggcaaaatgatcatgcaggacaagctggagaaggagcgaaacgatgctaaaaatgccgtggaagagtacgtatatgaatttcgcgacaaactttgcggtccctacgagaaattcatttgcgaacaagatcatcagaactttttgagactgctcactgagaccgaggactggctgtatgaagagggggaagatcaggcaaagcaggcttacgtcgacaaacttgaggagctgatgaagataggcacacctgtgaaggttaggttccaagaagccgaggaacggccaaaaatgtttgaggaattgggacagcgcctccagcactatgcgaagatcgccgctgatttcagaaataaagacgagaagtacaaccacattgacgagtccgaaatgaaaaaggtggagaagtctgtcaatgaagtgatggagtggatgaacaatgttatgaacgcacaagccaaaaagtcgctggatcaggaccccgtggtaagggctcaggaaatcaaaactaagatcaaagagttaaataacacctgtgagcctgtcgtgacacagccaaagcccaagattgaaagcccgaaactggagcgtacccctaatggcccaaacatagataagaaagaagaggacctagaagataagaataactttggggccgagccccctcatcaaaatggagagtgctaccccaacgaaaagaactccgtgaatatggacctcgattga

SEQ ID NO: 7638 - RNA, 2577 nt, synthetic construct
  misc_feature 1..2577: note = derived and/or modified sequence opt4 fromHSP110__Homo_sapiens__AAH37553
  source 1..2577: mol_type = other RNA
atgagcgtggtgggcctggacgtgggcagccagagctgctacatcgccgtggccagagccggcggcatcgagaccatcgccaacgagttcagcgacagatgcacccccagcgtgatcagcttcggcagcaagaacagaaccatcggcgtggccgccaagaaccagcagatcacccacgccaacaacaccgtgagcaacttcaagagattccacggcagagccttcaacgaccccttcatccagaaggagaaggagaacctgagctacgacctggtgcccctgaagaacggcggcgtgggcatcaaggtgatgtacatgggcgaggagcacctgttcagcgtggagcagatcaccgccatgctgctgaccaagctgaaggagaccgccgagaacagcctgaagaagcccgtgaccgactgcgtgatcagcgtgcccagcttcttcaccgacgccgagagaagaagcgtgctggacgccgcccagatcgtgggcctgaactgcctgagactgatgaacgacatgaccgccgtggccctgaactacggcatctacaagcaggacctgcccagcctggacgagaagcccagaatcgtggtgttcgtggacatgggccacagcgccttccaggtgagcgcctgcgccttcaacaagggcaagctgaaggtgctgggcaccgccttcgaccccttcctgggcggcaagaacttcgacgagaagctggtggagcacttctgcgccgagttcaagaccaagtacaagctggacgccaagagcaagatcagagccctgctgagactgtaccaggagtgcgagaagctgaagaagctgatgagcagcaacagcaccgacctgcccctgaacatcgagtgcttcatgaacgacaaggacgtgagcggcaagatgaacagaagccagttcgaggagctgtgcgccgagctgctgcagaagatcgaggtgcccctgtacagcctgctggagcagacccacctgaaggtggaggacgtgagcgccgtggagatcgtgggcggcgccaccagaatccccgccgtgaaggagagaatcgccaagttcttcggcaaggacatcagcaccaccctgaacgccgacgaggccgtggccagaggctgcgccctgcagtgcgccatcctgagccccgccttcaaggtgagagagttcagcgtgaccgacgccgtgcccttccccatcagcctgatctggaaccacgacagcgaggacaccgagggcgtgcacgaggtgttcagcagaaaccacgccgcccccttcagcaaggtgctgaccttcctgagaagaggccccttcgagctggaggccttctacagcgacccccagggcgtgccctaccccgaggccaagatcggcagattcgtggtgcagaacgtgagcgcccagaaggacggcgagaagagcagagtgaaggtgaaggtgagagtgaacacccacggcatcttcaccatcagcaccgccagcatggtggagaaggtgcccaccgaggagaacgagatgagcagcgaggccgacatggagtgcctgaaccagagaccccccgagaaccccgacaccgacaagaacgtgcagcaggacaacagcgaggccggcacccagccccaggtgcagaccgacgcccagcagaccagccagagcccccccagccccgagctgaccagcgaggagaacaagatccccgacgccgacaaggccaacgagaagaaggtggaccagccccccgaggccaagaagcccaagatcaaggtggtgaacgtggagctgcccatcgaggccaacctggtgtggcagctgggcaaggacctgctgaacatgtacatcgagaccgagggcaagatgatcatgcaggacaagctggagaaggagagaaacgacgccaagaacgccgtggaggagtacgtgtacgagttcagagacaagctgtgcggcccctacgagaagttcatctgcgagcaggaccaccagaacttcctgagactgctgaccgagaccgaggactggctgtacgaggagggcgaggaccaggccaagcaggcctacgtggacaagctggaggagctgatgaagatcggcacccccgtgaaggtgagattccaggaggccgaggagagacccaagatgttcgaggagctgggccagagactgcagcactacgccaagatcgccgccgacttcagaaacaaggacgagaagtacaaccacatcgacgagagcgagatgaagaaggtggagaagagcgtgaacgaggtgatggagtggatgaacaacgtgatgaacgcccaggccaagaagagcctggaccaggaccccgtggtgagagcccaggagatcaagaccaagatcaaggagctgaacaacacctgcgagcccgtggtgacccagcccaagcccaagatcgagagccccaagctggagagaacccccaacggccccaacatcgacaagaaggaggaggacctggaggacaagaacaacttcggcgccgagcccccccaccagaacggcgagtgctaccccaacgagaagaacagcgtgaacatggacctggactga

SEQ ID NO: 7639 - RNA, 2577 nt, synthetic construct
  misc_feature 1..2577: note = derived and/or modified sequence opt5 fromHSP110__Homo_sapiens__AAH37553
  source 1..2577: mol_type = other RNA
atgagcgtggtcggcctggacgttgggtcccagtcttgctacatcgccgtggctagagccggaggcattgagaccatcgcgaacgaatttagcgatcggtgtacaccctccgtgatttcttttgggagcaagaatcgcacgatcggagtcgctgccaaaaaccaacagattacccacgccaataacacagtgtccaatttcaagagatttcatggccgggctttcaacgacccttttatccagaaagagaaggaaaatctctcttatgatctggttccgcttaaaaacgggggagtgggcatcaaggtcatgtacatgggcgaggaacacctgttcagcgtggagcagattaccgccatgctcctgacaaaacttaaagagaccgctgaaaattccctgaagaaacccgttacagactgcgtgatcagcgtcccttctttcttcaccgatgccgagcgcagatccgtgctcgacgcggcccaaattgtggggctgaactgtctgcggctcatgaatgatatgacggctgtcgccctgaactatggaatctacaagcaggaccttcccagcctggatgaaaaacctcgcattgttgtgtttgtggacatgggccattctgctttccaggtctccgcctgcgcgtttaataaggggaagctcaaagtgctgggaaccgccttcgatccctttcttggcgggaagaacttcgacgagaaactggttgagcacttctgtgctgaatttaagacaaaatataagctcgatgccaaaagcaagatcagagctctgctgcggctctaccaggagtgcgaaaagctgaaaaagctgatgtcttccaatagcaccgaccttcctctcaacattgagtgtttcatgaacgacaaagatgtgtccggaaagatgaatcgctctcaatttgaggaactgtgcgccgagcttctgcagaaaatcgaagtcccgctctatagcctgctggagcagacacatctcaaggtggaagacgtttccgccgtggagatcgtcggcggcgctacccggattcccgcggtgaaggaaagaatcgccaaattctttgggaaggatattagcacgacactgaacgctgacgaggccgtcgcccgcggatgtgcccttcagtgcgctatcctgtctcctgcgttcaaagtgagagagttttccgttaccgatgctgtgcccttccctattagcctcatctggaatcacgactctgaagatacagagggcgtccacgaagtgtttagccggaaccatgccgcccccttctccaaggttctgacctttcttcgcagagggccgttcgagctggaggctttttactctgaccctcaaggagtgccctaccctgaagccaaaatcggccggttcgtcgtgcagaatgtgagcgctcagaaggatggggagaagtccagagttaaagtcaaggtgcgcgtgaacacccacggaattttcacaatcagcacggcctctatggtcgaaaaagtgcccaccgaggaaaatgagatgtccagcgaggcggacatggaatgtctcaaccaacggccccctgagaatccggatacagacaagaacgttcagcaggacaattctgaagccggcacccagccccaagtgcagacagatgctcagcagacctcccaaagccctccctcccctgagctgacgtctgaagagaacaaaattcccgacgccgataaggctaatgagaagaaagtcgaccagccgcctgaagccaagaaacccaagatcaaagtggttaacgtggagctgcctattgaagcgaatctcgtctggcagctgggcaaggatcttctgaacatgtatatcgagacagaagggaaaatgatcatgcaggacaagctcgagaaggagagaaacgatgccaaaaatgctgtggaagagtacgtttatgaatttcgcgacaagctgtgcggaccctacgagaaattcatttgcgaacaagatcatcagaactttctgcggcttctcaccgagaccgaggactggctgtatgaagagggcgaagatcaggccaagcaggcttacgtggacaaactggaggagctcatgaagatcgggacacctgtcaaggtgagattccaagaagccgaggaacgccccaaaatgtttgaggaactgggacagcggcttcagcactatgccaagattgctgcggatttcagaaataaagacgagaagtacaaccacatcgacgagagcgaaatgaaaaaggtggagaagtccgtcaatgaagttatggagtggatgaacaatgtgatgaacgcccaagctaaaaagtctctggatcaggacccggtggtccgcgcccaggaaattaaaaccaagatcaaagagctcaataacacatgtgagcctgtggttacgcagcccaagcccaagattgaaagccctaaactggagcggaccccgaatggccccaacatcgataagaaagaagaggacctggaagataagaataactttggggccgagcctccccatcaaaatggcgagtgctaccctaacgaaaagaactccgtgaatatggaccttgattga

SEQ ID NO: 7640 - RNA, 2577 nt, synthetic construct
  misc_feature 1..2577: note = derived and/or modified sequence opt6 fromHSP110__Homo_sapiens__AAH37553
  source 1..2577: mol_type = other RNA
atgtcagttgtcggattagatgtaggatctcaatcatgttacattgcggtcgccagagctggcggaatagaaacaatagcgaacgaattctcagacagatgtacaccatcagttataagttttggtagcaaaaacagaacaataggagtggcggcaaaaaaccaacaaataactcatgctaacaacacggtatcaaatttcaaaagatttcatggccgtgcattcaatgacccgtttatacaaaaagaaaaagaaaatttaagttacgatctagtaccattaaaaaacggaggagtcgggataaaagtaatgtatatgggggaagaacacttattctccgtagagcaaataacagcaatgttactaacgaaattaaaagaaacagcagaaaattccctaaaaaaacccgttacagattgtgttatttccgtgccaagcttctttacagacgcagaacgacggagtgtccttgacgcagcccaaatagtcggactaaattgcctcagattaatgaacgatatgacagcagtagcactaaattatggaatatataaacaagatctacccagcctagatgaaaagcctcgaatagtagtatttgtagatatgggtcattccgcattccaagtatcagcttgtgcttttaacaaaggcaaacttaaagtactaggcacagcattcgaccctttcctgggaggcaaaaactttgacgaaaaattagtcgaacatttctgcgcagaattcaaaacaaaatataaattagatgccaaaagtaaaatacgagcactcttacgactatatcaagaatgtgaaaaattaaaaaaactaatgagctctaactctactgacctaccactaaatatcgaatgcttcatgaacgataaagacgtatcaggtaaaatgaatagatcacaattcgaagaactatgtgcagaattactacaaaaaatagaagtaccactttactcactattagaacaaactcacttaaaagtagaagatgtcagcgcagtagaaatcgtaggtggcgccactagaataccagcagtgaaagaaagaatagcaaaattttttggaaaagatatatcaaccacactaaacgccgatgaagctgtagcacgtggctgcgccttacaatgcgcaattctaagccccgcattcaaagtcagagaattttccgtaacagatgcagtgccattcccaataagtctaatatggaatcacgattccgaagacactgaaggagtccacgaagtatttagcagaaatcacgcagcaccattctcaaaagtactaacattcctaaggagaggaccttttgagctagaagcattctactcagaccctcaaggagtaccttacccagaagcaaagataggaagattcgtggtgcaaaatgttagcgcacaaaaagatggagaaaaaagcagagtcaaagtcaaagtaagagtcaacacacatggaatatttacaatctcaacagcatccatggtcgaaaaggtcccaacagaagaaaacgaaatgagtagcgaagcagacatggaatgtctaaatcaaagaccgccagaaaatccggatactgataaaaacgtgcaacaggataacagcgaagcaggaacccaaccacaagttcaaacagatgcacaacagacatcacagtcccctccatcacccgaactcacctcggaagaaaacaaaataccagacgctgacaaagcaaacgaaaaaaaagtagatcaaccaccagaagctaaaaaacctaaaataaaagtagtaaacgtcgaactacccatagaggcaaacctcgtatggcaattaggaaaagatctcctcaatatgtatattgaaaccgaagggaagatgattatgcaagataaactagagaaagaaagaaacgatgctaaaaatgcagttgaggaatacgtatacgaatttagagacaaattatgtggaccatacgaaaaattcatatgcgaacaagaccaccaaaatttcctaagattacttacagaaacagaagattggctctatgaagaaggcgaggatcaagccaaacaagcatacgtagacaaactagaagaattaatgaagatcggcacaccagtcaaagtaagatttcaggaagctgaagaaagaccaaaaatgttcgaagaactcgggcaacgattacaacactacgcaaaaatagcagcagacttcagaaacaaggatgaaaaatacaatcacatagacgaatcagaaatgaaaaaagtagaaaagtccgtaaatgaagtaatggaatggatgaataacgtgatgaacgcacaggcaaaaaaaagtctcgaccaagacccagtagttcgtgcacaagaaataaaaacaaaaataaaagaattgaacaacacatgtgaaccagtagtaacacaacctaaaccaaaaatcgaatcacccaaactagaacgaacaccaaacggcccaaacatagataaaaaagaggaagacttagaagacaaaaataattttggagcagaaccaccacatcagaacggagaatgctatccaaatgaaaaaaattcagtaaatatggatttagactaa

SEQ ID NO: 7641 - protein, 205 aa, synthetic construct
  REGION 1..205: note = HSP27__Homo_sapiens__P04792
MTERRVPFSLLRGPSWDPFRDWYPHSRLFDQAFGLPRLPEEWSQWLGGSSWPGYVRPLPPAAIESPAVAAPAYSRALSRQLSSGVSEIRHTADRWRVSLDVNHFAPDELTVKTKDGVVEITGKHEERQDEHGYISRCFTRKYTLPPGVDPTQVSSSLSPEGTLTVEAPMPKLATQSNEITIPVTFESRAQLGGPEAAKSDETAAK

SEQ ID NO: 7642 - RNA, 618 nt, synthetic construct
  misc_feature 1..618: note = HSP27__Homo_sapiens__AAB51056
  source 1..618: mol_type = other RNA
atgaccgagcgccgcgtccccttctcgctcctgcggggccccagctgggaccccttccgcgactggtacccgcatagccgcctcttcgaccaggccttcgggctgccccggctgccggaggagtggtcgcagtggttaggcggcagcagctggccaggctacgtgcgccccctgccccccgccgccatcgagagccccgcagtggccgcgcccgcctacagccgcgcgctcagccggcaactcagcagcggggtctcggagatccggcacactgcggaccgctggcgcgtgtccctggatgtcaaccacttcgccccggacgagctgacggtcaagaccaaggatggcgtggtggagatcaccggcaagcacgaggagcggcaggacgagcatggctacatctcccggtgcttcacgcggaaatacacgctgccccccggtgtggaccccacccaagtttcctcctccctgtcccctgagggcacactgaccgtggaggcccccatgcccaagctagccacgcagtccaacgagatcaccatcccagtcaccttcgagtcgcgggcccagcttgggggcccagaagctgcaaaatccgatgagactgccgccaagtaa

SEQ ID NO: 7643 - RNA, 618 nt, synthetic construct
  misc_feature 1..618: note = derived and/or modified sequence opt1 fromHSP27__Homo_sapiens__AAB51056
  source 1..618: mol_type = other RNA
atgaccgagcgccgggtgcccttcagcctgctccgcggcccgtcctgggaccccttccgggactggtacccccacagccgcctgttcgaccaggccttcgggctgccccggctcccggaggagtggtcccagtggctgggcgggagctcctggcccggctacgtccgccccctgcccccggccgcgatcgagagccccgccgtggccgcccccgcctactcccgggcgctcagccgccagctgtccagcggggtgtccgagatccggcacaccgccgaccgctggcgggtcagcctggacgtgaaccacttcgcccccgacgagctcacggtgaagaccaaggacggcgtcgtggagatcaccggcaagcacgaggagcgccaggacgagcacgggtacatctcccggtgcttcacccgcaagtacacgctgccgcccggcgtggaccccacccaggtcagctccagcctgtcccccgaggggaccctcaccgtggaggccccgatgcccaagctggcgacgcagagcaacgagatcaccatccccgtgaccttcgagtcccgggcccagctgggcgggcccgaggccgccaagagcgacgagaccgccgcgaagtga

SEQ ID NO: 7644 - RNA, 618 nt, synthetic construct
  misc_feature 1..618: note = derived and/or modified sequence opt2 fromHSP27__Homo_sapiens__AAB51056
  source 1..618: mol_type = other RNA
atgaccgagcgccgcgtccccttctccctcctccgcggcccctcctgggaccccttccgcgactggtacccccactcccgcctcttcgaccaggccttcggcctcccccgcctccccgaggagtggtcccagtggctcggcggctcctcctggcccggctacgtccgccccctcccccccgccgccatcgagtcccccgccgtcgccgcccccgcctactcccgcgccctctcccgccagctctcctccggcgtctccgagatccgccacaccgccgaccgctggcgcgtctccctcgacgtcaaccacttcgcccccgacgagctcaccgtcaagaccaaggacggcgtcgtcgagatcaccggcaagcacgaggagcgccaggacgagcacggctacatctcccgctgcttcacccgcaagtacaccctcccccccggcgtcgaccccacccaggtctcctcctccctctcccccgagggcaccctcaccgtcgaggcccccatgcccaagctcgccacccagtccaacgagatcaccatccccgtcaccttcgagtcccgcgcccagctcggcggccccgaggccgccaagtccgacgagaccgccgccaagtga

SEQ ID NO: 7645 - RNA, 618 nt, synthetic construct
  misc_feature 1..618: note = derived and/or modified sequence opt3 fromHSP27__Homo_sapiens__AAB51056
  source 1..618: mol_type = other RNA
atgaccgagagaagggtgcccttcagcctgctccggggcccttcctgggacccatttcgcgattggtacccgcactctcgacttttcgaccaggcctttgggctgccccgtttgcctgaagagtggtcacaatggttaggaggtagtagctggccaggctatgtcagacccctgcctccagctgcaatcgaatcccccgccgttgcggctcctgcctactctagggcactatcgcggcagctctcaagcggggtgagtgagattcgccatacagccgatagatggagggtatccctggacgtgaaccacttcgctccagatgaacttactgtcaagacgaaagacggagtggttgagataaccggcaagcatgaggaacggcaggatgagcacggttatatctctcgctgctttacacgaaaatacactctgccgcccggggtggaccctacccaggtcagctcctcattgagtccagaaggaacactcaccgtggaggcacccatgcctaagctggccactcaaagcaatgagattacaatcccagtaaccttcgaatctagagctcagctgggcggccccgaggccgcgaaatccgatgaaacggcagccaagtga

SEQ ID NO: 7646 - RNA, 618 nt, synthetic construct
  misc_feature 1..618: note = derived and/or modified sequence opt4 fromHSP27__Homo_sapiens__AAB51056
  source 1..618: mol_type = other RNA
atgaccgagagaagagtgcccttcagcctgctgagaggccccagctgggaccccttcagagactggtacccccacagcagactgttcgaccaggccttcggcctgcccagactgcccgaggagtggagccagtggctgggcggcagcagctggcccggctacgtgagacccctgccccccgccgccatcgagagccccgccgtggccgcccccgcctacagcagagccctgagcagacagctgagcagcggcgtgagcgagatcagacacaccgccgacagatggagagtgagcctggacgtgaaccacttcgcccccgacgagctgaccgtgaagaccaaggacggcgtggtggagatcaccggcaagcacgaggagagacaggacgagcacggctacatcagcagatgcttcaccagaaagtacaccctgccccccggcgtggaccccacccaggtgagcagcagcctgagccccgagggcaccctgaccgtggaggcccccatgcccaagctggccacccagagcaacgagatcaccatccccgtgaccttcgagagcagagcccagctgggcggccccgaggccgccaagagcgacgagaccgccgccaagtga

SEQ ID NO: 7647 - RNA, 618 nt, synthetic construct
  misc_feature 1..618: note = derived and/or modified sequence opt5 fromHSP27__Homo_sapiens__AAB51056
  source 1..618: mol_type = other RNA
atgaccgagagacgggtgcccttcagcctgctccgcggcccttcctgggacccgtttagagattggtacccccactctcggctgttcgaccaggcctttgggcttcctcgcctgcccgaagagtggagccaatggctcggaggctcctcttggcctgggtatgtcagacccctgcctccggctgccatcgaaagccccgcggttgctgcccctgcctactcccgggctctttctcgccagctgagctccggagtgagcgagattagacatacagccgatcggtggcgcgtgtctctcgacgtcaaccacttcgctcccgatgaactgacggtgaagaccaaagacggcgttgtggagatcacagggaagcatgaggaaagacaggatgagcacggatatatttcccggtgctttacccgcaaatacacactgcctcccggcgtcgacccgacccaggtgtctagctccctcagccctgaaggcacactgaccgttgaggcccccatgcctaagctggcgacgcaatctaatgagatcaccattcccgtgacattcgaatccagagcccagcttgggggacccgaggctgccaaaagcgatgaaaccgctgccaagtga

SEQ ID NO: 7648 - RNA, 618 nt, synthetic construct
  misc_feature 1..618: note = derived and/or modified sequence opt6 fromHSP27__Homo_sapiens__AAB51056
  source 1..618: mol_type = other RNA
atgacagaaagaagagtacctttctcattattaagaggaccatcatgggatccatttcgagattggtatccacatagcagactctttgatcaagcatttggattacctagactacctgaagaatggtcacaatggctaggaggatcatcatggccaggatacgtaagaccattaccaccagcagcaatagaatcaccagcagtagcagcaccagcatattcacgagcattaagtagacaattaagctcaggcgtttcagaaataagacacacagctgacagatggagagtaagcttagacgtaaaccatttcgcaccagatgaattaacagtaaaaacaaaagacggagtagtagaaataacaggaaaacacgaagaaagacaagatgaacatggatatatatcaagatgtttcacaagaaaatacacactaccaccaggagtagatccaactcaagtaagctcaagcttatcaccagaaggaaccttaacagtagaagcaccaatgccaaaactagcaacccaatcaaatgaaataacaatacccgtaacatttgaaagtagagcacaattaggaggaccagaagcagcaaaatcagacgaaacagcagcaaaataa

SEQ ID NO: 7649 - protein, 418 aa, synthetic construct
  REGION 1..418: note = HSP47_(serpin_H1)__Homo_sapiens__P50454
MRSLLLLSAFCLLEAALAAEVKKPAAAAAPGTAEKLSPKAATLAERSAGLAFSLYQAMAKDQAVENILVSPVVVASSLGLVSLGGKATTASQAKAVLSAEQLRDEEVHAGLGELLRSLSNSTARNVTWKLGSRLYGPSSVSFADDFVRSSKQHYNCEHSKINFRDKRSALQSINEWAAQTTDGKLPEVTKDVERTDGALLVNAMFFKPHWDEKFHHKMVDNRGFMVTRSYTVGVMMMHRTGLYNYYDDEKEKLQIVEMPLAHKLSSLIILMPHHVEPLERLEKLLTKEQLKIWMGKMQKKAVAISLPKGVVEVTHDLQKHLAGLGLTEAIDKNKADLSRMSGKKDLYLASVFHATAFELDTDGNPFDQDIYGREELRSPKLFYADHPFIFLVRDTQSGSLLFIGRLVRPKGDKMRDEL

SEQ ID NO: 7650 - RNA, 1257 nt, synthetic construct
  misc_feature 1..1257: note = HSP47_(serpin_H1)__Homo_sapiens__AAH14623
  source 1..1257: mol_type = other RNA
atgcgctccctcctgcttctcagcgccttctgcctcctggaggcggccctggccgccgaggtgaagaaacctgcagccgcagcagctcctggcactgcggagaagttgagccccaaggcggccacgcttgccgagcgcagcgccggcctggccttcagcttgtaccaggccatggccaaggaccaggcagtggagaacatcctggtgtcacccgtggtggtggcctcgtcgctggggctcgtgtcgctgggcggcaaggcgaccacggcgtcgcaggccaaggcagtgctgagcgccgagcagctgcgcgacgaggaggtgcacgccggcctgggcgagctgctgcgctcactcagcaactccacggcgcgcaacgtgacctggaagctgggcagccgactgtacggacccagctcagtgagcttcgctgatgacttcgtgcgcagcagcaagcagcactacaactgcgagcactccaagatcaacttccgcgacaagcgcagcgcgctgcagtccatcaacgagtgggccgcgcagaccaccgacggcaagctgcccgaggtcaccaaggacgtggagcgcacggacggcgccctgttagtcaacgccatgttcttcaagccacactgggatgagaaattccaccacaagatggtggacaaccgtggcttcatggtgactcggtcctataccgtgggtgtcatgatgatgcaccggacaggcctctacaactactacgacgacgagaaggaaaagctgcaaatcgtggagatgcccctggcccacaagctctccagcctcatcatcctcatgccccatcacgtggagcctctcgagcgccttgaaaagctgctaaccaaagagcagctgaagatctggatggggaagatgcagaagaaggctgttgccatctccttgcccaagggtgtggtggaggtgacccatgacctgcagaaacacctggctgggctgggcctgactgaggccattgacaagaacaaggccgacttgtcacgcatgtcaggcaagaaggacctgtacctggccagcgtgttccacgccaccgcctttgagttggacacagatggcaacccctttgaccaggacatctacgggcgcgaggagctgcgcagccccaagctgttctacgccgaccaccccttcatcttcctagtgcgggacacccaaagcggctccctgctattcattgggcgcctggtccggcctaagggtgacaagatgcgagacgagttatag

SEQ ID NO: 7651 - RNA, 1257 nt, synthetic construct
  misc_feature 1..1257: note = derived and/or modified sequence opt1 fromHSP47_(serpin_H1)__Homo_sapiens__AAH14623
  source 1..1257: mol_type = other RNA
atgcgcagcctgctcctgctgtccgccttctgcctcctggaggccgcgctggccgccgaggtgaagaagcccgccgccgcggccgccccgggcaccgccgagaagctcagccccaaggcggccaccctggccgagcggtccgccgggctggccttcagcctctaccaggcgatggccaaggaccaggccgtcgagaacatcctggtgtcccccgtggtcgtggccagctccctgggcctcgtgagcctcgggggcaaggccacgaccgcgtcccaggccaaggccgtcctgagcgccgagcagctgcgcgacgaggaggtgcacgccgggctgggcgagctgctccggtccctgagcaactccaccgcgcgcaacgtgacctggaagctgggcagccggctctacgggccctccagcgtctccttcgccgacgacttcgtgcgcagctccaagcagcactacaactgcgagcacagcaagatcaacttccgggacaagcgcagcgccctgcagtccatcaacgagtgggccgcccagacgaccgacggcaagctgccggaggtgaccaaggacgtcgagcggaccgacggggcgctcctggtgaacgccatgttcttcaagccccactgggacgagaagttccaccacaagatggtggacaaccgcggcttcatggtcacgcggagctacaccgtgggggtgatgatgatgcaccgcaccggcctgtacaactactacgacgacgagaaggagaagctccagatcgtcgagatgcccctggcccacaagctgtccagcctcatcatcctgatgccccaccacgtggagccgctggagcggctcgagaagctgctgaccaaggagcagctcaagatctggatgggcaagatgcagaagaaggccgtggcgatctccctgcccaagggggtcgtggaggtgacgcacgacctgcagaagcacctcgccggcctggggctgaccgaggccatcgacaagaacaaggccgacctcagccgcatgtccggcaagaaggacctgtacctggccagcgtcttccacgcgaccgccttcgagctcgacaccgacggcaaccccttcgaccaggacatctacgggcgggaggagctgcgctcccccaagctgttctacgccgaccacccgttcatcttcctcgtgcgggacacgcagagcggctccctgctgttcatcgggcgcctggtccggcccaagggcgacaagatgcgcgacgagctctga

SEQ ID NO: 7652 - RNA, 1257 nt, synthetic construct
  misc_feature 1..1257: note = derived and/or modified sequence opt2 fromHSP47_(serpin_H1)__Homo_sapiens__AAH14623
  source 1..1257: mol_type = other RNA
atgcgctccctcctcctcctctccgccttctgcctcctcgaggccgccctcgccgccgaggtcaagaagcccgccgccgccgccgcccccggcaccgccgagaagctctcccccaaggccgccaccctcgccgagcgctccgccggcctcgccttctccctctaccaggccatggccaaggaccaggccgtcgagaacatcctcgtctcccccgtcgtcgtcgcctcctccctcggcctcgtctccctcggcggcaaggccaccaccgcctcccaggccaaggccgtcctctccgccgagcagctccgcgacgaggaggtccacgccggcctcggcgagctcctccgctccctctccaactccaccgcccgcaacgtcacctggaagctcggctcccgcctctacggcccctcctccgtctccttcgccgacgacttcgtccgctcctccaagcagcactacaactgcgagcactccaagatcaacttccgcgacaagcgctccgccctccagtccatcaacgagtgggccgcccagaccaccgacggcaagctccccgaggtcaccaaggacgtcgagcgcaccgacggcgccctcctcgtcaacgccatgttcttcaagccccactgggacgagaagttccaccacaagatggtcgacaaccgcggcttcatggtcacccgctcctacaccgtcggcgtcatgatgatgcaccgcaccggcctctacaactactacgacgacgagaaggagaagctccagatcgtcgagatgcccctcgcccacaagctctcctccctcatcatcctcatgccccaccacgtcgagcccctcgagcgcctcgagaagctcctcaccaaggagcagctcaagatctggatgggcaagatgcagaagaaggccgtcgccatctccctccccaagggcgtcgtcgaggtcacccacgacctccagaagcacctcgccggcctcggcctcaccgaggccatcgacaagaacaaggccgacctctcccgcatgtccggcaagaaggacctctacctcgcctccgtcttccacgccaccgccttcgagctcgacaccgacggcaaccccttcgaccaggacatctacggccgcgaggagctccgctcccccaagctcttctacgccgaccaccccttcatcttcctcgtccgcgacacccagtccggctccctcctcttcatcggccgcctcgtccgccccaagggcgacaagatgcgcgacgagctctga

SEQ ID NO: 7653 - RNA, 1257 nt, synthetic construct
  misc_feature 1..1257: note = derived and/or modified sequence opt3 fromHSP47_(serpin_H1)__Homo_sapiens__AAH14623
  source 1..1257: mol_type = other RNA
atgagaagcctgctccttctgtccgccttctgcttgttagaggctgcactggccgcggaagtgaagaaacccgctgccgcagccgctcctggcaccgcagagaagctatctccaaaagccgctacactcgccgaaaggtcagcggggctggcatttagtctttaccaggccatggctaaggaccaagccgtcgagaacatcctggttagcccggtggtagtggcatcctctttgggactcgtctcgctgggtggcaaagctactacggcctcacaggcgaaggccgtgctgagcgcagaacagctccgggatgaggaggttcacgctgggttaggagaactgcttcgcagtttgtccaattctaccgcccgaaacgtgacatggaagctgggcagccgtctatatggtccctcctcagtcagtttcgctgacgattttgtgagaagctctaaacagcattacaattgtgagcactccaagattaacttcagggacaaacggtcagccctccaaagcataaatgaatgggcagcccagactaccgatgggaagctgcctgaggtaacaaaagacgttgagcgcaccgatggagcgcttctggtgaacgctatgtttttcaagccacattgggacgaaaagtttcaccataaaatggtcgataatagaggcttcatggtgactaggagttatacagtgggcgtcatgatgatgcaccggaccgggttgtacaactattacgacgatgagaaggaaaaactccagatcgttgagatgcccctggcacacaagttatcttccctgattatcctcatgcctcatcacgtggaaccacttgagcgcctggagaaattgctaacgaaggaacagctgaaaatttggatgggaaagatgcaaaagaaagccgtagctatcagcctccccaagggtgtggtcgaggtgactcatgacctgcagaaacaccttgccggcctggggttgaccgaagcaatagataagaataaagccgacctctcgcgaatgtctggaaagaaggacctgtatttagcttccgtttttcacgccacagcattcgagctggatactgacggcaacccttttgatcaggacatctacggtagagaggaactaaggtcaccaaaactcttctacgcggatcatccgtttattttcctggtgcgggacacccagagtgggagccttttgttcatcggacgtctggtccgccccaagggcgataaaatgagagacgagctctga

SEQ ID NO: 7654 - RNA, 1257 nt, synthetic construct
  misc_feature 1..1257: note = derived and/or modified sequence opt4 fromHSP47_(serpin_H1)__Homo_sapiens__AAH14623
  source 1..1257: mol_type = other RNA
atgagaagcctgctgctgctgagcgccttctgcctgctggaggccgccctggccgccgaggtgaagaagcccgccgccgccgccgcccccggcaccgccgagaagctgagccccaaggccgccaccctggccgagagaagcgccggcctggccttcagcctgtaccaggccatggccaaggaccaggccgtggagaacatcctggtgagccccgtggtggtggccagcagcctgggcctggtgagcctgggcggcaaggccaccaccgccagccaggccaaggccgtgctgagcgccgagcagctgagagacgaggaggtgcacgccggcctgggcgagctgctgagaagcctgagcaacagcaccgccagaaacgtgacctggaagctgggcagcagactgtacggccccagcagcgtgagcttcgccgacgacttcgtgagaagcagcaagcagcactacaactgcgagcacagcaagatcaacttcagagacaagagaagcgccctgcagagcatcaacgagtgggccgcccagaccaccgacggcaagctgcccgaggtgaccaaggacgtggagagaaccgacggcgccctgctggtgaacgccatgttcttcaagccccactgggacgagaagttccaccacaagatggtggacaacagaggcttcatggtgaccagaagctacaccgtgggcgtgatgatgatgcacagaaccggcctgtacaactactacgacgacgagaaggagaagctgcagatcgtggagatgcccctggcccacaagctgagcagcctgatcatcctgatgccccaccacgtggagcccctggagagactggagaagctgctgaccaaggagcagctgaagatctggatgggcaagatgcagaagaaggccgtggccatcagcctgcccaagggcgtggtggaggtgacccacgacctgcagaagcacctggccggcctgggcctgaccgaggccatcgacaagaacaaggccgacctgagcagaatgagcggcaagaaggacctgtacctggccagcgtgttccacgccaccgccttcgagctggacaccgacggcaaccccttcgaccaggacatctacggcagagaggagctgagaagccccaagctgttctacgccgaccaccccttcatcttcctggtgagagacacccagagcggcagcctgctgttcatcggcagactggtgagacccaagggcgacaagatgagagacgagctgtga

SEQ ID NO: 7655 - RNA, 1257 nt, synthetic construct
  misc_feature 1..1257: note = derived and/or modified sequence opt5 fromHSP47_(serpin_H1)__Homo_sapiens__AAH14623
  source 1..1257: mol_type = other RNA
atgagaagcctgctcctgctttccgccttctgcctgctcgaggctgccctggcggctgaagtgaagaaacccgccgccgctgccgctcctggcaccgccgagaaactttctccgaaggcggccacactggctgaacggagcgccgggctcgctttttccctgtaccaggccatggcgaaggaccaagccgtcgagaacatcctggtttctcccgtggtggtcgctagctccctcggactggtgtctcttggcgggaaagccacgaccgctagccaggccaaggccgttctgtccgctgaacagctccgcgatgaggaggtgcacgcgggactgggcgaacttctgagaagcctctctaattccacagcccggaacgtcacctggaagctggggagccgcctgtatggaccttcttccgtgagcttcgctgacgattttgttagatcttccaaacagcattacaattgtgagcacagcaagattaacttccgggacaaacgctccgccctccaatctatcaatgaatgggccgctcagacaaccgatggcaagctgcccgaggtgacaaaagacgtcgagagaaccgatggcgcccttctggtgaacgcgatgtttttcaagcctcattgggacgaaaagtttcaccataaaatggtggataatcgggggttcatggtcacgcgcagctataccgttggagtgatgatgatgcacagaacaggcctctacaactattacgacgatgagaaggaaaaactgcagattgtggagatgccccttgctcacaagctgtccagcctcatcattctgatgcctcatcacgtcgaaccgctggagcggctcgagaaactgcttaccaaggaacagctgaaaatctggatggggaagatgcaaaagaaagccgtggccatctctctccccaagggagttgtggaggtcacacatgacctgcagaaacaccttgctggcctggggctcaccgaagccattgataagaataaagctgacctgtcccgcatgagcggaaagaaggacctgtatctcgcctctgtgtttcacgcgacggccttcgagctggatacagacggcaacccttttgatcaggacatctacggcagagaggaacttcggagccccaaactgttctacgctgatcatccttttattttcctcgttcgcgacacccagtccgggtctctgctgttcatcggaagacttgtgcggcccaagggcgataaaatgagagacgagctctga

SEQ ID NO: 7656 - RNA, 1257 nt, synthetic construct
  misc_feature 1..1257: note = derived and/or modified sequence opt6 fromHSP47_(serpin_H1)__Homo_sapiens__AAH14623
  source 1..1257: mol_type = other RNA
atgcgaagcctactattattaagcgccttctgtctactagaagcagcattagccgcagaagtaaaaaaaccagcagcagcagccgcaccaggaaccgcggaaaaactatcaccaaaagcagcaacactagcagaacgctcagctggactagcattctcattatatcaagcaatggcaaaagatcaagcagtagaaaacattctagtatcaccagttgtagtagcttcatccctaggactagtaagcctaggcggaaaagcaactacagcatcacaagcaaaagcagtcctaagcgcagaacaactaagagacgaagaagtacacgcaggcttaggagaattattgcgatcattatcgaactcaacagcaagaaatgtaacatggaaattgggaagtcggctatatggaccaagttcagtatcattcgcagacgatttcgtaagatcatccaaacaacattacaattgcgaacactctaaaataaactttagagataaaagaagtgcactacaatccataaatgaatgggcagcacaaaccacagatggaaaactaccagaggtaacaaaagatgtagaaagaacagacggagccttattagtgaatgcaatgtttttcaaaccccattgggatgaaaaatttcaccataaaatggtggataatagaggattcatggtaaccagatcatacacggtaggagtaatgatgatgcatagaacaggactatataactattatgatgacgaaaaagaaaaattacaaatagtagaaatgccactagcccataaactttcaagtctaataatacttatgccacatcatgttgaaccactagaaagactagaaaaactcctgacaaaagaacaattaaaaatatggatgggaaaaatgcaaaaaaaagctgttgcaatatcactaccaaaaggagttgtagaagtaacccatgacttacaaaaacacttagcaggactaggactaacggaagcaatagataaaaataaagcggacttatccagaatgtcaggtaaaaaagatctatatcttgcgagtgtattccacgcaacagcattcgaactagatactgacggaaatccatttgatcaagatatctatggaagagaagaactcaggagtccaaaactattctatgccgatcacccatttatattcttagtcagagatacgcaatcgggttcattattatttataggaagactagtaagaccaaaaggagataaaatgagagacgaactatag

SEQ ID NO: 7657 - protein, 573 aa, synthetic construct
  REGION 1..573: note = HSP60__Homo_sapiens__A0A024R3X4
MLRLPTVFRQMRPVSRVLAPHLTRAYAKDVKFGADARALMLQGVDLLADAVAVTMGPKGRTVIIEQSWGSPKVTKDGVTVAKSIDLKDKYKNIGAKLVQDVANNTNEEAGDGTTTATVLARSIAKEGFEKISKGANPVEIRRGVMLAVDAVIAELKKQSKPVTTPEEIAQVATISANGDKEIGNIISDAMKKVGRKGVITVKDGKTLNDELEIIEGMKFDRGYISPYFINTSKGQKCEFQDAYVLLSEKKISSIQSIVPALEIANAHRKPLVIIAEDVDGEALSTLVLNRLKVGLQVVAVKAPGFGDNRKNQLKDMAIATGGAVFGEEGLTLNLEDVQPHDLGKVGEVIVTKDDAMLLKGKGDKAQIEKRIQEIIEQLDVTTSEYEKEKLNERLAKLSDGVAVLKVGGTSDVEVNEKKDRVTDALNATRAAVEEGIVLGGGCALLRCIPALDSLTPANEDQKIGIEIIKRTLKIPAMTIAKNAGVEGSLIVEKIMQSSSEVGYDAMAGDFVNMVEKGIIDPTKVVRTALLDAAGVASLLTTAEVVVTEIPKEEKDPGMGAMGGMGGGMGGGMF

SEQ ID NO: 7658 - RNA, 1722 nt, synthetic construct
  misc_feature 1..1722: note = HSP60__Homo_sapiens__EAW70148
  source 1..1722: mol_type = other RNA
atgcttcggttacccacagtctttcgccagatgagaccggtgtccagggtactggctcctcatctcactcgggcttatgccaaagatgtaaaatttggtgcagatgcccgagccttaatgcttcaaggtgtagaccttttagccgatgctgtggccgttacaatggggccaaagggaagaacagtgattattgagcagagttggggaagtcccaaagtaacaaaagatggtgtgactgttgcaaagtcaattgacttaaaagataaatacaaaaacattggagctaaacttgttcaagatgttgccaataacacaaatgaagaagctggggatggcactaccactgctactgtactggcacgctctatagccaaggaaggcttcgagaagattagcaaaggtgctaatccagtggaaatcaggagaggtgtgatgttagctgttgatgctgtaattgctgaacttaaaaagcagtctaaacctgtgaccacccctgaagaaattgcacaggttgctacgatttctgcaaacggagacaaagaaattggcaatatcatctctgatgcaatgaaaaaagttggaagaaagggtgtcatcacagtaaaggatggaaaaacactgaatgatgaattagaaattattgaaggcatgaagtttgatcgaggctatatttctccatactttattaatacatcaaaaggtcagaaatgtgaattccaggatgcctatgttctgttgagtgaaaagaaaatttctagtatccagtccattgtacctgctcttgaaattgccaatgctcaccgtaagcctttggtcataatcgctgaagatgttgatggagaagctctaagtacactcgtcttgaataggctaaaggttggtcttcaggttgtggcagtcaaggctccagggtttggtgacaatagaaagaaccagcttaaagatatggctattgctactggtggtgcagtgtttggagaagagggattgaccctgaatcttgaagacgttcagcctcatgacttaggaaaagttggagaggtcattgtgaccaaagacgatgccatgctcttaaaaggaaaaggtgacaaggctcaaattgaaaaacgtattcaagaaatcattgagcagttagatgtcacaactagtgaatatgaaaaggaaaaactgaatgaacggcttgcaaaactttcagatggagtggctgtgctgaaggttggtgggacaagtgatgttgaagtgaatgaaaagaaagacagagttacagatgcccttaatgctacaagagctgctgttgaagaaggcattgttttgggagggggttgtgccctccttcgatgcattccagccttggactcattgactccagctaatgaagatcaaaaaattggtatagaaattattaaaagaacactcaaaattccagcaatgaccattgctaagaatgcaggtgttgaaggatctttgatagttgagaaaattatgcaaagttcctcagaagttggttatgatgctatggctggagattttgtgaatatggtggaaaaaggaatcattgacccaacaaaggttgtgagaactgctttattggatgctgctggtgtggcctctctgttaactacagcagaagttgtagtcacagaaattcctaaagaagagaaggaccctggaatgggtgcaatgggtggaatgggaggtggtatgggaggtggcatgttctaa

SEQ ID NO: 7659 - RNA, 1722 nt, synthetic construct
  misc_feature 1..1722: note = derived and/or modified sequence opt1 fromHSP60__Homo_sapiens__EAW70148
  source 1..1722: mol_type = other RNA
atgctgcgcctccccaccgtgttccggcagatgcgcccggtcagccgggtgctggcgccccacctgacccgcgcctacgccaaggacgtgaagttcggggccgacgcccgggccctcatgctgcagggggtcgacctgctcgccgacgcggtggccgtgacgatgggccccaaggggcgcaccgtcatcatcgagcagtcctggggcagccccaaggtgaccaaggacggggtgaccgtcgccaagtccatcgacctgaaggacaagtacaagaacatcggcgccaagctggtgcaggacgtggcgaacaacacgaacgaggaggccggcgacgggaccaccaccgccacggtcctcgcccggagcatcgccaaggagggcttcgagaagatctccaagggggcgaacccggtggagatccgccggggcgtgatgctggccgtcgacgccgtgatcgccgagctgaagaagcagagcaagcccgtgaccacccccgaggagatcgcccaggtcgcgaccatctccgccaacggggacaaggagatcggcaacatcatcagcgacgccatgaagaaggtgggccgcaagggggtgatcacggtcaaggacggcaagaccctcaacgacgagctggagatcatcgaggggatgaagttcgaccggggctacatctccccctacttcatcaacaccagcaagggccagaagtgcgagttccaggacgcctacgtgctgctctccgagaagaagatcagctccatccagagcatcgtgccggccctggagatcgcgaacgcccaccgcaagcccctggtcatcatcgccgaggacgtggacggggaggccctctccaccctggtcctgaaccggctcaaggtgggcctccaggtggtcgccgtgaaggcgcccgggttcggcgacaaccgcaagaaccagctgaaggacatggccatcgccaccgggggcgccgtgttcggcgaggaggggctgacgctgaacctggaggacgtccagccccacgacctcggcaaggtgggggaggtgatcgtcaccaaggacgacgcgatgctgctgaagggcaagggggacaaggcccagatcgagaagcggatccaggagatcatcgagcagctcgacgtgaccacgagcgagtacgagaaggagaagctgaacgagcgcctggccaagctctccgacggcgtggccgtcctgaaggtgggcgggaccagcgacgtggaggtcaacgagaagaaggaccgggtgaccgacgccctgaacgcgacccgcgccgccgtggaggagggcatcgtcctcgggggcgggtgcgccctgctgcggtgcatcccggccctcgactccctgacgcccgcgaacgaggaccagaagatcggcatcgagatcatcaagcgcaccctgaagatccccgccatgaccatcgccaagaacgccggcgtggaggggagcctcatcgtggagaagatcatgcagagctccagcgaggtcggctacgacgccatggcgggggacttcgtgaacatggtggagaagggcatcatcgaccccaccaaggtcgtgcggacggccctgctggacgccgccggcgtggcgtccctcctgaccaccgccgaggtcgtggtgaccgagatcccgaaggaggagaaggaccccgggatgggcgccatgggcgggatgggcgggggcatgggcggcgggatgttctga

SEQ ID NO: 7660 - RNA, 1722 nt, synthetic construct
  misc_feature 1..1722: note = derived and/or modified sequence opt2 fromHSP60__Homo_sapiens__EAW70148
  source 1..1722: mol_type = other RNA
atgctccgcctccccaccgtcttccgccagatgcgccccgtctcccgcgtcctcgccccccacctcacccgcgcctacgccaaggacgtcaagttcggcgccgacgcccgcgccctcatgctccagggcgtcgacctcctcgccgacgccgtcgccgtcaccatgggccccaagggccgcaccgtcatcatcgagcagtcctggggctcccccaaggtcaccaaggacggcgtcaccgtcgccaagtccatcgacctcaaggacaagtacaagaacatcggcgccaagctcgtccaggacgtcgccaacaacaccaacgaggaggccggcgacggcaccaccaccgccaccgtcctcgcccgctccatcgccaaggagggcttcgagaagatctccaagggcgccaaccccgtcgagatccgccgcggcgtcatgctcgccgtcgacgccgtcatcgccgagctcaagaagcagtccaagcccgtcaccacccccgaggagatcgcccaggtcgccaccatctccgccaacggcgacaaggagatcggcaacatcatctccgacgccatgaagaaggtcggccgcaagggcgtcatcaccgtcaaggacggcaagaccctcaacgacgagctcgagatcatcgagggcatgaagttcgaccgcggctacatctccccctacttcatcaacacctccaagggccagaagtgcgagttccaggacgcctacgtcctcctctccgagaagaagatctcctccatccagtccatcgtccccgccctcgagatcgccaacgcccaccgcaagcccctcgtcatcatcgccgaggacgtcgacggcgaggccctctccaccctcgtcctcaaccgcctcaaggtcggcctccaggtcgtcgccgtcaaggcccccggcttcggcgacaaccgcaagaaccagctcaaggacatggccatcgccaccggcggcgccgtcttcggcgaggagggcctcaccctcaacctcgaggacgtccagccccacgacctcggcaaggtcggcgaggtcatcgtcaccaaggacgacgccatgctcctcaagggcaagggcgacaaggcccagatcgagaagcgcatccaggagatcatcgagcagctcgacgtcaccacctccgagtacgagaaggagaagctcaacgagcgcctcgccaagctctccgacggcgtcgccgtcctcaaggtcggcggcacctccgacgtcgaggtcaacgagaagaaggaccgcgtcaccgacgccctcaacgccacccgcgccgccgtcgaggagggcatcgtcctcggcggcggctgcgccctcctccgctgcatccccgccctcgactccctcacccccgccaacgaggaccagaagatcggcatcgagatcatcaagcgcaccctcaagatccccgccatgaccatcgccaagaacgccggcgtcgagggctccctcatcgtcgagaagatcatgcagtcctcctccgaggtcggctacgacgccatggccggcgacttcgtcaacatggtcgagaagggcatcatcgaccccaccaaggtcgtccgcaccgccctcctcgacgccgccggcgtcgcctccctcctcaccaccgccgaggtcgtcgtcaccgagatccccaaggaggagaaggaccccggcatgggcgccatgggcggcatgggcggcggcatgggcggcggcatgttctga

SEQ ID NO: 7661 - RNA, 1722 nt, synthetic construct
  misc_feature 1..1722: note = derived and/or modified sequence opt3 fromHSP60__Homo_sapiens__EAW70148
  source 1..1722: mol_type = other RNA
atgctgagactccccaccgtgttcaggcagatgcggcctgtcagccgcgttcttgccccacacctgacacgagcttacgcaaaggacgtgaaatttggcgccgatgcgcgtgctttgatgttacaaggggtagacctgctagccgatgcagtggccgtcactatgggaccgaagggtagaacggtgatcattgagcagtcctggggctctcccaaagttaccaaggacggggtgacagtcgctaaatcaatagatctcaaggacaagtataaaaacatcggagcaaagctggtgcaggatgtagccaataacactaatgaagaggctggcgacggtaccacaaccgccactgttcttgcgaggagtattgcaaaagaagggttcgagaagatcagcaaaggagccaaccctgtggaaattcggcgcggcgtcatgctggctgtggatgccgtgatcgcagagttgaagaagcagtccaaaccagtcacaacccccgaggaaatagctcaagttgccacgatctctgcgaatggcgacaaggagattgggaacatcatttcggatgccatgaaaaaggtgggaagaaaaggtgtaatcactgtgaaggacggcaaaaccctcaatgatgaactggagataattgaggggatgaagtttgacaggggatacatctcaccttatttcattaacacaagcaagggccagaaatgcgaatttcaggacgcatacgtcctgctcagtgagaagaaaatctcctctatccagagcattgtgccagctttagaaatagccaatgctcatcggaagcccctggttatcattgccgaggatgtggacggtgaagcactttccactttggtcctgaaccgcctaaaagtggggctccaagtagttgccgtgaaggctcctggattcggcgataatcgaaagaaccagctgaaagacatggcgatcgcaaccggcggggccgtctttggagaggagggtcttacactgaatttggaagatgtgcagccacacgacctcggcaaggtcggggaggtgatagttaccaaagatgacgctatgctgttaaagggaaaaggcgataaggcccagattgaaaagagaatccaagagatcattgaacagctggacgtgacgacttcagagtatgagaaagaaaagctcaacgagaggcttgcaaaactgagtgatggtgtagccgtcttgaaggttgggggcacaagcgacgtggaagtgaatgagaaaaaggaccgggtcaccgatgctctaaacgccactcgtgcagcggtggaagagggaatcgtactgggcgggggatgtgctctcctgcgctgcattccggcccttgactctctgacacccgcaaacgaggatcagaagataggtatcgaaattatcaaaagaaccttgaagatccctgccatgacgattgctaaaaatgccggcgtggaggggtccctcatagttgaaaagatcatgcaatcaagcagtgaggtcggatacgacgcaatggctggcgatttcgtgaacatggtggagaaaggtattatcgacccaaccaaggtcgttaggacagccctgttagatgcggccggggtggcttctctgctaactaccgcagaagtggtagtcacagagattcccaaagaagagaaggaccctggcatgggagccatgggcgggatgggaggtggcatgggagggggcatgttttga

SEQ ID NO: 7662 - RNA, 1722 nt, synthetic construct
  misc_feature 1..1722: note = derived and/or modified sequence opt4 fromHSP60__Homo_sapiens__EAW70148
  source 1..1722: mol_type = other RNA
atgctgagactgcccaccgtgttcagacagatgagacccgtgagcagagtgctggccccccacctgaccagagcctacgccaaggacgtgaagttcggcgccgacgccagagccctgatgctgcagggcgtggacctgctggccgacgccgtggccgtgaccatgggccccaagggcagaaccgtgatcatcgagcagagctggggcagccccaaggtgaccaaggacggcgtgaccgtggccaagagcatcgacctgaaggacaagtacaagaacatcggcgccaagctggtgcaggacgtggccaacaacaccaacgaggaggccggcgacggcaccaccaccgccaccgtgctggccagaagcatcgccaaggagggcttcgagaagatcagcaagggcgccaaccccgtggagatcagaagaggcgtgatgctggccgtggacgccgtgatcgccgagctgaagaagcagagcaagcccgtgaccacccccgaggagatcgcccaggtggccaccatcagcgccaacggcgacaaggagatcggcaacatcatcagcgacgccatgaagaaggtgggcagaaagggcgtgatcaccgtgaaggacggcaagaccctgaacgacgagctggagatcatcgagggcatgaagttcgacagaggctacatcagcccctacttcatcaacaccagcaagggccagaagtgcgagttccaggacgcctacgtgctgctgagcgagaagaagatcagcagcatccagagcatcgtgcccgccctggagatcgccaacgcccacagaaagcccctggtgatcatcgccgaggacgtggacggcgaggccctgagcaccctggtgctgaacagactgaaggtgggcctgcaggtggtggccgtgaaggcccccggcttcggcgacaacagaaagaaccagctgaaggacatggccatcgccaccggcggcgccgtgttcggcgaggagggcctgaccctgaacctggaggacgtgcagccccacgacctgggcaaggtgggcgaggtgatcgtgaccaaggacgacgccatgctgctgaagggcaagggcgacaaggcccagatcgagaagagaatccaggagatcatcgagcagctggacgtgaccaccagcgagtacgagaaggagaagctgaacgagagactggccaagctgagcgacggcgtggccgtgctgaaggtgggcggcaccagcgacgtggaggtgaacgagaagaaggacagagtgaccgacgccctgaacgccaccagagccgccgtggaggagggcatcgtgctgggcggcggctgcgccctgctgagatgcatccccgccctggacagcctgacccccgccaacgaggaccagaagatcggcatcgagatcatcaagagaaccctgaagatccccgccatgaccatcgccaagaacgccggcgtggagggcagcctgatcgtggagaagatcatgcagagcagcagcgaggtgggctacgacgccatggccggcgacttcgtgaacatggtggagaagggcatcatcgaccccaccaaggtggtgagaaccgccctgctggacgccgccggcgtggccagcctgctgaccaccgccgaggtggtggtgaccgagatccccaaggaggagaaggaccccggcatgggcgccatgggcggcatgggcggcggcatgggcggcggcatgttctga

SEQ ID NO: 7663 - RNA, 1722 nt, synthetic construct
  misc_feature 1..1722: note = derived and/or modified sequence opt5 fromHSP60__Homo_sapiens__EAW70148
  source 1..1722: mol_type = other RNA
atgctgagactccccaccgtgttccggcagatgcgccctgtcagcagagttctggccccgcaccttacacgggcttacgccaaggacgtgaaatttggcgcggatgctcgcgccctgatgctccaaggggtggacctgcttgccgatgctgtcgccgtgacgatgggacccaagggcagaaccgttatcattgagcagtcctgggggtctcctaaagtgacaaaggacggagtcaccgtggctaaaagcatcgatctgaaggacaagtataaaaacattggcgccaagctcgttcaggatgtggcgaataacacaaatgaagaggccggggacggaaccacaaccgctacggtcctggcccggtccatcgctaaagaaggcttcgagaagatttctaaaggcgccaaccccgtggaaatccgcagaggggtgatgctggcggtcgatgccgttatcgctgagctcaagaagcagagcaaacctgtgaccacacccgaggaaattgcccaagtggctaccatctccgccaatggagacaaggagattggcaacatcatttctgatgccatgaaaaaggtcgggcggaaaggagtgatcacagttaaggacggcaaaaccctgaatgatgaacttgagattatcgaggggatgaagtttgaccgcggatacatcagcccttatttcattaacacgtccaagggccagaaatgcgaatttcaggacgcttacgtgctgctcagcgagaagaaaatctcttccattcagagcatcgtcccggcgctggaaattgccaatgctcatagaaagccccttgtgatcatcgccgaggatgttgacggcgaagccctgtctacactcgtgctgaaccggctgaaagtcgggctccaagtggtcgctgtgaaggcccctggattcggcgataatcgcaagaaccagctgaaagacatggcgattgctaccgggggagccgtttttggcgaggaggggcttacactgaatctcgaagatgtgcagccccacgacctgggaaaggtcggcgaggtgatcgttaccaaagatgacgccatgcttctgaagggcaaaggggataaggctcagattgaaaagagaatccaagagattatcgaacagctcgacgtgaccacatccgagtatgagaaagaaaagctgaacgagcggctggccaaactcagcgatggagtcgctgtgctgaaggtgggcgggacgtctgacgttgaagtcaatgagaaaaaggaccgcgtgaccgatgcccttaacgcgacaagagccgctgtggaagagggaatcgtcctgggcgggggctgtgccctcctgcggtgcattcctgctcttgactccctgacccccgccaacgaggatcagaagatcggaattgaaatcattaaaagaacactcaagatcccggcgatgaccattgccaaaaatgctggcgtggaggggagcctgatcgttgaaaagatcatgcaatcctctagcgaggtgggatacgacgccatggctggcgatttcgtcaacatggtggagaaagggattatcgaccctacgaaggttgtgcgcacagccctgctcgatgccgctggagtcgcgtccctgcttaccaccgccgaagtggttgtgacagagattcccaaagaagagaaggaccctggcatgggggctatgggcggaatgggcgggggaatgggcgggggaatgttttga

SEQ ID NO: 7664 - RNA, 1722 nt, synthetic construct
  misc_feature 1..1722: note = derived and/or modified sequence opt6 fromHSP60__Homo_sapiens__EAW70148
  source 1..1722: mol_type = other RNA
atgctaagactaccgacggtatttagacaaatgagaccagtaagtagagtattggcaccacacctgacaagagcatatgcgaaagatgtaaaatttggagcagatgcaagagcactaatgctacaaggcgtggatttactagccgacgcagtagcagttactatgggaccgaaaggacggacagtaattatagaacaaagttggggtagtccgaaagtaacaaaagatggggtcacagtagcaaaatcaatagacttaaaggacaaatacaaaaatataggagcaaaactagtacaagatgtggcaaataacacaaatgaagaagcaggagacggaacaaccacggcaacagtactagctagaagtatagcaaaagaagggtttgaaaaaataagcaaaggagcaaatcctgtagaaataagaaggggagtaatgctagcggtagacgccgttatagcagagttaaaaaaacaaagtaaaccagtaacaacaccagaggaaatagcacaagtagcaacaataagtgcaaatggagataaggaaattggaaacattatatccgatgccatgaagaaagtaggaagaaaaggggtaataacagtaaaggatggaaaaacgttaaatgatgaactagaaataatagaaggaatgaaattcgaccgaggatatattagtccatattttataaacacaagcaaaggacaaaaatgtgaatttcaagacgcttatgtcctattaagcgaaaaaaaaatatcaagcatacaatcaattgtaccagcacttgaaatagcaaatgcacacagaaaaccattagtaataattgctgaagatgtagacggggaagcgctaagcacattagtattaaatagactaaaagtaggactccaagtggtagcagtaaaagctccaggatttggagataatagaaaaaatcaattaaaagacatggcaatagcaacagggggagccgtatttggagaggaaggtctgacattaaacttagaggacgtacagccacatgatttgggaaaagtaggagaagtaatagtaacgaaagacgacgcaatgttattgaaaggaaagggagataaagcgcagatagaaaaaaggattcaagagataatagagcaattagatgtaacaacaagtgaatatgagaaagaaaaactaaatgaaagattagcaaaattgagcgacggagtagcagtattaaaagtaggaggaacatcagacgtagaagtaaatgaaaaaaaggacagagtaacagatgctttgaacgcaacaagagcagccgttgaagaaggaatagtattaggaggaggatgtgctttactaagatgcatcccagcactagattcattaacgccagcaaatgaagatcaaaaaataggaatagaaataataaaaagaaccttaaaaataccagctatgacaatagcaaaaaacgcaggcgtagagggaagcctaatagtagaaaaaataatgcaaagttcaagtgaagtagggtatgacgccatggctggagattttgtaaacatggtagaaaaaggaataatagatccaacaaaagtagtaaggacggcattgttagatgcagcaggagttgcaagccttttaacaaccgcagaagtagtagtgacagaaataccaaaagaagaaaaagatccaggtatgggggcaatgggagggatgggaggaggaatgggaggaggaatgttctaa

SEQ ID NO: 7665 - protein, 569 aa, synthetic construct [sequence omitted]

SEQ ID NO: 7666 - RNA, 1710 nt, synthetic construct
  misc_feature 1..1710: note = HSP60__Homo_sapiens__ACE06961
  source 1..1710: mol_type = other RNA
atgcttcggttacccacagtctttcgccagatgagaccggtgtccagggtactggctcctcatctcactcgggcttatgccaaagatgtaaaatttggtgcagatgcccgagccttaatgcttcaaggtgtagaccttttagccgatgctgtggccgttacaatggggccaaagggaagaacagtgattattgagcagagttggggaagtcccaaagtaacaaaagatggtgtgactgttgcaaagtcaattgacttaaaagataaatacaagaacattggagctaaacttgttcaagatgttgccaataacacaaatgaagaagctggggatggcactaccactgctactgtactggcacgctctatagccaaggaaggcttcgagaagattagcaaaggtgctaatccagtggaaatcaggagaggtgtgatgttagctgttgatgctgtaattgctgaacttaaaaagcagtctaaacctgtgaccacccctgaagaaattgcacaggttgctacgatttctgcaaacggagacaaagaaattggcaatatcatctctgatgcaatgaaaaaagttggaagaaagggtgtcatcacagtaaaggatggaaaaacactgaatgatgaattagaaattattgaaggcatgaagtttgatcgaggctatatttctccatactttattaatacatcaaaaggtcagaaatgtgaattccaggatgcctatgttctgttgagtgaaaagaaaatttctagtatccagtccattgtacctgctcttgaaattgccaatgctcaccgtaagcctttggtcataatcgctgaagatgttgatggagaagctctaagtacactcgtcttgaataggctaaaggttggtcttcaggttgtggcagtcaaggctccagggtttggtgacaatagaaagaaccagcttaaagatatggctattgctactggtggtgcagtgtttggagaagagggattgaccctgaatcttgaagacgttcagcctcatgacttaggaaaagttggagaggtcattgtgaccaaagacgatgccatgctcttaaaaggaaaaggtgacaaggctcaaattgaaaaacgtattcaagaaatcattgagcagttagatgtcacaactagtgaatatgaaaagggaaaactgaatgaacggcttgcaaaactttcagatggagtggctgtgctgaaggttggtgggacaagtgatgttgaagtgaatgaaaagaaagacagagttacagatgcccttaatgctacaagagctgctgttgaagaaggcattgttttgggagggggttgtgccctccttcgatgcattccagccttggactcattgactccagctaatgaagatcaaaaaattggtatagaaattattaaaagaacactcaaaattccagcaatgaccattgctaagaatgcaggtgttgaaggatctttgatagttgagaaaattatgcaaagttcctcagaagttggttatgatgctatggctggagattttgtgaatatggtggaaaaaggaatcattgacccaacaaaggttgtgagaactgctttattggatgctgctggtgtggcctctctgttaactacagcagaagttgtagtcacagaaattcctaaagaagagaaggaccctggaatgggtgcaatgggtggaatgggaggtggcatgttctaa

SEQ ID NO: 7667 - RNA, 1710 nt, synthetic construct
  misc_feature 1..1710: note = derived and/or modified sequence opt1 fromHSP60__Homo_sapiens__ACE06961
  source 1..1710: mol_type = other RNA
atgctgcgcctccccaccgtgttccggcagatgcgcccggtcagccgggtgctggcgccccacctgacccgcgcctacgccaaggacgtgaagttcggcgccgacgcccgggccctcatgctgcagggggtcgacctgctcgccgacgcggtggccgtgacgatgggccccaaggggcgcaccgtcatcatcgagcagtcctggggcagccccaaggtgaccaaggacggggtgaccgtcgccaagtccatcgacctgaaggacaagtacaagaacatcggcgccaagctggtgcaggacgtggcgaacaacacgaacgaggaggccggcgacgggaccaccaccgccacggtcctcgcccggagcatcgccaaggagggcttcgagaagatctccaagggggcgaacccggtggagatccgccggggcgtgatgctggccgtcgacgccgtgatcgccgagctgaagaagcagagcaagcccgtgaccacccccgaggagatcgcccaggtcgcgaccatctccgccaacggggacaaggagatcggcaacatcatcagcgacgccatgaagaaggtgggccgcaagggggtgatcacggtcaaggacggcaagaccctcaacgacgagctggagatcatcgaggggatgaagttcgaccggggctacatctccccctacttcatcaacaccagcaagggccagaagtgcgagttccaggacgcctacgtgctgctctccgagaagaagatcagctccatccagagcatcgtgccggccctggagatcgcgaacgcccaccgcaagcccctggtcatcatcgccgaggacgtggacggggaggccctctccaccctggtcctgaaccggctcaaggtgggcctccaggtggtcgccgtgaaggcgcccgggttcggcgacaaccgcaagaaccagctgaaggacatggccatcgccaccgggggcgccgtgttcggcgaggaggggctgacgctgaacctggaggacgtccagccccacgacctcggcaaggtgggggaggtgatcgtcaccaaggacgacgcgatgctgctgaagggcaagggggacaaggcccagatcgagaagcggatccaggagatcatcgagcagctcgacgtgaccacgagcgagtacgagaagggcaagctgaacgagcgcctggccaagctctccgacggcgtggccgtcctgaaggtcgggggcaccagcgacgtggaggtgaacgagaagaaggaccgggtgaccgacgccctgaacgcgacccgcgccgccgtggaggaggggatcgtcctcggcgggggctgcgccctgctgcggtgcatcccggccctcgactccctgacgcccgcgaacgaggaccagaagatcggcatcgagatcatcaagcgcaccctgaagatccccgccatgaccatcgccaagaacgccggggtggagggcagcctcatcgtggagaagatcatgcagagctccagcgaggtcgggtacgacgccatggcgggcgacttcgtgaacatggtggagaagggcatcatcgaccccaccaaggtcgtgcggacggccctgctggacgccgccggggtggcgtccctcctgaccaccgccgaggtcgtggtgaccgagatcccgaaggaggagaaggaccccggcatgggggccatgggcgggatgggcggcgggatgttctga

SEQ ID NO: 7668 - RNA, 1710 nt, synthetic construct
  misc_feature 1..1710: note = derived and/or modified sequence opt2 fromHSP60__Homo_sapiens__ACE06961
  source 1..1710: mol_type = other RNA
atgctccgcctccccaccgtcttccgccagatgcgccccgtctcccgcgtcctcgccccccacctcacccgcgcctacgccaaggacgtcaagttcggcgccgacgcccgcgccctcatgctccagggcgtcgacctcctcgccgacgccgtcgccgtcaccatgggccccaagggccgcaccgtcatcatcgagcagtcctggggctcccccaaggtcaccaaggacggcgtcaccgtcgccaagtccatcgacctcaaggacaagtacaagaacatcggcgccaagctcgtccaggacgtcgccaacaacaccaacgaggaggccggcgacggcaccaccaccgccaccgtcctcgcccgctccatcgccaaggagggcttcgagaagatctccaagggcgccaaccccgtcgagatccgccgcggcgtcatgctcgccgtcgacgccgtcatcgccgagctcaagaagcagtccaagcccgtcaccacccccgaggagatcgcccaggtcgccaccatctccgccaacggcgacaaggagatcggcaacatcatctccgacgccatgaagaaggtcggccgcaagggcgtcatcaccgtcaaggacggcaagaccctcaacgacgagctcgagatcatcgagggcatgaagttcgaccgcggctacatctccccctacttcatcaacacctccaagggccagaagtgcgagttccaggacgcctacgtcctcctctccgagaagaagatctcctccatccagtccatcgtccccgccctcgagatcgccaacgcccaccgcaagcccctcgtcatcatcgccgaggacgtcgacggcgaggccctctccaccctcgtcctcaaccgcctcaaggtcggcctccaggtcgtcgccgtcaaggcccccggcttcggcgacaaccgcaagaaccagctcaaggacatggccatcgccaccggcggcgccgtcttcggcgaggagggcctcaccctcaacctcgaggacgtccagccccacgacctcggcaaggtcggcgaggtcatcgtcaccaaggacgacgccatgctcctcaagggcaagggcgacaaggcccagatcgagaagcgcatccaggagatcatcgagcagctcgacgtcaccacctccgagtacgagaagggcaagctcaacgagcgcctcgccaagctctccgacggcgtcgccgtcctcaaggtcggcggcacctccgacgtcgaggtcaacgagaagaaggaccgcgtcaccgacgccctcaacgccacccgcgccgccgtcgaggagggcatcgtcctcggcggcggctgcgccctcctccgctgcatccccgccctcgactccctcacccccgccaacgaggaccagaagatcggcatcgagatcatcaagcgcaccctcaagatccccgccatgaccatcgccaagaacgccggcgtcgagggctccctcatcgtcgagaagatcatgcagtcctcctccgaggtcggctacgacgccatggccggcgacttcgtcaacatggtcgagaagggcatcatcgaccccaccaaggtcgtccgcaccgccctcctcgacgccgccggcgtcgcctccctcctcaccaccgccgaggtcgtcgtcaccgagatccccaaggaggagaaggaccccggcatgggcgccatgggcggcatgggcggcggcatgttctga

SEQ ID NO: 7669 - RNA, 1710 nt, synthetic construct
  misc_feature 1..1710: note = derived and/or modified sequence opt3 fromHSP60__Homo_sapiens__ACE06961
  source 1..1710: mol_type = other RNA
atgctgagactccccaccgtgttcaggcagatgcggcctgtcagccgcgttcttgccccacacctgacacgagcttacgcaaaggacgtgaaatttggcgccgatgcgcgtgctttgatgttacaaggggtagacctgctagccgatgcagtggccgtcactatgggaccgaagggtagaacggtgatcattgagcagtcctggggctctcccaaagttaccaaggacggggtgacagtcgctaaatcaatagatctcaaggacaagtataaaaacatcggagcaaagctggtgcaggatgtagccaataacactaatgaagaggctggcgacggtaccacaaccgccactgttcttgcgaggagtattgcaaaagaagggttcgagaagatcagcaaaggagccaaccctgtggaaattcggcgcggcgtcatgctggctgtggatgccgtgatcgcagagttgaagaagcagtccaaaccagtcacaacccccgaggaaatagctcaagttgccacgatctctgcgaatggcgacaaggagattgggaacatcatttcggatgccatgaaaaaggtgggaagaaaaggtgtaatcactgtgaaggacggcaaaaccctcaatgatgaactggagataattgaggggatgaagtttgacaggggatacatctcaccttatttcattaacacaagcaagggccagaaatgcgaatttcaggacgcatacgtcctgctcagtgagaagaaaatctcctctatccagagcattgtgccagctttagaaatagccaatgctcatcggaagcccctggttatcattgccgaggatgtggacggtgaagcactttccactttggtcctgaaccgcctaaaagtggggctccaagtagttgccgtgaaggctcctggattcggcgataatcgaaagaaccagctgaaagacatggcgatcgcaaccggcggggccgtctttggagaggagggtcttacactgaatttggaagatgtgcagccacacgacctcggcaaggtcggggaggtgatagttaccaaagatgacgctatgctgttaaagggaaaaggcgataaggcccagattgaaaagagaatccaagagatcattgaacagctggacgtgacgacttcagagtatgagaaaggtaagctcaacgaaaggcttgcaaaactgagtgatggggtagccgtcttgaaggtgggcggaacaagcgacgttgaggtgaatgagaaaaaggaccgggtcaccgatgctctaaacgccactcgtgcagcggtggaagaaggcatcgtactcgggggaggttgtgctctgctgcgctgcattccggcccttgactctctgacacccgcaaacgaggatcagaagataggcatcgagattatcaaaagaaccttgaagatccctgccatgacgattgctaaaaatgccggggtggaaggatccctcatagttgagaagatcatgcaatcaagcagtgaagtcggctacgacgcaatggctggtgatttcgtgaacatggtggagaaagggattatcgacccaaccaaggtcgttaggacagccctgttagatgcggccggcgtggcttctctgctaactaccgcagaggtggtagtcacagaaattcccaaagaggaaaaggaccctggaatgggcgccatgggagggatgggtggcgggatgttttga

SEQ ID NO: 7670 - RNA, 1710 nt, synthetic construct
  misc_feature 1..1710: note = derived and/or modified sequence opt4 fromHSP60__Homo_sapiens__ACE06961
  source 1..1710: mol_type = other RNA
atgctgagactgcccaccgtgttcagacagatgagacccgtgagcagagtgctggccccccacctgaccagagcctacgccaaggacgtgaagttcggcgccgacgccagagccctgatgctgcagggcgtggacctgctggccgacgccgtggccgtgaccatgggccccaagggcagaaccgtgatcatcgagcagagctggggcagccccaaggtgaccaaggacggcgtgaccgtggccaagagcatcgacctgaaggacaagtacaagaacatcggcgccaagctggtgcaggacgtggccaacaacaccaacgaggaggccggcgacggcaccaccaccgccaccgtgctggccagaagcatcgccaaggagggcttcgagaagatcagcaagggcgccaaccccgtggagatcagaagaggcgtgatgctggccgtggacgccgtgatcgccgagctgaagaagcagagcaagcccgtgaccacccccgaggagatcgcccaggtggccaccatcagcgccaacggcgacaaggagatcggcaacatcatcagcgacgccatgaagaaggtgggcagaaagggcgtgatcaccgtgaaggacggcaagaccctgaacgacgagctggagatcatcgagggcatgaagttcgacagaggctacatcagcccctacttcatcaacaccagcaagggccagaagtgcgagttccaggacgcctacgtgctgctgagcgagaagaagatcagcagcatccagagcatcgtgcccgccctggagatcgccaacgcccacagaaagcccctggtgatcatcgccgaggacgtggacggcgaggccctgagcaccctggtgctgaacagactgaaggtgggcctgcaggtggtggccgtgaaggcccccggcttcggcgacaacagaaagaaccagctgaaggacatggccatcgccaccggcggcgccgtgttcggcgaggagggcctgaccctgaacctggaggacgtgcagccccacgacctgggcaaggtgggcgaggtgatcgtgaccaaggacgacgccatgctgctgaagggcaagggcgacaaggcccagatcgagaagagaatccaggagatcatcgagcagctggacgtgaccaccagcgagtacgagaagggcaagctgaacgagagactggccaagctgagcgacggcgtggccgtgctgaaggtgggcggcaccagcgacgtggaggtgaacgagaagaaggacagagtgaccgacgccctgaacgccaccagagccgccgtggaggagggcatcgtgctgggcggcggctgcgccctgctgagatgcatccccgccctggacagcctgacccccgccaacgaggaccagaagatcggcatcgagatcatcaagagaaccctgaagatccccgccatgaccatcgccaagaacgccggcgtggagggcagcctgatcgtggagaagatcatgcagagcagcagcgaggtgggctacgacgccatggccggcgacttcgtgaacatggtggagaagggcatcatcgaccccaccaaggtggtgagaaccgccctgctggacgccgccggcgtggccagcctgctgaccaccgccgaggtggtggtgaccgagatccccaaggaggagaaggaccccggcatgggcgccatgggcggcatgggcggcggcatgttctga

SEQ ID NO: 7671 - RNA, 1710 nt, synthetic construct
  misc_feature 1..1710: note = derived and/or modified sequence opt5 fromHSP60__Homo_sapiens__ACE06961
  source 1..1710: mol_type = other RNA
atgctgagactccccaccgtgttccggcagatgcgccctgtcagcagagttctggccccgcaccttacacgggcttacgccaaggacgtgaaatttggcgcggatgctcgcgccctgatgctccaaggggtggacctgcttgccgatgctgtcgccgtgacgatgggacccaagggcagaaccgttatcattgagcagtcctgggggtctcctaaagtgacaaaggacggagtcaccgtggctaaaagcatcgatctgaaggacaagtataaaaacattggcgccaagctcgttcaggatgtggcgaataacacaaatgaagaggccggggacggaaccacaaccgctacggtcctggcccggtccatcgctaaagaaggcttcgagaagatttctaaaggcgccaaccccgtggaaatccgcagaggggtgatgctggcggtcgatgccgttatcgctgagctcaagaagcagagcaaacctgtgaccacacccgaggaaattgcccaagtggctaccatctccgccaatggagacaaggagattggcaacatcatttctgatgccatgaaaaaggtcgggcggaaaggagtgatcacagttaaggacggcaaaaccctgaatgatgaacttgagattatcgaggggatgaagtttgaccgcggatacatcagcccttatttcattaacacgtccaagggccagaaatgcgaatttcaggacgcttacgtgctgctcagcgagaagaaaatctcttccattcagagcatcgtcccggcgctggaaattgccaatgctcatagaaagccccttgtgatcatcgccgaggatgttgacggcgaagccctgtctacactcgtgctgaaccggctgaaagtcgggctccaagtggtcgctgtgaaggcccctggattcggcgataatcgcaagaaccagctgaaagacatggcgattgctaccgggggagccgtttttggcgaggaggggcttacactgaatctcgaagatgtgcagccccacgacctgggaaaggtcggcgaggtgatcgttaccaaagatgacgccatgcttctgaagggcaaaggggataaggctcagattgaaaagagaatccaagagattatcgaacagctcgacgtgaccacatccgagtatgagaaaggaaagctgaacgaacggctggccaaactcagcgatggcgtcgctgtgctgaaggttgggggaacgtctgacgtggaggtcaatgagaaaaaggaccgcgtgaccgatgcccttaacgcgacaagagccgctgtggaagaaggcatcgtcctcgggggcggatgtgccctgctgcggtgcattcctgctcttgactccctgacccccgccaacgaggatcagaagatcggcattgagatcattaaaagaacactcaagatcccggcgatgaccattgccaaaaatgctggggtggaaggaagcctgatcgttgagaagatcatgcaatcctctagcgaagtgggctacgacgccatggctggggatttcgtcaacatggtggagaaaggaattatcgaccctacgaaggttgtgcgcacagccctgctcgatgccgctggcgtcgcgtccctgcttaccaccgccgaggtggttgtgacagaaattcccaaagaggaaaaggaccctgggatgggcgctatgggaggcatgggagggggcatgttttga

SEQ ID NO: 7672 - RNA, 1710 nt, synthetic construct
  misc_feature 1..1710: note = derived and/or modified sequence opt6 fromHSP60__Homo_sapiens__ACE06961
  source 1..1710: mol_type = other RNA
atgctaaggttaccaacagtattcagacaaatgagaccagtatcaagagtcctagcaccacatttaacacgagcatatgcaaaagatgtaaaattcggggcagatgcaagggcattgatgttacaaggagtcgatttactagcggatgcagtagcggtaacaatgggaccaaaaggaagaacagtaataatagaacaaagttggggatcacctaaagtaacaaaagatggagtaacagtagcaaaaagtatagatttaaaagacaaatataaaaacattggagcaaaactagtgcaagatgtagcaaacaataccaatgaagaagcaggagatggtacaacaacagcaacggtattggctagatcaatagcgaaagaaggatttgaaaaaatatcaaaaggcgcaaacccagtagagataagaaggggagtaatgctagcagtagatgcggtaatagcagaactaaaaaaacaaagtaaacctgtaacaacccctgaggaaatagcacaagttgcaactatatcagcaaacggcgacaaagaaatagggaatattataagtgatgcaatgaagaaagtaggaagaaaaggtgtaataacagtaaaagatgggaaaacactgaatgatgaactagagataatagaaggaatgaaattcgataggggatacataagcccatactttattaatacatcaaaaggacagaaatgcgaatttcaagacgcatacgtcttactaagcgaaaaaaaaataagtagcatacaatcaattgtaccagcactggagatagcgaacgcacatcgaaaaccattagtgattatagctgaagatgtggatggagaggcactaagtacattagtgttaaacaggttaaaagtaggacttcaagtagtagccgtaaaagccccaggattcggagataatagaaaaaatcaattgaaagacatggcaattgcaacaggaggagcagtatttggcgaagaaggattaacactaaacctagaagatgtacagccacacgatttagggaaagtaggagaagtaatagtgacgaaagacgatgcaatgttactaaaaggaaaaggggataaagctcaaatagagaaaagaatacaagagataattgaacaattagacgtaacaacaagcgaatacgaaaaaggaaaattaaatgaaaggctagcaaaattaagcgatggagtggcagtgctaaaagtaggaggaacaagtgacgtcgaagtaaatgaaaagaaagatagagtgacagatgcgttaaacgcaacaagagcagcagtagaggaagggatagtactagggggcggatgtgccctactaagatgcattccggctttagactcattaacaccagctaatgaagatcaaaaaatcggaatagaaataataaaaagaacgttaaaaataccagcaatgacgatagcaaagaatgcaggggtagaaggatcactaatagtggaaaaaataatgcaaagttcaagtgaagtaggatatgacgcaatggctggggatttcgtaaatatggtagagaaagggataatagatccaacaaaagtagttcgaaccgcattattagatgcagcaggggtagcatcactactaacaactgcagaagtagtagtaacagaaataccaaaagaagagaaagatcccggaatgggagctatgggagggatgggtggagggatgttctaa

SEQ ID NO: 7673 - protein, 573 aa, synthetic construct; identical to SEQ ID NO: 7657
  REGION 1..573: note = HSP60__Homo_sapiens__P10809

SEQ ID NO: 7674 - RNA, 1722 nt, synthetic construct
  misc_feature 1..1722: note = HSP60__Homo_sapiens__AAA60127
  source 1..1722: mol_type = other RNA
atgcttcggttacccacagtctttcgccagatgagaccggtgtccagggtactggctcctcatctcactcgggcttatgccaaagatgtaaaatttggtgcagatgcccgagccttaatgcttcaaggtgtagaccttttagccgatgctgtggccgttacaatggggccaaagggaagaacagtgattattgagcagagttggggaagtcccaaagtaacaaaagatggtgtgactgttgcaaagtcaattgacttaaaagataaatacaagaacattggagctaaacttgttcaagatgttgccaataacacaaatgaagaagctggggatggcactaccactgctactgtactggcacgctctatagccaaggaaggcttcgagaagattagcaaaggtgctaatccagtggaaatcaggagaggtgtgatgttagctgttgatgctgtaattgctgaacttaaaaagcagtctaaacctgtgaccacccctgaagaaattgcacaggttgctacgatttctgcaaacggagacaaagaaattggcaatatcatctctgatgcaatgaaaaaagttggaagaaagggtgtcatcacagtaaaggatggaaaaacactgaatgatgaattagaaattattgaaggcatgaagtttgatcgaggctatatttctccatactttattaatacatcaaaaggtcagaaatgtgaattccaggatgcctatgttctgttgagtgaaaagaaaatttctagtatccagtccattgtacctgctcttgaaattgccaatgctcaccgtaagcctttggtcataatcgctgaagatgttgatggagaagctctaagtacactcgtcttgaataggctaaaggttggtcttcaggttgtggcagtcaaggctccagggtttggtgacaatagaaagaaccagcttaaagatatggctattgctactggtggtgcagtgtttggagaagagggattgaccctgaatcttgaagacgttcagcctcatgacttaggaaaagttggagaggtcattgtgaccaaagacgatgccatgctcttaaaaggaaaaggtgacaaggctcaaattgaaaaacgtattcaagaaatcattgagcagttagatgtcacaactagtgaatatgaaaaggaaaaactgaatgaacggcttgcaaaactttcagatggagtggctgtgctgaaggttggtgggacaagtgatgttgaagtgaatgaaaagaaagacagagttacagatgcccttaatgctacaagagctgctgttgaagaaggcattgttttgggagggggttgtgccctccttcgatgcattccagccttggactcattgactccagctaatgaagatcaaaaaattggtatagaaattattaaaagaacactcaaaattccagcaatgaccattgctaagaatgcaggtgttgaaggatctttgatagttgagaaaattatgcaaagttcctcagaagttggttatgatgctatggctggagattttgtgaatatggtggaaaaaggaatcattgacccaacaaaggttgtgagaactgctttattggatgctgctggtgtggcctctctgttaactacagcagaagttgtagtcacagaaattcctaaagaagagaaggaccctggaatgggtgcaatgggtggaatgggaggtggtatgggaggtggcatgttctaa

SEQ ID NO: 7675 - RNA, 1722 nt, synthetic construct; identical to SEQ ID NO: 7659
  misc_feature 1..1722: note = derived and/or modified sequence opt1 fromHSP60__Homo_sapiens__AAA60127
  source 1..1722: mol_type = other RNA

SEQ ID NO: 7676 - RNA, 1722 nt, synthetic construct; identical to SEQ ID NO: 7660
  misc_feature 1..1722: note = derived and/or modified sequence opt2 fromHSP60__Homo_sapiens__AAA60127
  source 1..1722: mol_type = other RNA

SEQ ID NO: 7677 - RNA, 1722 nt, synthetic construct; identical to SEQ ID NO: 7661
  misc_feature 1..1722: note = derived and/or modified sequence opt3 fromHSP60__Homo_sapiens__AAA60127
  source 1..1722: mol_type = other RNA

SEQ ID NO: 7678 - RNA, 1722 nt, synthetic construct; identical to SEQ ID NO: 7662
  misc_feature 1..1722: note = derived and/or modified sequence opt4 fromHSP60__Homo_sapiens__AAA60127
  source 1..1722: mol_type = other RNA

SEQ ID NO: 7679 - RNA, 1722 nt, synthetic construct; identical to SEQ ID NO: 7663
  misc_feature 1..1722: note = derived and/or modified sequence opt5 fromHSP60__Homo_sapiens__AAA60127
  source 1..1722: mol_type = other RNA

SEQ ID NO: 7680 - RNA, 1722 nt, synthetic construct
  misc_feature 1..1722: note = derived and/or modified sequence opt6 fromHSP60__Homo_sapiens__AAA60127
  source 1..1722: mol_type = other RNA
atgttaagattaccaacggtattcagacaaatgagaccagtaagtagagtactagctccacatctaacaagagcctatgcaaaagacgtaaaatttggagctgatgcaagagcattaatgctacaaggagtagatctactagcagatgcagttgcagttacaatgggaccaaaaggaaggacggtcataatagaacaaagctggggatcgccaaaagtaacgaaagatggagttactgtagcaaaaagcatagacctaaaagataaatataagaacataggagcaaaattagtacaagacgtcgcaaataatacaaacgaagaagcaggagacggaacaacaaccgcaacagtacttgcaaggtcaattgcaaaagaaggatttgaaaaaatatcaaaaggagcaaatcccgtagaaataagaagaggggtaatgctagcagtagacgcagtaatagcagaactgaaaaaacaaagtaaaccagtgactacaccagaagaaatagcgcaagtagctacaataagcgctaatggagacaaagaaataggaaacataataagcgatgccatgaaaaaggtaggaagaaaaggagtaataacagttaaagatggaaaaacacttaatgatgaactcgaaataatagaagggatgaaatttgatagaggatatataagcccatactttataaacacaagtaaaggacaaaaatgcgaattccaggatgcatacgtgttactaagcgagaaaaaaatcagtagcattcaatcaattgtaccagcattagagatcgcaaatgcgcatagaaaaccactagtaataatagcagaagatgtagacggagaagcattaagtacattagttttaaatagactaaaagtaggactacaagtagtagcagtaaaagcaccaggattcggagataatcgaaaaaatcaacttaaagatatggcaatagcaacaggaggcgctgtgttcggagaagaagggttaactttgaatctagaagatgtacaaccacatgatctaggaaaagtaggagaagtaatagtaacaaaagacgatgcaatgctcttaaaaggaaaaggagataaggcgcaaattgaaaaaagaattcaagaaataatagaacaactagatgtaacaacaagtgaatatgagaaagagaaactgaacgaaagactggcaaaactgagtgacggcgtcgcagtactaaaagtaggtggcacgtcagatgtagaagtaaacgaaaaaaaagatagagtaacagacgcgttaaatgctactagagcggcagttgaagaaggtatagtcttaggtggaggatgcgcattgttaagatgtataccagcattagatagcctaacacccgcaaatgaagatcaaaagattggaatagaaataataaaaagaactctaaaaataccagcaatgaccatagcgaaaaatgcaggtgtagaaggaagcctaatagtagaaaaaataatgcaatcaagttcagaagtaggatatgatgcgatggcgggtgactttgttaatatggtagaaaaaggtattatagacccaacaaaagtagtaagaacagcattactggacgcagcaggagtagcaagtctattaacaacagcagaagttgtagtaactgaaatacctaaagaggaaaaagatccaggaatgggagcaatgggaggaatgggcggtggaatgggaggaggaatgttttaa

SEQ ID NO: 7681 - protein, 509 aa, synthetic construct
  REGION 1..509: note = HSP60__Homo_sapiens__Q0VDF9
MAAIGVHLGCTSACVAVYKDGRAGVVANDAGDRVTPAVVAYSENEEIVGLAAKQSRIRNISNTVMKVKQILGRSSSDPQAQKYIAESKCLVIEKNGKLRYEIDTGEETKFVNPEDVARLIFSKMKETAHSVLGSDANDVVITVPFDFGEKQKNALGEAARAAGFNVLRLIHEPSAALLAYGIGQDSPTGKSNILVFKLGGTSLSLSVMEVNSGIYRVLSTNTDDNIGGAHFTETLAQYLASEFQRSFKHDVRGNARAMMKLTNSAEVAKHSLSTLGSANCFLDSLYEGQDFDCNVSRARFELLCSPLFNKCIEAIRGLLDQNGFTADDINKVVLCGGSSRIPKLQQLIKDLFPAVELLNSIPPDEVIPIGAAIEAGILIGKENLLVEDSLMIECSARDILVKGVDESGASRFTVLFPSGTPLPARRQHTLQAPGSISSVCLELYESDGKNSAKEETKFAQVVLQDLDKKENGLRDILAVLTMKRDGSLHVTCTDQETGKCEAISIEIAS

SEQ ID NO: 7682 - RNA, 1530 nt, synthetic construct
  misc_feature 1..1530: note = HSP60__Homo_sapiens__AAI19691
  source 1..1530: mol_type = other RNA
atggcggccatcggagttcacctgggctgcacctcagcctgtgtggccgtctataaggatggccgggctggtgtggttgcaaatgatgccggtgaccgagttactccagctgttgttgcttactcagaaaatgaagagattgttggattggcagcaaaacaaagtagaataagaaatatttcaaatacagtaatgaaagtaaagcagatcctgggcagaagctccagtgatccacaagctcagaaatacatcgcggaaagtaaatgtttagtcattgaaaaaaatgggaaattacgatatgaaatagatactggagaagaaacaaaatttgttaacccagaagatgttgccagactgatatttagtaaaatgaaagaaacggcacattctgtattgggctcagatgcaaatgatgtagttattactgtcccgtttgattttggagaaaagcaaaaaaatgctcttggagaagcagctagagctgctggatttaatgttttgcgattaattcacgaaccgtctgcagctcttcttgcttatggaattggacaagactcccctactggaaaaagcaatattttggtgtttaagcttggaggaacatccttatctctcagcgtcatggaagttaacagtggaatatatcgggttctttcaacaaacactgatgataacatcggtggtgcacatttcacagaaaccttagcacagtatctagcttctgagttccaaagatccttcaaacatgatgtgagaggaaatgcgcgagccatgatgaaattaacgaacagtgctgaagtagcgaaacattctttgtcaaccttgggaagtgccaactgttttcttgactcattatatgaaggtcaagattttgattgcaatgtgtccagagcaagatttgaacttctttgttctccactttttaataagtgtatagaagcaatcagaggactcttagatcaaaatggatttacagcagatgatatcaacaaggttgtcctttgtggagggtcttctcgaatcccaaagctacagcaactgattaaagatcttttcccagctgttgagcttctcaattctatccctcctgatgaagtgatccctattggtgcagctatagaagcaggaattcttattgggaaagaaaacctgttggtggaagactctcttatgatagagtgttcagccagagatattttagttaagggtgtggacgaatcaggagccagtagattcacagtgctgtttccatcagggactcctttgccagctcgaagacaacacacattgcaagcccctggaagcatatcttcagtgtgccttgaactctatgagtctgatgggaagaactctgccaaagaggaaaccaagtttgcacaggttgtactccaggatttagataaaaaagaaaatggattacgtgatatattagctgttcttactatgaaaagggatggatctttacatgtgacatgcacagatcaagaaactggaaaatgtgaagcaatctctattgagatagcatcttag

SEQ ID NO: 7683 - RNA, 1530 nt, synthetic construct
  misc_feature 1..1530: note = derived and/or modified sequence opt1 fromHSP60__Homo_sapiens__AAI19691
  source 1..1530: mol_type = other RNA
atggccgccatcggcgtgcacctggggtgcaccagcgcgtgcgtcgccgtgtacaaggacggccgcgccggggtggtcgccaacgacgccggcgaccgggtgacccccgcggtggtcgcctactccgagaacgaggagatcgtggggctcgccgccaagcagagccgcatccggaacatctccaacacggtgatgaaggtcaagcagatcctgggccgcagctccagcgacccgcaggcgcagaagtacatcgccgagtccaagtgcctggtgatcgagaagaacggcaagctccggtacgagatcgacaccggggaggagaccaagttcgtgaaccccgaggacgtcgcccgcctgatcttcagcaagatgaaggagaccgcccactccgtgctgggcagcgacgccaacgacgtggtcatcacggtgcccttcgacttcggggagaagcagaagaacgcgctcggcgaggccgcccgggccgccgggttcaacgtgctgcgcctgatccacgagccctccgcggccctcctggcctacggcatcggccaggacagcccgaccgggaagtccaacatcctggtcttcaagctcggcgggaccagcctgtccctgagcgtgatggaggtgaactccggcatctaccgggtcctcagcaccaacacggacgacaacatcggcggggcccacttcaccgagaccctggcccagtacctggcgtccgagttccagcgcagcttcaagcacgacgtgcggggcaacgcccgcgccatgatgaagctcaccaacagcgccgaggtggccaagcactccctgagcacgctggggtccgcgaactgcttcctcgacagcctgtacgagggccaggacttcgactgcaacgtctcccgggcccgcttcgagctgctctgcagccccctgttcaacaagtgcatcgaggccatccgggggctgctcgaccagaacggcttcaccgccgacgacatcaacaaggtggtcctgtgcggcgggtccagccgcatccccaagctgcagcagctcatcaaggacctgttccccgcggtggagctgctcaactccatcccgcccgacgaggtgatccccatcggcgccgccatcgaggccgggatcctgatcggcaaggagaacctgctcgtcgaggacagcctgatgatcgagtgctccgcccgggacatcctggtgaagggggtggacgagagcggcgcgtcccgcttcaccgtcctcttccccagcggcaccccgctgcccgcccggcgccagcacacgctgcaggcccccgggtccatcagctccgtgtgcctcgagctgtacgagagcgacggcaagaactccgccaaggaggagaccaagttcgcccaggtggtcctgcaggacctcgacaagaaggagaacgggctgcgggacatcctggcggtgctcaccatgaagcgcgacggcagcctgcacgtgacctgcacggaccaggagaccgggaagtgcgaggccatcagcatcgagatcgcctcctga

SEQ ID NO: 7684 - RNA, 1530 nt, synthetic construct
  misc_feature 1..1530: note = derived and/or modified sequence opt2 fromHSP60__Homo_sapiens__AAI19691
  source 1..1530: mol_type = other RNA
atggccgccatcggcgtccacctcggctgcacctccgcctgcgtcgccgtctacaaggacggccgcgccggcgtcgtcgccaacgacgccggcgaccgcgtcacccccgccgtcgtcgcctactccgagaacgaggagatcgtcggcctcgccgccaagcagtcccgcatccgcaacatctccaacaccgtcatgaaggtcaagcagatcctcggccgctcctcctccgacccccaggcccagaagtacatcgccgagtccaagtgcctcgtcatcgagaagaacggcaagctccgctacgagatcgacaccggcgaggagaccaagttcgtcaaccccgaggacgtcgcccgcctcatcttctccaagatgaaggagaccgcccactccgtcctcggctccgacgccaacgacgtcgtcatcaccgtccccttcgacttcggcgagaagcagaagaacgccctcggcgaggccgcccgcgccgccggcttcaacgtcctccgcctcatccacgagccctccgccgccctcctcgcctacggcatcggccaggactcccccaccggcaagtccaacatcctcgtcttcaagctcggcggcacctccctctccctctccgtcatggaggtcaactccggcatctaccgcgtcctctccaccaacaccgacgacaacatcggcggcgcccacttcaccgagaccctcgcccagtacctcgcctccgagttccagcgctccttcaagcacgacgtccgcggcaacgcccgcgccatgatgaagctcaccaactccgccgaggtcgccaagcactccctctccaccctcggctccgccaactgcttcctcgactccctctacgagggccaggacttcgactgcaacgtctcccgcgcccgcttcgagctcctctgctcccccctcttcaacaagtgcatcgaggccatccgcggcctcctcgaccagaacggcttcaccgccgacgacatcaacaaggtcgtcctctgcggcggctcctcccgcatccccaagctccagcagctcatcaaggacctcttccccgccgtcgagctcctcaactccatcccccccgacgaggtcatccccatcggcgccgccatcgaggccggcatcctcatcggcaaggagaacctcctcgtcgaggactccctcatgatcgagtgctccgcccgcgacatcctcgtcaagggcgtcgacgagtccggcgcctcccgcttcaccgtcctcttcccctccggcacccccctccccgcccgccgccagcacaccctccaggcccccggctccatctcctccgtctgcctcgagctctacgagtccgacggcaagaactccgccaaggaggagaccaagttcgcccaggtcgtcctccaggacctcgacaagaaggagaacggcctccgcgacatcctcgccgtcctcaccatgaagcgcgacggctccctccacgtcacctgcaccgaccaggagaccggcaagtgcgaggccatctccatcgagatcgcctcctga

SEQ ID NO: 7685 - RNA, 1530 nt, synthetic construct
  misc_feature 1..1530: note = derived and/or modified sequence opt3 fromHSP60__Homo_sapiens__AAI19691
  source 1..1530: mol_type = other RNA
atggccgctatcggcgtgcacctggggtgcaccagcgcatgtgtcgccgtttacaaggacggtagagcgggagtggtagctaacgatgccggcgacagggtgacacccgcagtcgtggcctattccgagaatgaagagattgttgggctcgctgcaaaacagtctcggatacgcaacatctcaaatactgtgatgaaggtcaaacaaattcttggacgaagtagctccgatcctcaggcccagaagtacatcgctgaatctaaatgcctggtgattgagaagaacggcaagttgcgttatgaaatcgacacgggtgaggagaccaaattcgtaaatccagaagatgttgccagattaatattttcgaagatgaaagagacagcgcattcagtgctggggagcgacgcaaacgatgtcgtgatcactgtgccgttcgactttggagaaaagcagaaaaatgccctaggcgaggctgccagggcagctggcttcaacgtcctccggctgattcacgagcccagtgccgcgcttctggcctacgggatcggacaagattcccctaccggtaagtctaatattttggtttttaagctcggcgggacaagcctgtccctgtcagtgatggaagtaaacagtggaatctatcgcgtgctcagcaccaatactgacgataacataggcggtgcacatttcacagagaccttagctcagtacctggcctctgaatttcagagatccttcaaacacgacgtcagggggaatgctcgggccatgatgaagctgacgaactcagcagaggtggccaaacatagcttgagtactctgggatctgctaattgttttctagattccctctatgaaggccaggacttcgactgcaacgttagccgcgcgcgatttgagctgctttgttcgccactgttcaacaagtgcattgaggcaatcagaggcttgctcgatcaaaatgggtttaccgccgacgatattaacaaagtggtcctgtgtggaggttcttccaggatccccaagttacagcagctgatcaaagacctcttccctgctgtggaacttcttaattcaattccacccgatgaggtaatacctatcggcgccgcaattgaagccgggatcttgataggaaaggagaacctactggttgaagacagtctcatgattgagtgcagcgctcgggatatcctggtgaagggcgtcgacgagtccggtgcctctcgtttcacagtgctttttccaagcgggactccgctgcccgcacgcagacagcacaccttgcaagcgcctggctcaatcagttccgtctgtctcgaactgtacgagagcgatggcaaaaattctgctaaggaagagacaaaattcgcccaggtggttttacaggacctggataagaaagaaaacggactaagggacattctcgcagtgctgaccatgaagcgggacgggtcacttcacgtaacgtgcactgatcaagagacaggaaagtgtgaggccatcagtattgaaatagctagctga

SEQ ID NO: 7686 - RNA, 1530 nt, synthetic construct
  misc_feature 1..1530: note = derived and/or modified sequence opt4 fromHSP60__Homo_sapiens__AAI19691
  source 1..1530: mol_type = other RNA
atggccgccatcggcgtgcacctgggctgcaccagcgcctgcgtggccgtgtacaaggacggcagagccggcgtggtggccaacgacgccggcgacagagtgacccccgccgtggtggcctacagcgagaacgaggagatcgtgggcctggccgccaagcagagcagaatcagaaacatcagcaacaccgtgatgaaggtgaagcagatcctgggcagaagcagcagcgacccccaggcccagaagtacatcgccgagagcaagtgcctggtgatcgagaagaacggcaagctgagatacgagatcgacaccggcgaggagaccaagttcgtgaaccccgaggacgtggccagactgatcttcagcaagatgaaggagaccgcccacagcgtgctgggcagcgacgccaacgacgtggtgatcaccgtgcccttcgacttcggcgagaagcagaagaacgccctgggcgaggccgccagagccgccggcttcaacgtgctgagactgatccacgagcccagcgccgccctgctggcctacggcatcggccaggacagccccaccggcaagagcaacatcctggtgttcaagctgggcggcaccagcctgagcctgagcgtgatggaggtgaacagcggcatctacagagtgctgagcaccaacaccgacgacaacatcggcggcgcccacttcaccgagaccctggcccagtacctggccagcgagttccagagaagcttcaagcacgacgtgagaggcaacgccagagccatgatgaagctgaccaacagcgccgaggtggccaagcacagcctgagcaccctgggcagcgccaactgcttcctggacagcctgtacgagggccaggacttcgactgcaacgtgagcagagccagattcgagctgctgtgcagccccctgttcaacaagtgcatcgaggccatcagaggcctgctggaccagaacggcttcaccgccgacgacatcaacaaggtggtgctgtgcggcggcagcagcagaatccccaagctgcagcagctgatcaaggacctgttccccgccgtggagctgctgaacagcatcccccccgacgaggtgatccccatcggcgccgccatcgaggccggcatcctgatcggcaaggagaacctgctggtggaggacagcctgatgatcgagtgcagcgccagagacatcctggtgaagggcgtggacgagagcggcgccagcagattcaccgtgctgttccccagcggcacccccctgcccgccagaagacagcacaccctgcaggcccccggcagcatcagcagcgtgtgcctggagctgtacgagagcgacggcaagaacagcgccaaggaggagaccaagttcgcccaggtggtgctgcaggacctggacaagaaggagaacggcctgagagacatcctggccgtgctgaccatgaagagagacggcagcctgcacgtgacctgcaccgaccaggagaccggcaagtgcgaggccatcagcatcgagatcgccagctga

SEQ ID NO: 7687 - RNA, 1530 nt, synthetic construct
  misc_feature 1..1530: note = derived and/or modified sequence opt5 fromHSP60__Homo_sapiens__AAI19691
  source 1..1530: mol_type = other RNA
atggccgctatcggcgtccacctggggtgcaccagcgcctgtgtcgcggtttacaaggacggcagagctggagtggtggccaacgatgccggggaccgggtcacacccgctgtggttgcctattccgagaatgaagagattgtgggactcgctgccaaacagtctcgcatcagaaacattagcaatacggtcatgaaggtgaaacaaatcctgggccggtcctctagcgatcctcaggcgcagaagtacattgccgaatccaaatgccttgttatcgagaagaacgggaagctgcgctatgaaatcgacaccggagaggagacaaaattcgtgaatccggaagatgtcgctagactcatcttttctaagatgaaagagaccgcccatagcgtgctgggctccgacgctaacgatgtggtcattacagttcccttcgactttggcgaaaagcagaaaaatgcccttggggaggcggcccgggctgccggattcaacgtgctgcgcctcattcacgagcctagcgctgccctgctggcctacggcatcgggcaagattctcccaccggaaagtccaatattctcgtgtttaagctgggcgggacaagcctttctctgtccgtcatggaagtgaacagcggaatctatagagttctctctaccaatacggacgataacattggcggcgctcatttcaccgagacactggcgcagtaccttgcctccgaatttcagcggagcttcaaacacgacgtgcgcgggaatgctagagccatgatgaagctgaccaactccgccgaggtcgctaaacattctctcagcacactgggatccgccaattgttttctggatagcctctatgaaggccaggacttcgactgcaacgtgtctcgggcgcgctttgagctgctttgttcccctctgttcaacaagtgcatcgaggctatcagagggctcctggatcaaaatggatttaccgccgacgatattaacaaagttgtgctttgtggcgggagctctcggatccccaagctgcagcagctcattaaagacctgttccctgccgtcgaactgctcaatagcatcccgcccgatgaggtgattcctatcggagctgccatcgaagctggcattctgatcggcaaggagaaccttctggtcgaagactccctcatgattgagtgctctgcccgcgatatcctggtgaagggggttgacgagagcggagcgtccagattcacggtgctttttcccagcggcacacctctgcccgcccggagacagcacaccctccaagctccggggtctatttccagcgtctgtctggaactgtacgagtctgatggcaaaaattccgccaaggaagagacaaaattcgctcaggtggttctccaggacctggataagaaagaaaacggacttcgcgacatcctggccgtgctcaccatgaagcgggacgggagcctgcacgtgacctgcacagatcaagagacgggcaagtgtgaggcgatctccattgaaatcgcctcttga

SEQ ID NO: 7688 - RNA, 1530 nt, synthetic construct
  misc_feature 1..1530: note = derived and/or modified sequence opt6 fromHSP60__Homo_sapiens__AAI19691
  source 1..1530: mol_type = other RNA
atggcagcaataggagtacatctaggttgtacatcagcatgcgtagcagtttacaaagatggaagagcaggagtagtagcaaacgacgcaggtgatagagtaacaccagcggttgtagcctattcagaaaatgaagaaatagtaggattagctgcaaaacaatcaagaataagaaatataagtaacacagtaatgaaagtaaaacaaatactaggaagaagtagtagcgacccacaagcacaaaaatatatagcagaaagtaaatgtttagtcatagaaaaaaatggaaaactcagatacgaaatagatacaggagaagaaacaaaatttgtaaatcccgaagacgttgcaagactaatattcagcaaaatgaaagaaactgctcattcagtactaggatcagatgcaaatgatgtagtaataacagtaccatttgattttggagaaaaacaaaaaaatgcattaggagaagcagcaagagcagccggatttaatgtattaagattaatacacgaaccatctgcagcattactagcatatgggattggacaagattcaccaactggaaagagcaacatactagtattcaaacttggtgggactagtctatcgttaagtgtaatggaagtcaacagcggaatttacagagtactatcaacaaatacggacgacaacataggtggagcacactttacagaaacactagcacagtacttagcatccgaatttcaaaggtccttcaaacatgacgtaaggggaaatgcaagagccatgatgaaattaacaaatagcgcagaagtagcaaaacattcattatcaacattaggatctgccaattgctttctggatagtttatacgaaggacaagacttcgactgcaatgttagtagagctagatttgaattattatgtagcccattattcaataaatgtatagaagcaatacgaggactactagaccaaaatggattcacagcagatgacataaacaaggttgtattatgtggaggaagttcacgaataccaaaattacaacaactaattaaagacctattcccagcagtagagctattgaatagcataccacccgacgaagtaataccaattggagcagctatagaagcaggaatattaataggaaaagaaaacttattagtagaagacagcctaatgatagaatgcagcgctagagacatattagttaaaggcgttgatgaaagcggagcatctagatttacagtactcttcccaagcggaacacccctaccagcaagaagacaacacacattacaagccccaggatcaatatcaagtgtatgccttgaactttacgaatcagatggaaaaaacagtgcaaaggaagagacaaaatttgcacaagtagtactacaagatctagacaaaaaagaaaatggcctaagagatatattagcagtactaacaatgaagagagacggaagcctacatgtaacctgcaccgatcaagaaacaggaaaatgcgaagcaatatcaatagaaatagcatcataa

SEQ ID NO: 7689 - protein, 679 aa, synthetic construct
  REGION 1..679: note = HSP70__Homo_sapiens__P38646
MISASRAAAARLVGAAASRGPTAARHQDSWNGLSHEAFRLVSRRDYASEAIKGAVVGIDLGTTNSCVAVMEGKQAKVLENAEGARTTPSVVAFTADGERLVGMPAKRQAVTNPNNTFYATKRLIGRRYDDPEVQKDIKNVPFKIVRASNGDAWVEAHGKLYSPSQIGAFVLMKMKETAENYLGHTAKNAVITVPAYFNDSQRQATKDAGQISGLNVLRVINEPTAAALAYGLDKSEDKVIAVYDLGGGTFDISILEIQKGVFEVKSTNGDTFLGGEDFDQALLRHIVKEFKRETGVDLTKDNMALQRVREAAEKAKCELSSSVQTDINLPYLTMDSSGPKHLNMKLTRAQFEGIVTDLIRRTIAPCQKAMQDAEVSKSDIGEVILVGGMTRMPKVQQTVQDLFGRAPSKAVNPDEAVAIGAAIQGGVLAGDVTDVLLLDVTPLSLGIETLGGVFTKLINRNTTIPTKKSQVFSTAADGQTQVEIKVCQGEREMAGDNKLLGQFTLIGIPPAPRGVPQIEVTFDIDANGIVHVSAKDKGTGREQQIVIQSSGGLSKDDIENMVKNAEKYAEEDRRKKERVEAVNMAEGIIHDTETKMEEFKDQLPADECNKLKEEISKMRELLARKDSETGENIRQAASSLQQASLKLFEMAYKKMASEREGSGSSGTGEQKEDQKEEKQ

SEQ ID NO: 7690 - RNA, 2040 nt, synthetic construct
  misc_feature 1..2040: note = HSP70__Homo_sapiens__ABF50973
  source 1..2040: mol_type = other RNA
atgataagtgccagccgagctgcagcagcccgtctcgtgggcgccgcagcctcccggggccctacggccgcccgccaccaggatagctggaatggccttagtcatgaggcttttagacttgtttcaaggcgggattatgcatcagaagcaatcaagggagcagttgttggtattgatttgggtactaccaactcctgcgtggcagttatggaaggtaaacaagcaaaggtgctggagaatgccgaaggtgccagaaccaccccttcagttgtggcctttacagcagatggtgagcgacttgttggaatgccggccaagcgacaggctgtcaccaacccaaacaatacattttatgctaccaagcgtctcattggccggcgatatgatgatcctgaagtacagaaagacattaaaaatgttccctttaaaattgtccgtgcctccaatggtgatgcctgggttgaggctcatgggaaattgtattctccgagtcagattggagcatttgtgttgatgaagatgaaagagactgcagaaaattacttggggcacacagcaaaaaatgctgtgatcacagtcccagcttatttcaatgactcgcagagacaggccactaaagatgctggccagatatctggactgaatgtgcttcgggtgattaatgagcccacagctgctgctcttgcctatggtctagacaaatcagaagacaaagtcattgctgtatatgatttaggtggtggaacttttgatatttctatcctggaaattcagaaaggagtatttgaggtgaaatccacaaatggggataccttcttaggtggggaagactttgaccaggccttgctacggcacattgtgaaggagttcaagagagagacaggggttgatttgactaaagacaacatggcacttcagagggtacgggaagctgctgaaaaggctaaatgtgaactctcctcatctgtgcagactgacatcaatttgccctatcttacaatggattcttctggacccaagcatttgaatatgaagttgacccgtgctcaatttgaagggattgtcactgatctaatcagaaggactatcgctccatgccaaaaagctatgcaagatgcagaagtcagcaagagtgacataggagaagtgattcttgtgggtggcatgactaggatgcccaaggttcagcagactgtacaggatctttttggcagagccccaagtaaagctgtcaatcctgatgaggctgtggccattggagctgccattcagggaggtgtgttggccggcgatgtcacggatgtgctgctccttgatgtcactcccctgtctctgggtattgaaactctaggaggtgtctttaccaaacttattaataggaataccactattccaaccaagaagagccaggtattctctactgccgctgatggtcaaacgcaagtggaaattaaagtgtgtcagggtgaaagagagatggctggagacaacaaactccttggacagtttactttgattggaattccaccagcccctcgtggagttcctcagattgaagttacatttgacattgatgccaatgggatagtacatgtttctgctaaagataaaggcacaggacgtgagcagcagattgtaatccagtcttctggtggattaagcaaagatgatattgaaaatatggttaaaaatgcagagaaatatgctgaagaagaccggcgaaagaaggaacgagttgaagcagttaatatggctgaaggaatcattcacgacacagaaaccaagatggaagaattcaaggaccaattacctgctgatgagtgcaacaagctgaaagaagagatttccaaaatgagggagctcctggctagaaaagacagcgaaacaggagaaaatattagacaggcagcatcctctcttcagcaggcatcattgaagctgttcgaaatggcatacaaaaagatggcatctgagcgagaaggctctggaagttctggcactggggaacaaaaggaagatcaaaaggaggaaaaacagtaa

SEQ ID NO: 7691 - RNA, 2040 nt, synthetic construct
  misc_feature 1..2040: note = derived and/or modified sequence opt1 fromHSP70__Homo_sapiens__ABF50973
  source 1..2040: mol_type = other RNA
atgatcagcgcctcccgcgccgcggccgcccggctggtgggcgccgccgcgagccgcgggcccaccgccgcccggcaccaggactcctggaacggcctcagccacgaggccttccgcctggtctcccggcgcgactacgcgagcgaggccatcaagggggccgtggtgggcatcgacctggggaccacgaactcctgcgtcgccgtgatggagggcaagcaggccaaggtgctcgagaacgcggagggcgcccggaccaccccgagcgtcgtggccttcaccgccgacggggagcgcctggtgggcatgcccgccaagcggcaggcggtcacgaaccccaacaacaccttctacgccaccaagcgcctgatcgggcggcgctacgacgaccccgaggtgcagaaggacatcaagaacgtgccgttcaagatcgtccgggcctccaacggcgacgcctgggtggaggcccacgggaagctctacagcccctcccagatcggcgcgttcgtgctgatgaagatgaaggagaccgccgagaactacctgggccacacggccaagaacgccgtcatcaccgtgcccgcctacttcaacgacagccagcgccaggcgaccaaggacgccgggcagatctccggcctcaacgtgctgcgggtcatcaacgagcccaccgccgccgcgctggcctacgggctcgacaagagcgaggacaaggtgatcgccgtgtacgacctgggcggcgggacgttcgacatctccatcctggagatccagaagggcgtcttcgaggtcaagagcaccaacggggacaccttcctcggcggggaggacttcgaccaggccctgctgcgccacatcgtgaaggagttcaagcgggagaccggcgtggacctcacgaaggacaacatggccctgcagcgcgtgcgggaggcggccgagaaggccaagtgcgagctgtccagctccgtccagaccgacatcaacctcccgtacctgaccatggacagcagcggccccaagcacctgaacatgaagctcacccgcgcccagttcgaggggatcgtgacggacctgatccggcgcaccatcgccccctgccagaaggcgatgcaggacgccgaggtgtccaagagcgacatcggcgaggtcatcctggtcgggggcatgacccgcatgcccaaggtgcagcagaccgtgcaggacctcttcgggcgggccccgtccaaggccgtgaaccccgacgaggccgtggcgatcggcgccgccatccagggcggggtcctggccggcgacgtgacggacgtgctgctcctggacgtcacgcccctgagcctcgggatcgagaccctgggcggggtgttcaccaagctgatcaaccgcaacaccaccatccccaccaagaagtcccaggtgttcagcaccgcggccgacggccagacgcaggtcgagatcaaggtgtgccagggcgagcgggagatggccggggacaacaagctcctgggccagttcaccctgatcgggatcccgcccgcgccccgcggcgtgccccagatcgaggtcaccttcgacatcgacgccaacggcatcgtgcacgtgtccgccaaggacaaggggaccggccgggagcagcagatcgtcatccagagctccgggggcctcagcaaggacgacatcgagaacatggtgaagaacgccgagaagtacgccgaggaggaccgccggaagaaggagcgcgtggaggccgtcaacatggccgaggggatcatccacgacacggagaccaagatggaggagttcaaggaccagctgccggcggacgagtgcaacaagctgaaggaggagatctccaagatgcgggagctcctggcccgcaaggacagcgagaccggcgagaacatccggcaggccgcctccagcctgcagcaggcctccctcaagctgttcgagatggcgtacaagaagatggccagcgagcgcgagggctccgggagctccggcaccggggagcagaaggaggaccagaaggaggagaagcagtga

SEQ ID NO: 7692 - RNA, 2040 nt, synthetic construct
  misc_feature 1..2040: note = derived and/or modified sequence opt2 fromHSP70__Homo_sapiens__ABF50973
  source 1..2040: mol_type = other RNA
atgatctccgcctcccgcgccgccgccgcccgcctcgtcggcgccgccgcctcccgcggccccaccgccgcccgccaccaggactcctggaacggcctctcccacgaggccttccgcctcgtctcccgccgcgactacgcctccgaggccatcaagggcgccgtcgtcggcatcgacctcggcaccaccaactcctgcgtcgccgtcatggagggcaagcaggccaaggtcctcgagaacgccgagggcgcccgcaccaccccctccgtcgtcgccttcaccgccgacggcgagcgcctcgtcggcatgcccgccaagcgccaggccgtcaccaaccccaacaacaccttctacgccaccaagcgcctcatcggccgccgctacgacgaccccgaggtccagaaggacatcaagaacgtccccttcaagatcgtccgcgcctccaacggcgacgcctgggtcgaggcccacggcaagctctactccccctcccagatcggcgccttcgtcctcatgaagatgaaggagaccgccgagaactacctcggccacaccgccaagaacgccgtcatcaccgtccccgcctacttcaacgactcccagcgccaggccaccaaggacgccggccagatctccggcctcaacgtcctccgcgtcatcaacgagcccaccgccgccgccctcgcctacggcctcgacaagtccgaggacaaggtcatcgccgtctacgacctcggcggcggcaccttcgacatctccatcctcgagatccagaagggcgtcttcgaggtcaagtccaccaacggcgacaccttcctcggcggcgaggacttcgaccaggccctcctccgccacatcgtcaaggagttcaagcgcgagaccggcgtcgacctcaccaaggacaacatggccctccagcgcgtccgcgaggccgccgagaaggccaagtgcgagctctcctcctccgtccagaccgacatcaacctcccctacctcaccatggactcctccggccccaagcacctcaacatgaagctcacccgcgcccagttcgagggcatcgtcaccgacctcatccgccgcaccatcgccccctgccagaaggccatgcaggacgccgaggtctccaagtccgacatcggcgaggtcatcctcgtcggcggcatgacccgcatgcccaaggtccagcagaccgtccaggacctcttcggccgcgccccctccaaggccgtcaaccccgacgaggccgtcgccatcggcgccgccatccagggcggcgtcctcgccggcgacgtcaccgacgtcctcctcctcgacgtcacccccctctccctcggcatcgagaccctcggcggcgtcttcaccaagctcatcaaccgcaacaccaccatccccaccaagaagtcccaggtcttctccaccgccgccgacggccagacccaggtcgagatcaaggtctgccagggcgagcgcgagatggccggcgacaacaagctcctcggccagttcaccctcatcggcatcccccccgccccccgcggcgtcccccagatcgaggtcaccttcgacatcgacgccaacggcatcgtccacgtctccgccaaggacaagggcaccggccgcgagcagcagatcgtcatccagtcctccggcggcctctccaaggacgacatcgagaacatggtcaagaacgccgagaagtacgccgaggaggaccgccgcaagaaggagcgcgtcgaggccgtcaacatggccgagggcatcatccacgacaccgagaccaagatggaggagttcaaggaccagctccccgccgacgagtgcaacaagctcaaggaggagatctccaagatgcgcgagctcctcgcccgcaaggactccgagaccggcgagaacatccgccaggccgcctcctccctccagcaggcctccctcaagctcttcgagatggcctacaagaagatggcctccgagcgcgagggctccggctcctccggcaccggcgagcagaaggaggaccagaaggaggagaagcagtga

SEQ ID NO: 7693 - RNA, 2040 nt, synthetic construct
  misc_feature 1..2040: note = derived and/or modified sequence opt3 fromHSP70__Homo_sapiens__ABF50973
  source 1..2040: mol_type = other RNA
atgatcagcgcctccagagctgcagccgcgaggctggtgggcgctgccgcatctcgggggcccaccgccgctcgccaccaggactcatggaacggactcagtcatgaggcattccgacttgtcagccgtagagattacgcctccgaagctattaagggtgccgttgtgggcatagacctggggacaactaattcttgcgtagcggtgatggagggaaaacaagcaaaggtcttggaaaacgccgagggcgctaggacgaccccttcggtggttgcctttacagcagatggtgaacggttagtggggatgccagctaaacgccaggccgtcactaatccgaacaataccttctatgcgacaaagagactgatcggaaggcggtacgacgatcccgaggtgcagaaagacattaagaacgtaccttttaagatcgttcgcgcctcaaatggcgatgcatgggtggaggctcacggcaaactatatagcccaagtcagattggggccttcgtcctcatgaagatgaaagaaaccgctgagaactacctgggacatactgccaagaatgcagtgatcacagtgcccgcctattttaacgactcccaacgacaggctaccaaagatgcgggtcagatatctggccttaatgtcctgagagttatcaacgaacctacggcagccgctttggcctacgggctcgacaagagcgaggataaggtgattgcagtatatgacctgggaggcggtactttcgatatctccattctggagatccagaaaggggtgtttgaagtcaagtcaaccaatggagacacattcctcggcggcgaggactttgatcaagccttactgaggcacatagtgaaagagttcaagcgggaaactggggttgaccttaccaaagataacatggctttgcagcgtgtgcgcgaagccgcagagaaggcgaaatgtgagctgagtagctctgtccagacagacattaatctaccatacctcaccatggattcctcaggacccaagcatctgaacatgaagttgacgagagctcagtttgaaggtatcgtgactgacctgattaggcggacaatcgccccttgccaaaaagcaatgcaggatgccgaggtaagcaagagtgacatcggcgaagttattttggtcgggggaatgacccgaatgccaaaagtgcagcaaactgtgcaggatctcttcggccgcgctccgtctaaggccgtcaaccccgacgaggcagtggctataggtgccgcgatccaagggggcgttctggccggagatgtgacagacgtattactgctcgacgtcacccctctttccctgggcattgaaacgcttgggggagtgtttaccaaactaatcaatagaaacacaactataccaaccaaaaagagccaggttttctcgacagctgcagatggtcagactcaggtggagattaaggtctgtcagggcgagagggaaatggccggggacaataagctgctcggacagttcaccctgatcggcattccccctgctccacggggtgtgccccaaatcgaggtaacatttgatatcgacgccaacgggattgtgcacgtttctgcaaaagataagggcaccggacgcgaacagcagatagtcatccagtcctcaggcgggcttagtaaagacgatattgagaatatggtgaagaacgcggaaaagtacgccgaggaggacagaaggaaaaaggaacgtgtggaggctgtcaatatggccgaaggaatcatccacgatactgagacgaaaatggaggagttcaaggaccaactgccggcagatgaatgcaacaaattgaaggaagagattagcaagatgcgggaactcctggctcgaaaagactccgagacaggtgagaatataagacaggccgcatctagcttacagcaggcctcactgaagctatttgaaatggcttataaaaagatggcgagtgagagggaaggctccgggagctctggaaccggcgagcaaaaagaagatcagaaggaggagaaacagtga

SEQ ID NO: 7694 - RNA, 2040 nt, synthetic construct
  misc_feature 1..2040: note = derived and/or modified sequence opt4 fromHSP70__Homo_sapiens__ABF50973
  source 1..2040: mol_type = other RNA
atgatcagcgccagcagagccgccgccgccagactggtgggcgccgccgccagcagaggccccaccgccgccagacaccaggacagctggaacggcctgagccacgaggccttcagactggtgagcagaagagactacgccagcgaggccatcaagggcgccgtggtgggcatcgacctgggcaccaccaacagctgcgtggccgtgatggagggcaagcaggccaaggtgctggagaacgccgagggcgccagaaccacccccagcgtggtggccttcaccgccgacggcgagagactggtgggcatgcccgccaagagacaggccgtgaccaaccccaacaacaccttctacgccaccaagagactgatcggcagaagatacgacgaccccgaggtgcagaaggacatcaagaacgtgcccttcaagatcgtgagagccagcaacggcgacgcctgggtggaggcccacggcaagctgtacagccccagccagatcggcgccttcgtgctgatgaagatgaaggagaccgccgagaactacctgggccacaccgccaagaacgccgtgatcaccgtgcccgcctacttcaacgacagccagagacaggccaccaaggacgccggccagatcagcggcctgaacgtgctgagagtgatcaacgagcccaccgccgccgccctggcctacggcctggacaagagcgaggacaaggtgatcgccgtgtacgacctgggcggcggcaccttcgacatcagcatcctggagatccagaagggcgtgttcgaggtgaagagcaccaacggcgacaccttcctgggcggcgaggacttcgaccaggccctgctgagacacatcgtgaaggagttcaagagagagaccggcgtggacctgaccaaggacaacatggccctgcagagagtgagagaggccgccgagaaggccaagtgcgagctgagcagcagcgtgcagaccgacatcaacctgccctacctgaccatggacagcagcggccccaagcacctgaacatgaagctgaccagagcccagttcgagggcatcgtgaccgacctgatcagaagaaccatcgccccctgccagaaggccatgcaggacgccgaggtgagcaagagcgacatcggcgaggtgatcctggtgggcggcatgaccagaatgcccaaggtgcagcagaccgtgcaggacctgttcggcagagcccccagcaaggccgtgaaccccgacgaggccgtggccatcggcgccgccatccagggcggcgtgctggccggcgacgtgaccgacgtgctgctgctggacgtgacccccctgagcctgggcatcgagaccctgggcggcgtgttcaccaagctgatcaacagaaacaccaccatccccaccaagaagagccaggtgttcagcaccgccgccgacggccagacccaggtggagatcaaggtgtgccagggcgagagagagatggccggcgacaacaagctgctgggccagttcaccctgatcggcatcccccccgcccccagaggcgtgccccagatcgaggtgaccttcgacatcgacgccaacggcatcgtgcacgtgagcgccaaggacaagggcaccggcagagagcagcagatcgtgatccagagcagcggcggcctgagcaaggacgacatcgagaacatggtgaagaacgccgagaagtacgccgaggaggacagaagaaagaaggagagagtggaggccgtgaacatggccgagggcatcatccacgacaccgagaccaagatggaggagttcaaggaccagctgcccgccgacgagtgcaacaagctgaaggaggagatcagcaagatgagagagctgctggccagaaaggacagcgagaccggcgagaacatcagacaggccgccagcagcctgcagcaggccagcctgaagctgttcgagatggcctacaagaagatggccagcgagagagagggcagcggcagcagcggcaccggcgagcagaaggaggaccagaaggaggagaagcagtga

SEQ ID NO: 7695 - RNA, 2040 nt, synthetic construct
  misc_feature 1..2040: note = derived and/or modified sequence opt5 fromHSP70__Homo_sapiens__ABF50973
  source 1..2040: mol_type = other RNA
atgatcagcgcctccagagctgccgcggctcggctggtgggcgccgccgcttctcgcgggcccaccgccgctagacaccaggacagctggaacggactctcccatgaggccttccggctggtctctcgcagagattacgcgagcgaagccattaagggcgctgttgtggggatcgaccttggaacaacgaatagctgcgtggccgtcatggagggcaaacaagctaaggtgctggaaaacgccgagggggcgcggaccacaccttctgttgtggcctttaccgctgatggagaacgcctcgtcggcatgccggccaaaagacaggctgtgacaaatcccaacaataccttctatgccacaaagcggctgattggccgcagatacgacgatcctgaggttcagaaagacatcaagaacgtgccctttaagattgtccgggccagcaatggggatgcttgggtggaggcgcacggaaaactttattcccctagccagatcggcgccttcgtgctgatgaagatgaaagaaaccgctgagaactacctcgggcatacggccaagaatgccgtcatcaccgttcccgcttattttaacgactctcaacgccaggccacaaaagatgcgggacagatttccggcctgaatgtgctgagagtgatcaacgaacctaccgctgccgccctcgcttacgggctggacaagagcgaggataaggtcattgccgtgtatgaccttggaggcggcacattcgatatctctattctggagatccagaaaggggtttttgaagtgaagtccaccaatggagacacgttcctcggcggggaggactttgatcaagctctgcttcggcacattgtcaaagagttcaagcgcgaaacaggagtggacctgaccaaagataacatggccctccagagagttcgggaagcggccgagaaggctaaatgtgagctgtcctcttccgtgcagacagacatcaatctgccgtacctcaccatggatagctccggccccaagcatctgaacatgaaacttaccagagcccagtttgaagggatcgtcacagacctgattcgccggacgatcgctccttgccaaaaggccatgcaggatgcggaggtgtctaagagcgacattggagaagtcatcctcgtgggcggcatgaccagaatgcccaaagttcagcaaacagtgcaggatctgttcgggcgcgccccttccaaggctgtcaaccccgacgaggccgtggctattggagccgccatccagggcggggttcttgctggagatgtgaccgacgtcctgctcctggacgtgacaccgctgagcctcggcatcgaaaccctgggcggcgtgtttacgaaacttattaatcggaacacaaccatccctaccaagaagtctcaggttttctccacagcggccgatggacaaacccaggtcgagattaaagtgtgtcagggcgagagagaaatggctggggacaataagctgctcggacagttcacactgatcggcattccccctgctccccgcggggtgccccaaatcgaggtcacgtttgatatcgacgccaacggaattgtgcacgttagcgccaaagataagggcaccgggcgggaacagcagatcgtgattcagtctagcggcggactttccaaagacgatatcgagaatatggtcaagaacgccgaaaagtacgcggaggaggacagacgcaaaaaggaacgggtggaggctgttaatatggccgaaggcattatccacgatacagagaccaaaatggaggagttcaaggaccaactgcctgccgatgaatgcaacaaactcaaggaagagatttctaagatgagagaactgctggctcgcaaagacagcgagacaggggagaatatccggcaggccgcgtccagcctccagcaggcttctctgaaactttttgaaatggcctataagaagatggcctccgagagagaaggaagcgggtcttccgggaccggagagcaaaaagaagatcagaaggaggagaaacagtga

SEQ ID NO: 7696 - RNA, 2040 nt, synthetic construct
  misc_feature 1..2040: note = derived and/or modified sequence opt6 fromHSP70__Homo_sapiens__ABF50973
  source 1..2040: mol_type = other RNA
atgatatccgcaagcagagcagcagcagcaagattagtaggtgctgcagcatcaagaggaccaacagcggcaaggcatcaagacagttggaacggattatcacatgaggcattcagattagtaagcagaagagattatgcaagcgaagctataaaaggagcagtagtagggatagatctaggaacaacaaatagctgtgtagcggtgatggaaggaaaacaagcaaaagtattagaaaacgctgaaggagcaagaacaactccaagtgtagtagcattcacagcagatggcgaaagattagtaggaatgccggcaaaaagacaagcagtgacaaatccaaataacacattttatgcaacaaaaagactaattgggaggaggtatgatgatccagaagtacaaaaagatataaaaaatgtgccgtttaaaatagtaagagccagtaacggagacgcttgggttgaagctcacggaaaattatattctccatcacaaataggggcatttgtactcatgaaaatgaaagaaactgcggaaaactatctgggccatacggcaaaaaatgcagttataacagtaccagcttacttcaatgatagccaaagacaagcaacaaaagatgcaggtcaaataagtggtttaaatgtacttcgtgtaataaatgaacccacagcggcagcactagcatacggattagataaatcagaagacaaagtaatagccgtttacgatctgggagggggaacatttgatataagcatcctagaaattcaaaaaggggtattcgaagtaaaaagtacaaatggagacacgttcctcggaggtgaagatttcgatcaagcacttctaaggcatatagtaaaagaatttaaaagagaaaccggtgttgacctaacaaaagacaatatggcgttgcaaagagtaagagaggctgcagaaaaagcaaaatgcgaactatcaagcagtgtacaaacagatataaatctgccgtatttaacaatggattcatcaggaccgaaacatttaaatatgaaacttacaagagcccaatttgaaggaatagtcacggacttaataagaaggacgatagcaccatgtcaaaaagcaatgcaagatgcagaagtaagtaaaagcgacataggagaagtcattttggtagggggtatgactagaatgccaaaagtccaacaaacagtccaagatttattcggaagagcgccaagcaaagctgtaaatccagatgaagcagtagcgataggagcagcaatacaaggaggagtattggctggagatgttactgacgtattattattggacgtgacaccattaagtttaggaatagaaacattaggaggggtatttacaaaattaataaatagaaatacaaccattcccacaaaaaaatcacaagtattcagtacagcagctgatggtcaaacacaagttgaaataaaagtatgtcaaggcgaaagagaaatggcaggtgataataaattattaggacaattcacactaataggtataccacctgctcctagaggagttcctcaaattgaagttacttttgacatagacgcaaacggaatagtacatgtaagtgcaaaagacaaaggaacaggaagagaacaacagatagtaatacaaagtagcggaggattatcaaaagacgatatagaaaatatggtcaaaaatgctgaaaaatatgcagaggaagatcgacggaaaaaagaaagggtagaagcggtgaatatggctgaaggaataatacatgatacggagacaaaaatggaggaatttaaagatcaattaccggctgacgaatgcaataaattaaaagaagaaataagcaaaatgcgagaattgctggcacgaaaagatagcgaaacaggcgaaaatattagacaagcagcaagtagcttacaacaagcatctttaaaactatttgaaatggcgtataaaaagatggcaagtgaaagagaaggaagtggaagctcaggaacgggagaacaaaaagaagatcaaaaagaagaaaaacaataa

SEQ ID NO: 7697 - protein, 732 aa, synthetic construct
  REGION 1..732: note = HSP90__Homo_sapiens__P07900
MPEETQTQDQPMEEEEVETFAFQAEIAQLMSLIINTFYSNKEIFLRELISNSSDALDKIRYESLTDPSKLDSGKELHINLIPNKQDRTLTIVDTGIGMTKADLINNLGTIAKSGTKAFMEALQAGADISMIGQFGVGFYSAYLVAEKVTVITKHNDDEQYAWESSAGGSFTVRTDTGEPMGRGTKVILHLKEDQTEYLEERRIKEIVKKHSQFIGYPITLFVEKERDKEVSDDEAEEKEDKEEEKEKEEKESEDKPEIEDVGSDEEEEKKDGDKKKKKKIKEKYIDQEELNKTKPIWTRNPDDITNEEYGEFYKSLTNDWEDHLAVKHFSVEGQLEFRALLFVPRRAPFDLFENRKKKNNIKLYVRRVFIMDNCEELIPEYLNFIRGVVDSEDLPLNISREMLQQSKILKVIRKNLVKKCLELFTELAEDKENYKKFYEQFSKNIKLGIHEDSQNRKKLSELLRYYTSASGDEMVSLKDYCTRMKENQKHIYYITGETKDQVANSAFVERLRKHGLEVIYMIEPIDEYCVQQLKEFEGKTLVSVTKEGLELPEDEEEKKKQEEKKTKFENLCKIMKDILEKKVEKVVVSNRLVTSPCCIVTSTYGWTANMERIMKAQALRDNSTMGYMAAKKHLEINPDHSIIETLRQKAEADKNDKSVKDLVILLYETALLSSGFSLEDPQTHANRIYRMIKLGLGIDEDDPTADDTSAAVTEEMPPLEGDDDTSRMEEVD

SEQ ID NO: 7698 - RNA, 2199 nt, synthetic construct
  misc_feature 1..2199: note = HSP90__Homo_sapiens__AAA63194
  source 1..2199: mol_type = other RNA
atgcctgaggaaacccagacccaagaccaaccgatggaggaggaggaggttgagacgttcgcctttcaggcagaaattgcccagttgatgtcattgatcatcaatactttctactcgaacaaagagatctttctgagagagctcatttcaaattcatcagatgcattggacaaaatccggtatgaaagcttgacagatcccagtaaattagactctgggaaagagctgcatattaaccttataccgaacaaacaagatcgaactctcactattgtggatactggaattggaatgaccaaggctgacttgatcaataaccttggtactatcgccaagtctgggaccaaagcgttcatggaagctttgcaggctggtgcagatatctctatgattggccagttcggtgttggtttttattctgcttatttggttgctgagaaagtaactgtgatcaccaaacataacgatgatgagcagtacgcttgggagtcctcagcagggggatcattcacagtgaggacagacacaggtgaacctatgggtcgtggaacaaaagttatcctacacctgaaagaagaccaaactgagtacttggaggaacgaagaataaaggagattgtgaagaaacattctcagtttattggatatcccattactctttttgtggagaaggaacgtgataaagaagtaagcgatgatgaggctgaagaaaaggaagacaaagaagaagaaaaagaaaaagaagagaaagagtcggaagacaaacctgaaattgaagatgttggttctgatgaggaagaagaaaagaaggatggtgacaagaagaagaagaagaagattaaggaaaagtacatcgatcaagaagagctcaacaaaacaaagcccatctggaccagaaatcccgacgatattactaatgaggagtacggagaattctataagagcttgaccaatgactgggaagatcacttggcagtgaagcatttttcagttgaaggacagttggaattcagagcccttctatttgtcccacgacgtgctccttttgatctgtttgaaaacagaaagaaaaagaacaacatcaaattgtatgtacgcagagttttcatcatggataactgtgaggagctaatccctgaatatctgaacttcattagaggggtggtagactcggaggatctccctctaaacatatcccgtgagatgttgcaacaaagcaaaattttgaaagttatcaggaagaatttggtcaaaaaatgcttagaactctttactgaactggcggaagataaagagaactacaagaaattctatgagcagttctctaaaaacataaagcttggaatacacgaagactctcaaaatcggaagaagctttcagagctgttaaggtactacacatctgcctctggtgatgagatggtttctctcaaggactactgcaccagaatgaaggagaaccagaaacatatctattatatcacaggtgagaccaaggaccaggtagctaactcagcctttgtggaacgtcttcggaaacatggcttagaagtgatctatatgattgagcccattgatgagtactgtgtccaacagctgaaggaatttgaggggaagactttagtgtcagtcaccaaagaaggcctggaacttccagaggatgaagaagagaaaaagaagcaggaagagaaaaaaacaaagtttgagaacctctgcaaaatcatgaaagacatattggagaaaaaagttgaaaaggtggttgtgtcaaaccgattggtgacatctccatgctgtattgtcacaagcacatatggctggacagcaaacatggagagaatcatgaaagctcaagccctaagagacaactcaacaatgggttacatggcagcaaagaaacacctggagataaaccctgaccattccattattgagaccttaaggcaaaaggcagaggctgataagaacgacaagtctgtgaaggatctggtcatcttgctttatgaaactgcgctcctgtcttctggcttcagtctggaagatccccagacacatgctaacaggatctacaggatgatcaaacttggtctgggtattgatgaagatgaccctactgctgatgataccagtgctgctgtaactgaagaaatgccaccccttgaaggagatgacgacacatcacgcatggaagaagtagactaa

SEQ ID NO: 7699 - RNA, 2199 nt, synthetic construct
  misc_feature 1..2199: note = derived and/or modified sequence opt1 fromHSP90__Homo_sapiens__AAA63194
  source 1..2199: mol_type = other RNA
atgcccgaggagacccagacccaggaccagcccatggaggaggaggaggtggagacgttcgccttccaggccgagatcgcgcagctgatgagcctcatcatcaacaccttctactccaacaaggagatcttcctgcgcgagctgatcagcaactccagcgacgccctcgacaagatccggtacgagtccctgaccgaccccagcaagctggactccggcaaggagctccacatcaacctgatccccaacaagcaggaccgcaccctgacgatcgtcgacaccgggatcggcatgaccaaggccgacctcatcaacaacctggggaccatcgccaagagcggcacgaaggccttcatggaggcgctgcaggccggggccgacatctccatgatcggccagttcggcgtggggttctacagcgcctacctcgtggcggagaaggtcaccgtgatcaccaagcacaacgacgacgagcagtacgcctgggagtccagcgccggcgggtccttcaccgtgcggacggacaccggcgagcccatggggcgcggcaccaaggtcatcctgcacctgaaggaggaccagaccgagtacctcgaggagcggcgcatcaaggagatcgtgaagaagcacagccagttcatcggctacccgatcacgctgttcgtggagaaggagcgggacaaggaggtctccgacgacgaggccgaggagaaggaggacaaggaggaggagaaggagaaggaggagaaggagagcgaggacaagcccgagatcgaggacgtggggtccgacgaggaggaggagaagaaggacggcgacaagaagaagaagaagaagatcaaggagaagtacatcgaccaggaggagctgaacaagaccaagcccatctggacccgcaaccccgacgacatcaccaacgaggagtacggggagttctacaagagcctcacgaacgactgggaggaccacctggccgtgaagcacttctccgtcgagggccagctggagttccgggcgctcctgttcgtgccgcgccgggcccccttcgacctgttcgagaaccgcaagaagaagaacaacatcaagctctacgtgcggcgcgtcttcatcatggacaactgcgaggagctgatccccgagtacctgaacttcatccggggcgtggtggacagcgaggacctccccctgaacatcagccgcgagatgctgcagcagtccaagatcctcaaggtcatccggaagaacctggtgaagaagtgcctggagctgttcaccgagctcgccgaggacaaggagaactacaagaagttctacgagcagttcagcaagaacatcaagctggggatccacgaggactcccagaaccgcaagaagctcagcgagctgctgcggtactacacctccgccagcggcgacgagatggtgtccctcaaggactactgcacccgcatgaaggagaaccagaagcacatctactacatcacgggggagaccaaggaccaggtcgccaacagcgcgttcgtggagcggctgcgcaagcacggcctggaggtgatctacatgatcgagccgatcgacgagtactgcgtccagcagctcaaggagttcgaggggaagaccctggtgtccgtcaccaaggagggcctggagctccccgaggacgaggaggagaagaagaagcaggaggagaagaagacgaagttcgagaacctgtgcaagatcatgaaggacatcctggagaagaaggtggagaaggtggtcgtgagcaaccgcctcgtgacctccccctgctgcatcgtcaccagcacctacggctggacggccaacatggagcggatcatgaaggcccaggccctgcgcgacaactccaccatggggtacatggccgcgaagaagcacctggagatcaaccccgaccacagcatcatcgagaccctgcggcagaaggccgaggccgacaagaacgacaagtccgtgaaggacctcgtgatcctgctgtacgagaccgccctcctgagctccggcttcagcctggaggacccgcagacgcacgccaaccgcatctaccggatgatcaagctcgggctgggcatcgacgaggacgaccccaccgcggacgacacctccgccgccgtcaccgaggagatgccgcccctggagggggacgacgacaccagccgcatggaggaggtggactga

SEQ ID NO: 7700 - RNA, 2199 nt, synthetic construct
  misc_feature 1..2199: note = derived and/or modified sequence opt2 fromHSP90__Homo_sapiens__AAA63194
  source 1..2199: mol_type = other RNA
atgcccgaggagacccagacccaggaccagcccatggaggaggaggaggtcgagaccttcgccttccaggccgagatcgcccagctcatgtccctcatcatcaacaccttctactccaacaaggagatcttcctccgcgagctcatctccaactcctccgacgccctcgacaagatccgctacgagtccctcaccgacccctccaagctcgactccggcaaggagctccacatcaacctcatccccaacaagcaggaccgcaccctcaccatcgtcgacaccggcatcggcatgaccaaggccgacctcatcaacaacctcggcaccatcgccaagtccggcaccaaggccttcatggaggccctccaggccggcgccgacatctccatgatcggccagttcggcgtcggcttctactccgcctacctcgtcgccgagaaggtcaccgtcatcaccaagcacaacgacgacgagcagtacgcctgggagtcctccgccggcggctccttcaccgtccgcaccgacaccggcgagcccatgggccgcggcaccaaggtcatcctccacctcaaggaggaccagaccgagtacctcgaggagcgccgcatcaaggagatcgtcaagaagcactcccagttcatcggctaccccatcaccctcttcgtcgagaaggagcgcgacaaggaggtctccgacgacgaggccgaggagaaggaggacaaggaggaggagaaggagaaggaggagaaggagtccgaggacaagcccgagatcgaggacgtcggctccgacgaggaggaggagaagaaggacggcgacaagaagaagaagaagaagatcaaggagaagtacatcgaccaggaggagctcaacaagaccaagcccatctggacccgcaaccccgacgacatcaccaacgaggagtacggcgagttctacaagtccctcaccaacgactgggaggaccacctcgccgtcaagcacttctccgtcgagggccagctcgagttccgcgccctcctcttcgtcccccgccgcgcccccttcgacctcttcgagaaccgcaagaagaagaacaacatcaagctctacgtccgccgcgtcttcatcatggacaactgcgaggagctcatccccgagtacctcaacttcatccgcggcgtcgtcgactccgaggacctccccctcaacatctcccgcgagatgctccagcagtccaagatcctcaaggtcatccgcaagaacctcgtcaagaagtgcctcgagctcttcaccgagctcgccgaggacaaggagaactacaagaagttctacgagcagttctccaagaacatcaagctcggcatccacgaggactcccagaaccgcaagaagctctccgagctcctccgctactacacctccgcctccggcgacgagatggtctccctcaaggactactgcacccgcatgaaggagaaccagaagcacatctactacatcaccggcgagaccaaggaccaggtcgccaactccgccttcgtcgagcgcctccgcaagcacggcctcgaggtcatctacatgatcgagcccatcgacgagtactgcgtccagcagctcaaggagttcgagggcaagaccctcgtctccgtcaccaaggagggcctcgagctccccgaggacgaggaggagaagaagaagcaggaggagaagaagaccaagttcgagaacctctgcaagatcatgaaggacatcctcgagaagaaggtcgagaaggtcgtcgtctccaaccgcctcgtcacctccccctgctgcatcgtcacctccacctacggctggaccgccaacatggagcgcatcatgaaggcccaggccctccgcgacaactccaccatgggctacatggccgccaagaagcacctcgagatcaaccccgaccactccatcatcgagaccctccgccagaaggccgaggccgacaagaacgacaagtccgtcaaggacctcgtcatcctcctctacgagaccgccctcctctcctccggcttctccctcgaggacccccagacccacgccaaccgcatctaccgcatgatcaagctcggcctcggcatcgacgaggacgaccccaccgccgacgacacctccgccgccgtcaccgaggagatgccccccctcgagggcgacgacgacacctcccgcatggaggaggtcgactga

SEQ ID NO: 7701 - RNA, 2199 nt, synthetic construct
  misc_feature 1..2199: note = derived and/or modified sequence opt3 fromHSP90__Homo_sapiens__AAA63194
  source 1..2199: mol_type = other RNA
atgcccgaggaaacccagacacaagaccagcctatggaggaagaggaagtggagactttcgcctttcaggctgagatcgcacagctgatgagcctcattataaacacgttctactccaataaggaaatctttcttagagagctgatttctaactcaagtgatgccttggacaaaatcaggtatgagagcttaaccgatccatccaagctggactctggcaaagagctacacattaatctcatcccgaacaagcaagatcggacactgactatagtcgacaccgggatcggaatgacaaaagcggatcttattaataacctgggtaccatcgctaagtcgggcactaaggccttcatggaggcattgcaggccggggctgacatttcaatgatcggacagtttggcgttggtttctacagcgcatatctcgtggccgaaaaagtaacagtgataaccaagcataatgatgacgagcagtacgcttgggaaagttccgccgggggatcttttacggtccgcactgataccggcgagcccatgggccgagggacaaaagtgattctgcacctgaaggaagaccaaactgagtatctcgaggaacgtagaatcaaagagattgttaagaagcatagccagttcatcggataccctatcaccttatttgtggaaaaagagagggataaggaagtctccgacgacgaggcggaggaaaaagaggataaggaagaggaaaaagagaaggaggaaaaagagtcagaagacaagccagagattgaggatgtgggtagtgacgaagaggaagagaagaaagatggcgacaagaaaaagaaaaagaagataaaagaaaagtatatcgatcaggaggagctgaacaaaacaaagcccatttggacccggaatcctgacgatatcacgaacgaagagtacggggagttctacaaaagccttactaatgactgggaagatcacttggcagtaaagcatttttctgttgaaggacagctggagttccgcgccctactctttgtgccaagaagggctcccttcgacctgttcgagaaccggaagaaaaagaataacataaaactttatgtccgccgagtgtttattatggacaattgcgaagaactgatccctgaatacttgaacttcatcagaggcgtggtcgattccgaggacctcccactgaacatttcaagggaaatgttacaacagagcaagatcctgaaagttattcggaagaatctcgtgaagaaatgtcttgagctgtttacagagttggccgaagataaggagaactataaaaagttctacgaacagtttagtaaaaatataaagctaggtatccacgaggactctcaaaaccgtaaaaagctgtccgagctcctgcgctattacaccagcgcatcgggggatgaaatggtatctcttaaggactattgcactagaatgaaagagaatcagaagcacatttactacatcacaggagaaaccaaagatcaggtggctaactccgccttcgtcgagaggctgcggaagcatggcttggaagtgatctatatgattgagccgatagacgagtactgtgttcagcaactcaaagaatttgagggcaagacgctggtgtcagtcaccaaggaagggttagagctgcccgaagatgaggaggagaaaaagaaacaggaagaaaagaaaacaaagttcgagaatctatgcaagatcatgaaagacattctcgaaaagaaagtggagaaggtagttgtgagtaaccgactggtcactagcccttgttgcatcgtgacctccacatatggatggactgcgaatatggagcgcattatgaaagcccaggcacttagagataactctaccatgggttacatggctgccaagaagcacttggaaatcaatccagaccatagcataatcgagacactgaggcagaaagctgaagccgataagaacgacaaatcagtcaaggacctcgtgattctgctttatgagaccgcactgttgagttccggctttagcctcgaggatccccaaactcacgccaatcggatctaccgcatgattaaactggggttaggaatcgacgaagatgaccctacggctgatgacacatctgcggcagttaccgaggaaatgccacccctggagggcgatgacgatacttcaagaatggaagaggtggactga

SEQ ID NO: 7702 - RNA, 2199 nt, synthetic construct
  misc_feature 1..2199: note = derived and/or modified sequence opt4 fromHSP90__Homo_sapiens__AAA63194
  source 1..2199: mol_type = other RNA
atgcccgaggagacccagacccaggaccagcccatggaggaggaggaggtggagaccttcgccttccaggccgagatcgcccagctgatgagcctgatcatcaacaccttctacagcaacaaggagatcttcctgagagagctgatcagcaacagcagcgacgccctggacaagatcagatacgagagcctgaccgaccccagcaagctggacagcggcaaggagctgcacatcaacctgatccccaacaagcaggacagaaccctgaccatcgtggacaccggcatcggcatgaccaaggccgacctgatcaacaacctgggcaccatcgccaagagcggcaccaaggccttcatggaggccctgcaggccggcgccgacatcagcatgatcggccagttcggcgtgggcttctacagcgcctacctggtggccgagaaggtgaccgtgatcaccaagcacaacgacgacgagcagtacgcctgggagagcagcgccggcggcagcttcaccgtgagaaccgacaccggcgagcccatgggcagaggcaccaaggtgatcctgcacctgaaggaggaccagaccgagtacctggaggagagaagaatcaaggagatcgtgaagaagcacagccagttcatcggctaccccatcaccctgttcgtggagaaggagagagacaaggaggtgagcgacgacgaggccgaggagaaggaggacaaggaggaggagaaggagaaggaggagaaggagagcgaggacaagcccgagatcgaggacgtgggcagcgacgaggaggaggagaagaaggacggcgacaagaagaagaagaagaagatcaaggagaagtacatcgaccaggaggagctgaacaagaccaagcccatctggaccagaaaccccgacgacatcaccaacgaggagtacggcgagttctacaagagcctgaccaacgactgggaggaccacctggccgtgaagcacttcagcgtggagggccagctggagttcagagccctgctgttcgtgcccagaagagcccccttcgacctgttcgagaacagaaagaagaagaacaacatcaagctgtacgtgagaagagtgttcatcatggacaactgcgaggagctgatccccgagtacctgaacttcatcagaggcgtggtggacagcgaggacctgcccctgaacatcagcagagagatgctgcagcagagcaagatcctgaaggtgatcagaaagaacctggtgaagaagtgcctggagctgttcaccgagctggccgaggacaaggagaactacaagaagttctacgagcagttcagcaagaacatcaagctgggcatccacgaggacagccagaacagaaagaagctgagcgagctgctgagatactacaccagcgccagcggcgacgagatggtgagcctgaaggactactgcaccagaatgaaggagaaccagaagcacatctactacatcaccggcgagaccaaggaccaggtggccaacagcgccttcgtggagagactgagaaagcacggcctggaggtgatctacatgatcgagcccatcgacgagtactgcgtgcagcagctgaaggagttcgagggcaagaccctggtgagcgtgaccaaggagggcctggagctgcccgaggacgaggaggagaagaagaagcaggaggagaagaagaccaagttcgagaacctgtgcaagatcatgaaggacatcctggagaagaaggtggagaaggtggtggtgagcaacagactggtgaccagcccctgctgcatcgtgaccagcacctacggctggaccgccaacatggagagaatcatgaaggcccaggccctgagagacaacagcaccatgggctacatggccgccaagaagcacctggagatcaaccccgaccacagcatcatcgagaccctgagacagaaggccgaggccgacaagaacgacaagagcgtgaaggacctggtgatcctgctgtacgagaccgccctgctgagcagcggcttcagcctggaggacccccagacccacgccaacagaatctacagaatgatcaagctgggcctgggcatcgacgaggacgaccccaccgccgacgacaccagcgccgccgtgaccgaggagatgccccccctggagggcgacgacgacaccagcagaatggaggaggtggactga

SEQ ID NO: 7703 - RNA, 2199 nt, synthetic construct
  misc_feature 1..2199: note = derived and/or modified sequence opt5 fromHSP90__Homo_sapiens__AAA63194
  source 1..2199: mol_type = other RNA
atgcccgaggaaacccagacacaagaccagcccatggaggaagaggaagtggagacgttcgcctttcaggctgagatcgcccagctgatgagcctcattatcaacaccttctactccaataaggaaatttttctgagagagcttatctctaacagctccgatgcgctggacaaaattcggtatgaatctctcacagatccgagcaagctggactccggcaaagagcttcacatcaatctgatccccaacaagcaagatcgcaccctcacaattgtcgacaccgggatcggaatgacaaaagctgatctgattaataacctgggcaccatcgccaagtctgggacgaaggccttcatggaggctctccaggccggagctgacattagcatgatcggccagtttggggttggattctactccgcctatctggtggcggaaaaagtgaccgtcattacaaagcataatgatgacgagcagtacgcctgggaaagctctgctggcggctcctttaccgtgagaacagataccggggagcctatgggacggggcacgaaagttatccttcacctgaaggaagaccaaacagagtatctcgaggaacgcagaatcaaagagattgtgaagaagcatagccagttcatcgggtaccccattaccctgtttgtcgaaaaagagcgggataaggaagtgtctgacgacgaggccgaggaaaaagaggataaggaagaggaaaaagagaaggaggaaaaagagtccgaagacaagcctgagatcgaggatgttggaagcgacgaagaggaagagaagaaagatggcgacaagaaaaagaaaaagaagattaaagaaaagtatatcgatcaggaggagcttaacaaaacaaagcccatctggacccgcaatcctgacgatattaccaacgaagagtacggggagttctacaaatctctgacaaatgactgggaggatcacctcgctgtgaagcatttttccgtcgaaggacagctggagttcagagccctgctctttgtgccgcggcgcgcgcccttcgacctgttcgagaacagaaagaaaaagaataacatcaaactttatgtgcggcgcgtctttattatggacaattgcgaagaactgatccctgaatacctcaacttcattagaggcgttgtggatagcgaggacctgccccttaacatctcccgggaaatgctgcaacagtctaagatcctcaaagtgattcgcaagaatctggtcaagaaatgtctggagctctttacggagctggccgaagataaggagaactataaaaagttctacgaacagtttagcaaaaatatcaaacttggcattcacgaggactcccaaaacagaaagaagctgagcgagctcctgcggtattacacctctgcttccggggatgaaatggtgagccttaaggactattgcacaagaatgaaagagaatcagaagcacatctactacattaccggagaaacaaaagatcaggttgccaactctgctttcgtggagcgcctgcggaagcatggcctcgaagtcatctatatgattgagcctatcgacgagtactgtgtgcagcaactgaaagaatttgaggggaagaccctggttagcgtgacgaaggaaggactcgagctgcccgaagatgaggaggagaaaaagaaacaggaagaaaagaaaacaaagttcgagaatctttgcaagatcatgaaagacattctggaaaagaaagtcgagaaggtggtcgtgtccaacagactcgttacctctccgtgttgcatcgtgaccagcacatatggctggaccgccaatatggagcgcattatgaaagcccaggctctgcgggataactccacaatggggtacatggcggccaagaagcacctggaaatcaatcctgaccatagcattatcgagacgcttagacagaaagctgaagccgataagaacgacaaatctgtcaaggacctcgtgatcctgctgtatgagaccgccctcctgtccagcggattttctcttgaggatccccaaacacacgctaatcgcatttaccggatgatcaaactgggcctcggcattgacgaagatgaccctaccgccgatgacacatccgcggctgttaccgaggaaatgcctcccctggagggggatgacgatacgagcagaatggaagaggtggactga

SEQ ID NO: 7704 - RNA, 2199 nt, synthetic construct
  misc_feature 1..2199: note = derived and/or modified sequence opt6 fromHSP90__Homo_sapiens__AAA63194
  source 1..2199: mol_type = other RNA
atgccagaagaaacacaaacacaagatcaaccaatggaagaagaggaagtggaaacatttgcattccaagcagaaatcgcacaactcatgtcattaataataaataccttctacagtaacaaagaaattttcttacgagaattaataagcaatagtagcgacgcactagacaaaattagatacgaaagtttaacagaccctagcaaactagactcaggaaaagaattacacataaatctcatacctaataaacaagacagaacactaacgatagtagacaccggaataggaatgacaaaagcagatctaataaataacttaggaacaatcgcaaaatcaggcacaaaagcattcatggaagcattacaagcgggagcagatatatcaatgatcggacaattcggtgtcggattttactccgcatatctagtcgcagaaaaagtaacggtaataacaaagcacaatgatgatgaacaatatgcatgggaaagttcagccggaggaagcttcacggtaagaacagatacaggcgaaccaatgggaagaggaacaaaagtaatactacacctaaaagaagaccaaacggaatatttagaagaaagaagaatcaaagaaatagtaaaaaaacactcacaatttataggatacccaattacactattcgtagaaaaagaaagagacaaagaagtctctgacgatgaagcggaagagaaagaagacaaagaagaagaaaaagaaaaggaagaaaaagaaagtgaagacaaaccagagatagaagacgtaggaagtgacgaagaagaagaaaaaaaagacggtgacaaaaagaaaaaaaaaaagataaaagaaaaatatatagatcaagaagaactaaacaaaacaaaaccaatatggacacgaaacccagatgatataactaatgaagaatacggagaattctacaaaagcttaacaaatgactgggaagatcacttagcagttaaacatttttcagtagaaggacaattagaattcagagcactactattcgtacctagacgtgcgccattcgatctcttcgaaaatcgtaaaaaaaaaaataacataaaactatacgtaagaagggtattcatcatggacaattgcgaagaattaatcccagaatacctaaactttataagaggagtagtagattcggaagatttaccattaaatataagcagagaaatgctacaacagagtaaaatactgaaagtgatacgaaaaaacctggtaaaaaaatgcctcgaattattcacagaattagcagaagacaaagaaaactataaaaaattttatgaacaattcagtaaaaacataaaattaggtatacacgaagatagtcaaaacagaaaaaaactaagcgaactactaaggtactacacatccgcatccggggatgaaatggtaagcttgaaagattactgtacaagaatgaaagaaaaccaaaaacacatatactacataacaggggaaacaaaagatcaagtcgcgaattcagcgtttgtagaaagactaagaaaacatggactagaagtaatatatatgatagaaccaatagatgaatactgcgtacaacaattaaaagaatttgaaggaaaaacactagtaagtgtaaccaaagaaggcttagaattgcccgaagacgaagaagaaaaaaagaaacaggaagaaaaaaaaacaaaatttgaaaatctatgcaagataatgaaagatatattggaaaaaaaagtagaaaaagtagtggtaagcaatagattagtaacatcaccatgctgcatagtaacgagcacatacggatggacggcaaatatggaaagaattatgaaagcacaagccttaagggataactcaacaatgggatacatggcagcaaaaaaacacctagaaataaatccagaccatagcataatagaaacattaagacaaaaagccgaagcagataaaaatgataagagcgtaaaagatctagtaatattactatacgaaacagcactattgtcaagcggctttagtttagaagatccacagacccatgcaaatcgaatctaccgcatgattaaattaggattaggaatcgacgaagacgatcctacagctgacgacacatctgcagccgttacagaagaaatgccaccactagaaggagatgacgacaccagtagaatggaggaagtagactaa

SEQ ID NO: 7705 - protein, 724 aa, synthetic construct
  REGION 1..724: note = HSP90__Homo_sapiens__P08238
MPEEVHHGEEEVETFAFQAEIAQLMSLIINTFYSNKEIFLRELISNASDALDKIRYESLTDPSKLDSGKELKIDIIPNPQERTLTLVDTGIGMTKADLINNLGTIAKSGTKAFMEALQAGADISMIGQFGVGFYSAYLVAEKVVVITKHNDDEQYAWESSAGGSFTVRADHGEPIGRGTKVILHLKEDQTEYLEERRVKEVVKKHSQFIGYPITLYLEKEREKEISDDEAEEEKGEKEEEDKDDEEKPKIEDVGSDEEDDSGKDKKKKTKKIKEKYIDQEELNKTKPIWTRNPDDITQEEYGEFYKSLTNDWEDHLAVKHFSVEGQLEFRALLFIPRRAPFDLFENKKKKNNIKLYVRRVFIMDSCDELIPEYLNFIRGVVDSEDLPLNISREMLQQSKILKVIRKNIVKKCLELFSELAEDKENYKKFYEAFSKNLKLGIHEDSTNRRRLSELLRYHTSQSGDEMTSLSEYVSRMKETQKSIYYITGESKEQVANSAFVERVRKRGFEVVYMTEPIDEYCVQQLKEFDGKSLVSVTKEGLELPEDEEEKKKMEESKAKFENLCKLMKEILDKKVEKVTISNRLVSSPCCIVTSTYGWTANMERIMKAQALRDNSTMGYMMAKKHLEINPDHPIVETLRQKAEADKNDKAVKDLVVLLFETALLSSGFSLEDPQTHSNRIYRMIKLGLGIDEDEVAAEEPNAAVPDEIPPLEGDEDASRMEEVD

SEQ ID NO: 7706 - RNA, 2175 nt, synthetic construct
  misc_feature 1..2175: note = HSP90__Homo_sapiens__AAA36026
  source 1..2175: mol_type = other RNA
atgcctgaggaagtgcaccatggagaggaggaggtggagacttttgcctttcaggcagaaattgcccaactcatgtccctcatcatcaataccttctattccaacaaggagattttccttcgggagttgatctctaatgcttctgatgccttggacaagattcgctatgagagcctgacagacccttcgaagttggacagtggtaaagagctgaaaattgacatcatccccaaccctcaggaacgtaccctgactttggtagacacaggcattggcatgaccaaagctgatctcataaataatttgggaaccattgccaagtctggtactaaagcattcatggaggctcttcaggctggtgcagacatctccatgattgggcagtttggtgttggcttttattctgcctacttggtggcagagaaagtggttgtgatcacaaagcacaacgatgatgaacagtatgcttgggagtcttctgctggaggttccttcactgtgcgtgctgaccatggtgagcccattggcaggggtaccaaagtgatcctccatcttaaagaagatcagacagagtacctagaagagaggcgggtcaaagaagtagtgaagaagcattctcagttcataggctatcccatcaccctttatttggagaaggaacgagagaaggaaattagtgatgatgaggcagaggaagagaaaggtgagaaagaagaggaagataaagatgatgaagaaaaacccaagatcgaagatgtgggttcagatgaggaggatgacagcggtaaggataagaagaagaaaactaagaagatcaaagagaaatacattgatcaggaagaactaaacaagaccaagcctatttggaccagaaaccctgatgacatcacccaagaggagtatggagaattctacaagagcctcactaatgactgggaagaccacttggcagtcaagcacttttctgtagaaggtcagttggaattcagggcattgctatttattcctcgtcgggctccctttgacctttttgagaacaagaagaaaaagaacaacatcaaactctatgtccgccgtgtgttcatcatggacagctgtgatgagttgataccagagtatctcaattttatccgtggtgtggttgactctgaggatctgcccctgaacatctcccgagaaatgctccagcagagcaaaatcttgaaagtcattcgcaaaaacattgttaagaagtgccttgagctcttctctgagctggcagaagacaaggagaattacaagaaattctatgaggcattctctaaaaatctcaagcttggaatccacgaagactccactaaccgccgccgcctgtctgagctgctgcgctatcatacctcccagtctggagatgagatgacatctctgtcagagtatgtttctcgcatgaaggagacacagaagtccatctattacatcactggtgagagcaaagagcaggtggccaactcagcttttgtggagcgagtgcggaaacggggcttcgaggtggtatatatgaccgagcccattgacgagtactgtgtgcagcagctcaaggaatttgatgggaagagcctggtctcagttaccaaggagggtctggagctgcctgaggatgaggaggagaagaagaagatggaagagagcaaggcaaagtttgagaacctctgcaagctcatgaaagaaatcttagataagaaggttgagaaggtgacaatctccaatagacttgtgtcttcaccttgctgcattgtgaccagcacctacggctggacagccaatatggagcggatcatgaaagcccaggcacttcgggacaactccaccatgggctatatgatggccaaaaagcacctggagatcaaccctgaccaccccattgtggagacgctgcggcagaaggctgaggccgacaagaatgataaggcagttaaggacctggtggtgctgctgtttgaaaccgccctgctatcttctggcttttcccttgaggatccccagacccactccaaccgcatctatcgcatgatcaagctaggtctaggtattgatgaagatgaagtggcagcagaggaacccaatgctgcagttcctgatgagatcccccctctcgagggcgatgaggatgcgtctcgcatggaagaagtcgattag

SEQ ID NO: 7707 - RNA, 2175 nt, synthetic construct
  misc_feature 1..2175: note = derived and/or modified sequence opt1 fromHSP90__Homo_sapiens__AAA36026
  source 1..2175: mol_type = other RNA
atgcccgaggaggtgcaccacggcgaggaggaggtcgagaccttcgccttccaggccgagatcgcgcagctgatgagcctcatcatcaacaccttctactccaacaaggagatcttcctgcgcgagctgatcagcaacgcctccgacgccctcgacaagatccggtacgagagcctgacggacccgtccaagctggacagcgggaaggagctcaagatcgacatcatccccaacccccaggagcgcaccctgaccctggtggacaccggcatcgggatgacgaaggccgacctcatcaacaacctgggcaccatcgccaagtccgggaccaaggcgttcatggaggccctgcaggccggcgccgacatcagcatgatcggccagttcggggtgggcttctactccgcgtacctcgtcgccgagaaggtggtggtcatcaccaagcacaacgacgacgagcagtacgcctgggagagctccgccgggggcagcttcacggtgcgggccgaccacggggagcccatcggccgcggcaccaaggtgatcctgcacctgaaggaggaccagaccgagtacctcgaggagcggcgcgtcaaggaggtggtgaagaagcactcccagttcatcgggtacccgatcaccctgtacctggagaaggagcgggagaaggagatcagcgacgacgaggcggaggaggagaagggcgagaaggaggaggaggacaaggacgacgaggagaagcccaagatcgaggacgtcgggtccgacgaggaggacgacagcggcaaggacaagaagaagaagacgaagaagatcaaggagaagtacatcgaccaggaggagctcaacaagaccaagcccatctggacccgcaaccccgacgacatcacccaggaggagtacggcgagttctacaagtccctgacgaacgactgggaggaccacctggccgtgaagcacttcagcgtggaggggcagctcgagttccgggccctgctgttcatcccgcgccgggcccccttcgacctcttcgagaacaagaagaagaagaacaacatcaagctgtacgtccgccgggtgttcatcatggactcctgcgacgagctgatccccgagtacctcaacttcatccgcggcgtggtcgacagcgaggacctgcccctgaacatcagccgggagatgctccagcagtccaagatcctgaaggtgatccgcaagaacatcgtgaagaagtgcctggagctgttcagcgagctcgccgaggacaaggagaactacaagaagttctacgaggcgttctccaagaacctgaagctcgggatccacgaggacagcaccaaccggcgccggctgtccgagctgctccgctaccacaccagccagtccggcgacgagatgaccagcctgtccgagtacgtcagccggatgaaggagacgcagaagtccatctactacatcaccggggagagcaaggagcaggtcgccaactccgccttcgtggagcgcgtgcgcaagcggggcttcgaggtggtctacatgaccgagccgatcgacgagtactgcgtgcagcagctgaaggagttcgacggcaagagcctcgtgtccgtcaccaaggaggggctggagctgcccgaggacgaggaggagaagaagaagatggaggagagcaaggccaagttcgagaacctctgcaagctgatgaaggagatcctggacaagaaggtggagaaggtgacgatctccaaccgcctcgtcagctccccctgctgcatcgtgaccagcacctacggctggaccgccaacatggagcggatcatgaaggcgcaggccctgcgcgacaacagcacgatggggtacatgatggccaagaagcacctggagatcaaccccgaccacccgatcgtggagaccctgcggcagaaggccgaggccgacaagaacgacaaggcggtcaaggacctcgtggtgctgctgttcgagaccgccctcctgtccagcggcttctccctggaggacccccagacccacagcaaccgcatctaccggatgatcaagctcgggctgggcatcgacgaggacgaggtcgccgccgaggagcccaacgcggccgtgcccgacgagatcccgcccctggagggcgacgaggacgcctcccgcatggaggaggtggactga

SEQ ID NO: 7708 - RNA, 2175 nt, synthetic construct
  misc_feature 1..2175: note = derived and/or modified sequence opt2 fromHSP90__Homo_sapiens__AAA36026
  source 1..2175: mol_type = other RNA
atgcccgaggaggtccaccacggcgaggaggaggtcgagaccttcgccttccaggccgagatcgcccagctcatgtccctcatcatcaacaccttctactccaacaaggagatcttcctccgcgagctcatctccaacgcctccgacgccctcgacaagatccgctacgagtccctcaccgacccctccaagctcgactccggcaaggagctcaagatcgacatcatccccaacccccaggagcgcaccctcaccctcgtcgacaccggcatcggcatgaccaaggccgacctcatcaacaacctcggcaccatcgccaagtccggcaccaaggccttcatggaggccctccaggccggcgccgacatctccatgatcggccagttcggcgtcggcttctactccgcctacctcgtcgccgagaaggtcgtcgtcatcaccaagcacaacgacgacgagcagtacgcctgggagtcctccgccggcggctccttcaccgtccgcgccgaccacggcgagcccatcggccgcggcaccaaggtcatcctccacctcaaggaggaccagaccgagtacctcgaggagcgccgcgtcaaggaggtcgtcaagaagcactcccagttcatcggctaccccatcaccctctacctcgagaaggagcgcgagaaggagatctccgacgacgaggccgaggaggagaagggcgagaaggaggaggaggacaaggacgacgaggagaagcccaagatcgaggacgtcggctccgacgaggaggacgactccggcaaggacaagaagaagaagaccaagaagatcaaggagaagtacatcgaccaggaggagctcaacaagaccaagcccatctggacccgcaaccccgacgacatcacccaggaggagtacggcgagttctacaagtccctcaccaacgactgggaggaccacctcgccgtcaagcacttctccgtcgagggccagctcgagttccgcgccctcctcttcatcccccgccgcgcccccttcgacctcttcgagaacaagaagaagaagaacaacatcaagctctacgtccgccgcgtcttcatcatggactcctgcgacgagctcatccccgagtacctcaacttcatccgcggcgtcgtcgactccgaggacctccccctcaacatctcccgcgagatgctccagcagtccaagatcctcaaggtcatccgcaagaacatcgtcaagaagtgcctcgagctcttctccgagctcgccgaggacaaggagaactacaagaagttctacgaggccttctccaagaacctcaagctcggcatccacgaggactccaccaaccgccgccgcctctccgagctcctccgctaccacacctcccagtccggcgacgagatgacctccctctccgagtacgtctcccgcatgaaggagacccagaagtccatctactacatcaccggcgagtccaaggagcaggtcgccaactccgccttcgtcgagcgcgtccgcaagcgcggcttcgaggtcgtctacatgaccgagcccatcgacgagtactgcgtccagcagctcaaggagttcgacggcaagtccctcgtctccgtcaccaaggagggcctcgagctccccgaggacgaggaggagaagaagaagatggaggagtccaaggccaagttcgagaacctctgcaagctcatgaaggagatcctcgacaagaaggtcgagaaggtcaccatctccaaccgcctcgtctcctccccctgctgcatcgtcacctccacctacggctggaccgccaacatggagcgcatcatgaaggcccaggccctccgcgacaactccaccatgggctacatgatggccaagaagcacctcgagatcaaccccgaccaccccatcgtcgagaccctccgccagaaggccgaggccgacaagaacgacaaggccgtcaaggacctcgtcgtcctcctcttcgagaccgccctcctctcctccggcttctccctcgaggacccccagacccactccaaccgcatctaccgcatgatcaagctcggcctcggcatcgacgaggacgaggtcgccgccgaggagcccaacgccgccgtccccgacgagatcccccccctcgagggcgacgaggacgcctcccgcatggaggaggtcgactga

SEQ ID NO: 7709 - RNA, 2175 nt, synthetic construct
  misc_feature 1..2175: note = derived and/or modified sequence opt3 fromHSP90__Homo_sapiens__AAA36026
  source 1..2175: mol_type = other RNA
atgcccgaggaagtgcaccatggcgaggaagaggtcgaaaccttcgcctttcaggctgagatcgcacaactgatgagcctcattataaacacattctactccaataaggagatctttcttagagaactgatttctaacgcctcagacgcgttggataaaatcaggtatgagagtttaactgaccctagcaagctggattccgggaaagaactaaagattgacatcataccaaatccgcaggagcggacgctcaccctggttgatacaggaatcggtatgactaaagctgaccttattaacaatctgggcaccatcgccaagtctgggacaaaggcattcatggaggccttgcaggctggagcagatatttcgatgatcggccagtttggtgtggggttctactcagcctatctcgtagctgaaaaagtggtcgtgataaccaagcacaacgacgatgagcaatacgcctgggaaagcagtgcgggaggctcctttactgttcgcgcagaccatggcgagcccattgggcgaggaacaaaagtgatcctgcacctgaaggaagatcagaccgagtatctcgaggaacgtagagtcaaagaggtggtaaagaagcattctcagttcattggttaccctatcacgttatatctggaaaaagagagggaaaaggagatcagcgacgatgaggccgaagaggaaaaaggcgagaaggaagaggaggacaaagacgatgaagagaagccaaaaattgaagacgttgggtccgatgaggaggacgattcaggaaaggacaagaaaaagaaaactaagaaaataaaggaaaagtacatcgatcaggaggaacttaataaaaccaagcccatttggacacggaaccctgacgatatcactcaagaggaatacggcgagttttataaaagtttgaccaatgactgggaggatcacctggctgtgaagcacttcagcgtcgaaggtcagctagagtttcgcgccctcctgttcataccaagaagggcaccctttgaccttttcgaaaacaaaaagaagaaaaataacattaagctgtacgtgcggcgcgtgttcatcatggactcttgcgatgagttgatccctgaatatctcaattttattcgaggggtcgttgactccgaggatctgccattaaacatctcaagagagatgctgcagcagagcaaaattctcaaggtgataaggaaaaatatcgtaaagaagtgtcttgaactgttcagtgagttggctgaagacaaagagaactacaagaaattttatgaagccttctctaagaacctaaaactgggcattcatgaggattccacaaatcggcgtcgcctcagcgagctgcttagataccacacctcgcaatctggagacgaaatgacgtccctgtcagagtatgtgagtaggatgaaggaaactcagaaaagcatctactacatcacaggcgagtccaaggagcaggtcgcgaactctgcctttgtggaacgggttcgaaagcgcgggttcgaggtggtctatatgaccgaaccgattgatgagtactgcgtgcaacagttgaaagaatttgacggaaagagcctcgtatcagttactaaagagggtctggagttacccgaagatgaggaagagaagaaaaagatggaagagagtaaggcaaaattcgagaatctgtgtaagctaatgaaagaaatactcgacaagaaagtggagaaggtcacaatctccaacagactggtgagctctccttgctgtattgtcacctcaacgtatggctggaccgctaatatggaaaggatcatgaaggcccaggcccttcgggataacagtacaatggggtacatgatggctaaaaagcatttggagattaatccagaccaccccatcgtggaaactctgcgccagaaagcagaggccgataagaacgacaaagctgttaaggacctcgtggtactgctttttgagaccgcgctgttgagctccggattctctctcgaagatcctcaaacacactcgaatagaatatataggatgatcaagctgggcttaggtattgacgaggatgaagtcgcagccgaggagccaaacgctgccgtgcccgacgaaatcccgcctctggagggggatgaagacgcaagccgtatggaggaagttgattga

SEQ ID NO: 7710 - RNA, 2175 nt, synthetic construct
  misc_feature 1..2175: note = derived and/or modified sequence opt4 fromHSP90__Homo_sapiens__AAA36026
  source 1..2175: mol_type = other RNA
atgcccgaggaggtgcaccacggcgaggaggaggtggagaccttcgccttccaggccgagatcgcccagctgatgagcctgatcatcaacaccttctacagcaacaaggagatcttcctgagagagctgatcagcaacgccagcgacgccctggacaagatcagatacgagagcctgaccgaccccagcaagctggacagcggcaaggagctgaagatcgacatcatccccaacccccaggagagaaccctgaccctggtggacaccggcatcggcatgaccaaggccgacctgatcaacaacctgggcaccatcgccaagagcggcaccaaggccttcatggaggccctgcaggccggcgccgacatcagcatgatcggccagttcggcgtgggcttctacagcgcctacctggtggccgagaaggtggtggtgatcaccaagcacaacgacgacgagcagtacgcctgggagagcagcgccggcggcagcttcaccgtgagagccgaccacggcgagcccatcggcagaggcaccaaggtgatcctgcacctgaaggaggaccagaccgagtacctggaggagagaagagtgaaggaggtggtgaagaagcacagccagttcatcggctaccccatcaccctgtacctggagaaggagagagagaaggagatcagcgacgacgaggccgaggaggagaagggcgagaaggaggaggaggacaaggacgacgaggagaagcccaagatcgaggacgtgggcagcgacgaggaggacgacagcggcaaggacaagaagaagaagaccaagaagatcaaggagaagtacatcgaccaggaggagctgaacaagaccaagcccatctggaccagaaaccccgacgacatcacccaggaggagtacggcgagttctacaagagcctgaccaacgactgggaggaccacctggccgtgaagcacttcagcgtggagggccagctggagttcagagccctgctgttcatccccagaagagcccccttcgacctgttcgagaacaagaagaagaagaacaacatcaagctgtacgtgagaagagtgttcatcatggacagctgcgacgagctgatccccgagtacctgaacttcatcagaggcgtggtggacagcgaggacctgcccctgaacatcagcagagagatgctgcagcagagcaagatcctgaaggtgatcagaaagaacatcgtgaagaagtgcctggagctgttcagcgagctggccgaggacaaggagaactacaagaagttctacgaggccttcagcaagaacctgaagctgggcatccacgaggacagcaccaacagaagaagactgagcgagctgctgagataccacaccagccagagcggcgacgagatgaccagcctgagcgagtacgtgagcagaatgaaggagacccagaagagcatctactacatcaccggcgagagcaaggagcaggtggccaacagcgccttcgtggagagagtgagaaagagaggcttcgaggtggtgtacatgaccgagcccatcgacgagtactgcgtgcagcagctgaaggagttcgacggcaagagcctggtgagcgtgaccaaggagggcctggagctgcccgaggacgaggaggagaagaagaagatggaggagagcaaggccaagttcgagaacctgtgcaagctgatgaaggagatcctggacaagaaggtggagaaggtgaccatcagcaacagactggtgagcagcccctgctgcatcgtgaccagcacctacggctggaccgccaacatggagagaatcatgaaggcccaggccctgagagacaacagcaccatgggctacatgatggccaagaagcacctggagatcaaccccgaccaccccatcgtggagaccctgagacagaaggccgaggccgacaagaacgacaaggccgtgaaggacctggtggtgctgctgttcgagaccgccctgctgagcagcggcttcagcctggaggacccccagacccacagcaacagaatctacagaatgatcaagctgggcctgggcatcgacgaggacgaggtggccgccgaggagcccaacgccgccgtgcccgacgagatcccccccctggagggcgacgaggacgccagcagaatggaggaggtggactga

SEQ ID NO: 7711 - RNA, 2175 nt, synthetic construct
  misc_feature 1..2175: note = derived and/or modified sequence opt5 fromHSP90__Homo_sapiens__AAA36026
  source 1..2175: mol_type = other RNA
atgcccgaggaagtgcaccatggcgaggaagaggtcgaaaccttcgcctttcaggctgagatcgcccaactgatgagcctcattatcaacacattctactccaataaggagatttttctgagagaacttatctctaacgcgagcgacgctctggataaaattcggtatgagtccctcacggacccttctaagctggatagcgggaaagaacttaagatcgacatcattccgaatccccaggagcgcaccctgacactcgttgataccggaatcggcatgacaaaagccgacctgattaacaatctggggaccatcgccaagtccggaacaaaggctttcatggaggccctccaggctggcgccgatatttctatgatcgggcagtttggagtgggcttctacagcgcgtatctggtggccgaaaaagtcgtggttattaccaagcacaacgacgatgagcaatacgcttgggaatccagcgccggcgggtcttttacggtgagagctgaccatggagagcctatcggccgggggaccaaagtcatccttcacctgaaggaagatcagacagagtatctcgaggaacgcagagtgaaagaggttgtgaagaagcattcccagttcattggataccccatcaccctgtatcttgaaaaagagcgggaaaaggagattagcgacgatgaggccgaagaggaaaaaggcgagaaggaagaggaggacaaagacgatgaagagaagcctaaaatcgaagacgtcgggtctgatgaggaggacgattccggaaaggacaagaaaaagaaaacaaagaaaattaaggaaaagtacatcgatcaggaggaactgaataaaaccaagcccatctggacgcgcaaccctgacgatattacacaagaggaatacggcgagttttataaaagcctcaccaatgactgggaggatcacctggcggtgaagcacttctctgtggaaggccagctggagtttagagccctcctgttcatcccgcggcgcgctccctttgaccttttcgaaaacaaaaagaagaaaaataacattaagctgtacgtcagacgggttttcatcatggactcctgcgatgagctcattcctgaatatctgaattttatccgcggggtggtggacagcgaggatcttcccctgaacatctccagagagatgctccagcagtctaaaattctgaaggtcatccggaaaaatattgtgaagaagtgtctggaactcttcagcgagctggccgaagacaaagagaactacaagaaattttatgaggctttctccaagaaccttaaactgggaatccatgaggatagcacaaatcgcagacggctctctgagctgcttagataccacacctcccaaagcggcgacgaaatgacctctctgagcgagtatgtttcccgcatgaaggaaacacagaaatctatttactacatcacgggggagagcaaggaacaggtggccaactccgcctttgtcgaacgggtgagaaagcgcggattcgaggttgtgtatatgaccgaacctattgatgagtactgcgtccaacagctcaaagaatttgacggcaagagcctggtgtctgtcacaaaagaggggctggagctccccgaagatgaggaagagaagaaaaagatggaagagtccaaggctaaattcgagaatctgtgtaaacttatgaaggaaatcctggacaagaaagtggagaaggttaccatcagcaaccggctcgtgtcttccccgtgctgtattgtcacaagcacctatggatggacggcgaatatggaaagaatcatgaaggcccaggctctgcgcgataactccacaatgggctacatgatggccaaaaagcatctggagattaatcctgaccaccccatcgtggaaacccttcggcagaaagccgaggctgataagaacgacaaagccgttaaggacctcgtggtcctgctgtttgagaccgcgctcctgtctagcggcttctcccttgaagatcctcaaacacactctaatagaatttatcgcatgatcaagctggggctcggaatcgacgaggatgaagtggctgccgaggagcccaacgccgctgtgcccgacgaaattcctccgctggagggcgatgaagacgccagccggatggaggaagttgattga

SEQ ID NO: 7712 - RNA, 2175 nt, synthetic construct
  misc_feature 1..2175: note = derived and/or modified sequence opt6 fromHSP90__Homo_sapiens__AAA36026
  source 1..2175: mol_type = other RNA
atgcctgaagaagtacaccatggagaagaagaagtagaaacttttgcattccaagcagaaatcgctcaactaatgagcttaataataaatacgttttatagtaataaagaaatattcctaagagaattaatatcaaatgcaagtgatgcattagacaaaataagatacgagagtttgaccgacccatcaaaattagacagtggaaaagaactaaaaatcgacataataccaaatccacaagaaagaacactaacactagtagacacaggaataggcatgacaaaagctgatttaatcaacaatttaggaacaatagccaaatcagggactaaagccttcatggaggcactacaagcaggtgcagatatatcaatgataggacaatttggagtgggattttactcagcatacttagtagccgaaaaagtagtagtaattacaaaacataatgacgacgagcaatatgcatgggagtccagcgcaggaggaagtttcacagtaagagcggaccatggagagccaatagggagaggtacaaaagtaatattgcacttaaaagaagaccaaacagaatacttagaagaaagaagagtaaaagaagtagtgaaaaaacacagccaattcatcggataccctataaccttatacctagaaaaagagagagaaaaagaaattagtgatgacgaagctgaagaagaaaaaggggaaaaagaagaagaagacaaagacgatgaagaaaaacctaaaatagaggatgtagggagcgacgaagaagacgacagcggaaaggacaaaaaaaaaaaaacaaaaaaaataaaagaaaaatatatagaccaagaagaactaaacaaaacaaaaccaatatggactagaaacccagacgatataacccaggaagaatatggagaattctacaaatcgttaacaaatgactgggaagatcatcttgcggtaaaacacttcagtgtagaaggacagttagaattccgagcactactgttcattccaagaagagcaccctttgacctatttgaaaataaaaagaaaaaaaacaacataaaattatacgtaagacgagttttcataatggattcatgtgacgaattaataccagaatacctaaactttatacgaggagtggttgactcagaagatttaccactaaacatctcaagagagatgctacaacaaagtaaaatactgaaagtaataagaaaaaacattgtgaaaaaatgtttagaattattcagcgaattagctgaagataaagaaaattataagaaattttacgaagcattcagcaaaaatctgaaactaggaatacacgaagattcaaccaatagaagacgactgagcgaactacttcggtaccatacaagccagagtggagatgaaatgacgtcattatcagaatatgtctcaagaatgaaagaaacgcaaaaatctatatactacataactggagaaagcaaagaacaagtcgcaaactcagcattcgttgaaagagtacgtaagagaggattcgaggttgtatacatgactgagccaatagatgaatactgcgtacaacaattaaaggaattcgatggaaaatcattagttagcgtaacgaaagaaggactagaattgccagaagacgaagaagaaaaaaaaaaaatggaagaaagcaaagccaaatttgaaaatttatgcaaattgatgaaagaaatactagataaaaaagtggaaaaagtgacaatatcaaatagacttgtaagctcgccgtgctgtattgtaacatccacatacgggtggacggcaaacatggagagaataatgaaagcccaagcactgcgagacaactcaaccatgggatacatgatggccaaaaagcacttggaaataaaccccgatcatccaatagtagaaacattaagacaaaaagcagaagcagacaaaaacgataaagctgtcaaagatcttgtagtactactgtttgaaacagcactattaagtagcggatttagtttagaagatccacagacacacagcaacagaatctacagaatgattaaattaggtctaggaatagacgaggatgaagtagcggcagaagaaccaaatgcggcagtacctgacgaaataccaccactggagggagatgaagacgcatcaagaatggaagaagtggattaa

SEQ ID NO: 7713 - protein, 508 aa, synthetic construct
  REGION 1..508: note = PDI/PDIA__Homo_sapiens__P07237
MLRRALLCLAVAALVRADAPEEEDHVLVLRKSNFAEALAAHKYLLVEFYAPWCGHCKALAPEYAKAAGKLKAEGSEIRLAKVDATEESDLAQQYGVRGYPTIKFFRNGDTASPKEYTAGREADDIVNWLKKRTGPAATTLPDGAAAESLVESSEVAVIGFFKDVESDSAKQFLQAAEAIDDIPFGITSNSDVFSKYQLDKDGVVLFKKFDEGRNNFEGEVTKENLLDFIKHNQLPLVIEFTEQTAPKIFGGEIKTHILLFLPKSVSDYDGKLSNFKTAAESFKGKILFIFIDSDHTDNQRILEFFGLKKEECPAVRLITLEEEMTKYKPESEELTAERITEFCHRFLEGKIKPHLMSQELPEDWDKQPVKVLVGKNFEDVAFDEKKNVFVEFYAPWCGHCKQLAPIWDKLGETYKDHENIVIAKMDSTANEVEAVKVHSFPTLKFFPASADRTVIDYNGERTLDGFKKFLESGGQDGAGDDDDLEDLEEAEEPDMEEDDDQKAVKDEL

SEQ ID NO: 7714 - RNA, 1527 nt, synthetic construct
  misc_feature 1..1527: note = PDI/PDIA__Homo_sapiens__AAC13652
  source 1..1527: mol_type = other RNA
atgctgcgccgcgctctgctgtgcctggccgtggccgccctggtgcgcgccgacgcccccgaggaggaggaccacgtcctggtgctgcggaaaagcaacttcgcggaggcgctggcggcccacaagtacctgctggtggagttctatgccccttggtgtggccactgcaaggctctggcccctgagtatgccaaagccgctgggaagctgaaggcagaaggttccgagatcaggttggccaaggtggacgccacggaggagtctgacctggcccagcagtacggcgtgcgcggctatcccaccatcaagttcttcaggaatggagacacggcttcccccaaggaatatacagctggcagagaggctgatgacatcgtgaactggctgaagaagcgcacgggcccggctgccaccaccctgcctgacggcgcagctgcagagtccttggtggagtccagcgaggtggctgtcatcggcttcttcaaggacgtggagtcggactctgccaagcagtttttgcaggcagcagaggccatcgatgacataccatttgggatcacttccaacagtgacgtgttctccaaataccagctcgacaaagatggggttgtcctctttaagaagtttgatgaaggccggaacaactttgaaggggaggtcaccaaggagaacctgctggactttatcaaacacaaccagctgccccttgtcatcgagttcaccgagcagacagccccgaagatttttggaggtgaaatcaagactcacatcctgctgttcttgcccaagagtgtgtctgactatgacggcaaactgagcaacttcaaaacagcagccgagagcttcaagggcaagatcctgttcatcttcatcgacagcgaccacaccgacaaccagcgcatcctcgagttctttggcctgaagaaggaagagtgcccggccgtgcgcctcatcaccctggaggaggagatgaccaagtacaagcccgaatcggaggagctgacggcagagaggatcacagagttctgccaccgcttcctggagggcaaaatcaagccccacctgatgagccaggagctgccggaggactgggacaagcagcctgtcaaggtgcttgttgggaagaactttgaagacgtggcttttgatgagaaaaaaaacgtctttgtggagttctatgccccatggtgtggtcactgcaaacagttggctcccatttgggataaactgggagagacgtacaaggaccatgagaacatcgtcatcgccaagatggactcgactgccaacgaggtggaggccgtcaaagtgcacagcttccccacactcaagttctttcctgccagtgccgacaggacggtcattgattacaacggggaacgcacgctggatggttttaagaaattcctggagagcggtggccaggatggggcaggggatgatgacgatctcgaggacctggaagaagcagaggagccagacatggaggaagacgatgatcagaaagctgtgaaagatgaactgtaa

SEQ ID NO: 7715 - RNA, 1527 nt, synthetic construct
  misc_feature 1..1527: note = derived and/or modified sequence opt1 fromPDI/PDIA__Homo_sapiens__AAC13652
  source 1..1527: mol_type = other RNA
atgctgcgccgggccctcctgtgcctggccgtggcggccctcgtccgcgccgacgcccccgaggaggaggaccacgtgctggtgctgcgcaagagcaacttcgccgaggcgctcgccgcccacaagtacctgctggtcgagttctacgccccgtggtgcggccactgcaaggcgctcgcccccgagtacgccaaggccgccgggaagctgaaggcggagggctccgagatccggctggccaaggtggacgccaccgaggagagcgacctcgcccagcagtacggggtgcggggctaccccaccatcaagttcttccgcaacggggacacggcctcccccaaggagtacaccgcgggccgggaggccgacgacatcgtcaactggctgaagaagcgcaccggcccggccgccaccacgctgcccgacggggccgcggccgagagcctcgtggagtccagcgaggtggccgtcatcggcttcttcaaggacgtggagtccgacagcgccaagcagttcctgcaggccgcggaggccatcgacgacatccccttcgggatcacctccaacagcgacgtgttctccaagtaccagctggacaaggacggcgtcgtgctgttcaagaagttcgacgaggggcggaacaacttcgagggcgaggtgaccaaggagaacctgctggacttcatcaagcacaaccagctccccctggtcatcgagttcaccgagcagacggccccgaagatcttcggcggggagatcaagacccacatcctcctcttcctgcccaagagcgtgtccgactacgacggcaagctgagcaacttcaagaccgccgcggagtccttcaaggggaagatcctcttcatcttcatcgacagcgaccacaccgacaaccagcgcatcctggagttcttcggcctgaagaaggaggagtgccccgccgtgcggctcatcacgctggaggaggagatgaccaagtacaagcccgagtccgaggagctgaccgccgagcgcatcaccgagttctgccaccggttcctcgagggcaagatcaagccgcacctgatgagccaggagctgcccgaggactgggacaagcagcccgtcaaggtgctcgtggggaagaacttcgaggacgtcgccttcgacgagaagaagaacgtgttcgtggagttctacgccccctggtgcggccactgcaagcagctggcgccgatctgggacaagctgggggagacgtacaaggaccacgagaacatcgtcatcgccaagatggactccaccgccaacgaggtggaggccgtcaaggtgcacagcttccccaccctcaagttcttccccgccagcgcggaccgcaccgtgatcgactacaacggcgagcggacgctggacgggttcaagaagttcctggagtccggcggccaggacggggccggcgacgacgacgacctcgaggacctggaggaggccgaggagcccgacatggaggaggacgacgaccagaaggccgtcaaggacgagctgtga

SEQ ID NO: 7716 - RNA, 1527 nt, synthetic construct
  misc_feature 1..1527: note = derived and/or modified sequence opt2 fromPDI/PDIA__Homo_sapiens__AAC13652
  source 1..1527: mol_type = other RNA
atgctccgccgcgccctcctctgcctcgccgtcgccgccctcgtccgcgccgacgcccccgaggaggaggaccacgtcctcgtcctccgcaagtccaacttcgccgaggccctcgccgcccacaagtacctcctcgtcgagttctacgccccctggtgcggccactgcaaggccctcgcccccgagtacgccaaggccgccggcaagctcaaggccgagggctccgagatccgcctcgccaaggtcgacgccaccgaggagtccgacctcgcccagcagtacggcgtccgcggctaccccaccatcaagttcttccgcaacggcgacaccgcctcccccaaggagtacaccgccggccgcgaggccgacgacatcgtcaactggctcaagaagcgcaccggccccgccgccaccaccctccccgacggcgccgccgccgagtccctcgtcgagtcctccgaggtcgccgtcatcggcttcttcaaggacgtcgagtccgactccgccaagcagttcctccaggccgccgaggccatcgacgacatccccttcggcatcacctccaactccgacgtcttctccaagtaccagctcgacaaggacggcgtcgtcctcttcaagaagttcgacgagggccgcaacaacttcgagggcgaggtcaccaaggagaacctcctcgacttcatcaagcacaaccagctccccctcgtcatcgagttcaccgagcagaccgcccccaagatcttcggcggcgagatcaagacccacatcctcctcttcctccccaagtccgtctccgactacgacggcaagctctccaacttcaagaccgccgccgagtccttcaagggcaagatcctcttcatcttcatcgactccgaccacaccgacaaccagcgcatcctcgagttcttcggcctcaagaaggaggagtgccccgccgtccgcctcatcaccctcgaggaggagatgaccaagtacaagcccgagtccgaggagctcaccgccgagcgcatcaccgagttctgccaccgcttcctcgagggcaagatcaagccccacctcatgtcccaggagctccccgaggactgggacaagcagcccgtcaaggtcctcgtcggcaagaacttcgaggacgtcgccttcgacgagaagaagaacgtcttcgtcgagttctacgccccctggtgcggccactgcaagcagctcgcccccatctgggacaagctcggcgagacctacaaggaccacgagaacatcgtcatcgccaagatggactccaccgccaacgaggtcgaggccgtcaaggtccactccttccccaccctcaagttcttccccgcctccgccgaccgcaccgtcatcgactacaacggcgagcgcaccctcgacggcttcaagaagttcctcgagtccggcggccaggacggcgccggcgacgacgacgacctcgaggacctcgaggaggccgaggagcccgacatggaggaggacgacgaccagaaggccgtcaaggacgagctctga

SEQ ID NO: 7717 - RNA, 1527 nt, synthetic construct
  misc_feature 1..1527: note = derived and/or modified sequence opt3 fromPDI/PDIA__Homo_sapiens__AAC13652
  source 1..1527: mol_type = other RNA
atgctgagaagggccctcctttgcctggctgtggcagccttggtccgggcggacgctcccgaggaagaggatcacgttttagtgctgcgcaagagcaacttcgccgaagcactagccgctcataaatacctcctggtagagttttatgcaccttggtgtggccactgcaaggcccttgctccagaatacgccaaagcggcagggaagctgaaagccgagggatccgagatccgattggctaaggtggacgccaccgaagagtctgatctcgcacagcaatatggtgtccgtggctacccgacaattaagttctttagaaatggggacactgcttcacccaaagaatatacggccggaagggaggcggatgacatagtgaactggctgaagaaacggaccggccctgccgcaacaactctgccagatggtgctgccgctgagagtctcgttgaaagctccgaggtggccgtcatcgggttctttaaggacgtggaatctgattcggcaaaacagttcttacaggccgctgaggcgattgacgatatcccctttggaattacctcaaatagcgacgtattcagtaagtaccagctggataaggacggcgttgtgctttttaaaaagttcgacgaaggccgcaacaattttgagggggaggtcacaaaagaaaacttgctggatttcatcaagcataatcaactacctctcgtgatagagtttaccgaacagactgcaccaaaaatcttcggaggtgagattaagacacacatcctgcttttcctgcccaaatccgtgtctgactatgatggcaagttgagcaactttaagaccgccgctgaatccttcaaagggaagattctctttatcttcatagactcagatcatacggacaatcagagaattttagagtttttcggactgaaaaaggaggaatgtcctgccgtcaggctgatcactctcgaggaagagatgaccaaatacaagccagaaagtgaggagcttacagcagaacggattactgagttttgccaccgcttcctggaaggcaagatcaaaccgcacttgatgagccaggagctacccgaggattgggacaagcaacctgttaaagtgctggtaggtaagaactttgaagatgtggccttcgacgagaaaaagaatgtctttgtggagttctacgctccatggtgtgggcattgcaagcagctcgcccccatctgggataaactgggagaaacctataaggaccacgaaaacattgttatagcaaaaatggactctacagcgaatgaggtggaggctgtcaaggtgcattcctttcctacccttaaattcttcccagcctcagcagatcgaacggtaatcgactacaacggcgaaagaactctggatggctttaagaagttcttggagagcgggggacaggacggtgccggcgatgacgatgacctcgaagatctggaggaagctgaggagcccgacatggaagaggatgacgatcagaaagccgttaaggacgaattatga

SEQ ID NO: 7718 - RNA, 1527 nt, synthetic construct
  misc_feature 1..1527: note = derived and/or modified sequence opt4 fromPDI/PDIA__Homo_sapiens__AAC13652
  source 1..1527: mol_type = other RNA
atgctgagaagagccctgctgtgcctggccgtggccgccctggtgagagccgacgcccccgaggaggaggaccacgtgctggtgctgagaaagagcaacttcgccgaggccctggccgcccacaagtacctgctggtggagttctacgccccctggtgcggccactgcaaggccctggcccccgagtacgccaaggccgccggcaagctgaaggccgagggcagcgagatcagactggccaaggtggacgccaccgaggagagcgacctggcccagcagtacggcgtgagaggctaccccaccatcaagttcttcagaaacggcgacaccgccagccccaaggagtacaccgccggcagagaggccgacgacatcgtgaactggctgaagaagagaaccggccccgccgccaccaccctgcccgacggcgccgccgccgagagcctggtggagagcagcgaggtggccgtgatcggcttcttcaaggacgtggagagcgacagcgccaagcagttcctgcaggccgccgaggccatcgacgacatccccttcggcatcaccagcaacagcgacgtgttcagcaagtaccagctggacaaggacggcgtggtgctgttcaagaagttcgacgagggcagaaacaacttcgagggcgaggtgaccaaggagaacctgctggacttcatcaagcacaaccagctgcccctggtgatcgagttcaccgagcagaccgcccccaagatcttcggcggcgagatcaagacccacatcctgctgttcctgcccaagagcgtgagcgactacgacggcaagctgagcaacttcaagaccgccgccgagagcttcaagggcaagatcctgttcatcttcatcgacagcgaccacaccgacaaccagagaatcctggagttcttcggcctgaagaaggaggagtgccccgccgtgagactgatcaccctggaggaggagatgaccaagtacaagcccgagagcgaggagctgaccgccgagagaatcaccgagttctgccacagattcctggagggcaagatcaagccccacctgatgagccaggagctgcccgaggactgggacaagcagcccgtgaaggtgctggtgggcaagaacttcgaggacgtggccttcgacgagaagaagaacgtgttcgtggagttctacgccccctggtgcggccactgcaagcagctggcccccatctgggacaagctgggcgagacctacaaggaccacgagaacatcgtgatcgccaagatggacagcaccgccaacgaggtggaggccgtgaaggtgcacagcttccccaccctgaagttcttccccgccagcgccgacagaaccgtgatcgactacaacggcgagagaaccctggacggcttcaagaagttcctggagagcggcggccaggacggcgccggcgacgacgacgacctggaggacctggaggaggccgaggagcccgacatggaggaggacgacgaccagaaggccgtgaaggacgagctgtga

SEQ ID NO: 7719 - RNA, 1527 nt, synthetic construct
  misc_feature 1..1527: note = derived and/or modified sequence opt5 fromPDI/PDIA__Homo_sapiens__AAC13652
  source 1..1527: mol_type = other RNA
atgctgagacgggccctcctgtgccttgctgtggccgcgctggtccgcgctgacgcccccgaggaagaggatcacgttctcgtgctgagaaagagcaacttcgccgaagctcttgccgctcataaatacctgctcgtggagttttatgccccttggtgtggccactgcaaggcgctggccccggaatacgctaaagccgctgggaagctgaaagccgagggatccgagatccggctcgcgaaggtcgacgccaccgaagagtctgatctggctcagcaatatggcgtgcgcgggtaccccacaattaagttctttagaaatggagacacggccagccctaaagaatataccgctggccgggaggccgatgacatcgttaactggcttaagaaacgcacagggcccgccgctaccacactgcctgatggagcggccgctgagtccctcgtggaatctagcgaggtcgccgtgattggcttctttaaggacgttgaatccgattctgccaaacagttcctgcaggctgccgaggcgatcgacgatattccctttggcatcaccagcaattccgacgtgttcagcaagtaccagcttgataaggacggggtcgtgctgtttaaaaagttcgacgaaggaagaaacaattttgagggcgaggtgacaaaagaaaacctcctggatttcatcaagcataatcaactgcctctcgtcattgagtttaccgaacagacggctccgaaaatcttcgggggagagattaagacccacatcctgcttttcctgcccaaatctgtttccgactatgatggcaagctcagcaactttaagacagccgccgaatctttcaaagggaagattctgtttatcttcattgactccgatcataccgacaatcagcggatccttgagtttttcggactgaaaaaggaggaatgtcctgctgtgcgcctcatcacactggaggaagagatgaccaaatacaagcccgaaagcgaggagctgacggccgaaagaattacagagttttgccaccggttcctcgaaggcaagatcaaacctcacctgatgtctcaggagcttcccgaggattgggacaagcaaccggtgaaagtcctggtgggcaagaactttgaagatgttgctttcgacgagaaaaagaatgtgtttgtcgagttctacgccccttggtgtgggcattgcaagcagctcgcgcccatttgggataaactgggagaaacctataaggaccacgaaaacatcgtgattgccaaaatggactccacagctaatgaggttgaggccgtgaaggtccatagctttcctacccttaaattcttccccgcttccgccgatcgcaccgtgatcgactacaacggcgaaagaacactggatgggtttaagaagttcctcgagtctggaggccaggacggggcgggagatgacgatgacctggaagatctggaggaagccgaggagcccgacatggaagaggatgacgatcagaaagctgtcaaggacgaactctga

SEQ ID NO: 7720 - RNA, 1527 nt, synthetic construct
  misc_feature 1..1527: note = derived and/or modified sequence opt6 fromPDI/PDIA__Homo_sapiens__AAC13652
  source 1..1527: mol_type = other RNA
atgctaagaagagctctattatgtctagcagttgcggcactagtcagggctgacgcaccagaagaagaagatcatgtactagtattacgaaaaagcaatttcgcagaagctctagcagcacacaaatacctcttagtagaattctacgcaccatggtgtggacattgcaaagcattagcacccgaatatgccaaagcagcaggaaaactaaaggcagaaggaagcgaaataagattagccaaagtagatgcaacagaagaaagcgacttagcacaacaatatggagtccgaggatatccaacaataaaattttttagaaatggagataccgcatcaccaaaagaatatacagcaggtagagaagcagatgacattgtcaattggctaaaaaaaagaacaggcccagctgccacaacactaccggacggagcagcggcagaatccttagtagaatcatcagaagtagcagtaatcggattcttcaaagatgttgaaagcgattcagcaaaacaatttttacaagccgcagaagcaattgatgatataccatttggaataacttcaaacagtgacgtcttcagtaaatatcaattagataaagatggtgttgtactattcaaaaaattcgacgaaggaagaaataacttcgaaggagaagtgacaaaagaaaatcttctagacttcataaagcataaccaactaccattagtaattgaatttacagaacaaacagctccaaaaatatttggaggagaaataaaaacacatatactattattcttaccaaaaagtgtatcagactatgacggtaaactaagtaactttaaaactgcagcagaaagttttaaaggaaaaatattatttatatttattgatagtgaccatactgataaccaacgaatactagaattctttggattaaaaaaagaagaatgtccggcagtcagactcataacattagaagaagaaatgacaaaatacaaaccagaaagtgaggaattgacagcagaaagaataacagaattctgtcacagattcctagaaggaaaaataaaaccacatttaatgtcacaagaactaccagaggattgggacaaacaacccgtaaaagtattagtaggaaaaaactttgaagatgtagcattcgacgaaaaaaaaaacgtgtttgtagaattttatgcaccatggtgtggacattgtaaacaactagcccctatatgggataaactaggagaaacatacaaagaccatgaaaacatagtaatagcaaaaatggactcaacagctaatgaagtcgaagcagtaaaagtacactcgtttccaacgttaaaattttttccagcatcagcagatcgtacagtaatagactacaatggagaaagaacattagacggatttaaaaaattcttagaaagcggaggacaggacggtgcaggcgatgatgatgaccttgaagatttagaagaagctgaagaaccagatatggaagaagacgatgaccaaaaagcagtaaaagacgaactttaa

SEQ ID NO: 7721 - protein, 332 aa, synthetic construct [sequence omitted]

SEQ ID NO: 7722 - RNA, 999 nt, synthetic construct
  misc_feature 1..999: note = PDI/PDIA__Homo_sapiens__AAG32626
  source 1..999: mol_type = other RNA
atgggagtctggttaaataaagatgactatatcagagacttgaaaaggatcattctctgttttctgatagtgtatatggccattttagtgggcacagatcaggatttttacagtttacttggagtgtccaaaactgcaagcagtagagaaataagacaagctttcaagaaattggcattgaagttacatcctgataaaaacccgaataacccaaatgcacatggcaattttttaaaaataaatagagcatatgaagtactcaaagatgaagatctacggaaaaagtatgacaaatatggagaaaagggacttgaggataatcaaggtggccagtatgaaagctggaactattatcgttatgattttggtatttatgatgatgatcctgaaatcataacattggaaagaagagaatttgatgctgctgttaattctggagaactgtggtttgtaaatttttactccccaggctgttcacactgccatgatttagctcccacatggagagactttgctaaagaagtggatgggttacttcgaattggagctgttaactgtggtgatgatagaatgctttgccgaatgaaaggagtcaacagctatcccagtctcttcatttttcggtctggaatggccccagtgaaatatcatggagacagatcaaaggagagtttagtgagttttgcaatgcagcatgttagaagtacagtgacagaactttggacaggaaattttgtcaactccatacaaactgcttttgctgctggtattggctggctgatcactttttgttcaaaaggaggagattgtttgacttcacagacacgactcaggcttagtggcatgttggatggtcttgttaatgtaggatggatggactgtgccacccaggataacctttgtaaaagcttagatattacaacaagtactactgcttattttcctcctggagccactttaaataacaaagagaaaaacagtattttgctgcttcattga

SEQ ID NO: 7723 - RNA, 999 nt, synthetic construct
  misc_feature 1..999: note = derived and/or modified sequence opt1 fromPDI/PDIA__Homo_sapiens__AAG32626
  source 1..999: mol_type = other RNA
atgggcgtgtggctgaacaaggacgactacatccgcgacctcaagcggatcatcctgtgcttcctgatcgtctacatggccatcctcgtggggaccgaccaggacttctacagcctgctgggcgtgtccaagaccgccagctcccgcgagatccggcaggcgttcaagaagctcgccctgaagctgcaccccgacaagaacccgaacaaccccaacgcccacgggaacttcctcaagatcaaccgcgcctacgaggtcctgaaggacgaggacctgcggaagaagtacgacaagtacggcgagaaggggctcgaggacaaccagggcggccagtacgagagctggaactactaccgctacgacttcgggatctacgacgacgaccccgagatcatcacgctggagcggcgcgagttcgacgccgcggtgaactccggcgagctgtggttcgtgaacttctacagccccgggtgctcccactgccacgacctcgccccgacctggcgggacttcgccaaggaggtcgacggcctgctgcgcatcggggccgtgaactgcggcgacgaccggatgctctgccgcatgaagggcgtgaacagctacccctccctgttcatcttccggagcgggatggcgcccgtcaagtaccacggcgaccgctccaaggagagcctggtgtccttcgccatgcagcacgtgcggagcaccgtcaccgagctctggacggggaacttcgtgaactccatccagaccgccttcgccgccggcatcggctggctgatcaccttctgcagcaagggcggggactgcctgacctcccagacgcgcctccggctgagcgggatgctggacggcctcgtgaacgtcgggtggatggactgcgcgacccaggacaacctgtgcaagtccctggacatcaccaccagcacgaccgcctacttcccgcccggcgccaccctcaacaacaaggagaagaacagcatcctgctgctccactga

SEQ ID NO: 7724 - RNA, 999 nt, synthetic construct
  misc_feature 1..999: note = derived and/or modified sequence opt2 fromPDI/PDIA__Homo_sapiens__AAG32626
  source 1..999: mol_type = other RNA
atgggcgtctggctcaacaaggacgactacatccgcgacctcaagcgcatcatcctctgcttcctcatcgtctacatggccatcctcgtcggcaccgaccaggacttctactccctcctcggcgtctccaagaccgcctcctcccgcgagatccgccaggccttcaagaagctcgccctcaagctccaccccgacaagaaccccaacaaccccaacgcccacggcaacttcctcaagatcaaccgcgcctacgaggtcctcaaggacgaggacctccgcaagaagtacgacaagtacggcgagaagggcctcgaggacaaccagggcggccagtacgagtcctggaactactaccgctacgacttcggcatctacgacgacgaccccgagatcatcaccctcgagcgccgcgagttcgacgccgccgtcaactccggcgagctctggttcgtcaacttctactcccccggctgctcccactgccacgacctcgcccccacctggcgcgacttcgccaaggaggtcgacggcctcctccgcatcggcgccgtcaactgcggcgacgaccgcatgctctgccgcatgaagggcgtcaactcctacccctccctcttcatcttccgctccggcatggcccccgtcaagtaccacggcgaccgctccaaggagtccctcgtctccttcgccatgcagcacgtccgctccaccgtcaccgagctctggaccggcaacttcgtcaactccatccagaccgccttcgccgccggcatcggctggctcatcaccttctgctccaagggcggcgactgcctcacctcccagacccgcctccgcctctccggcatgctcgacggcctcgtcaacgtcggctggatggactgcgccacccaggacaacctctgcaagtccctcgacatcaccacctccaccaccgcctacttcccccccggcgccaccctcaacaacaaggagaagaactccatcctcctcctccactga

SEQ ID NO: 7725 - RNA, 999 nt, synthetic construct
  misc_feature 1..999: note = derived and/or modified sequence opt3 fromPDI/PDIA__Homo_sapiens__AAG32626
  source 1..999: mol_type = other RNA
atgggcgtgtggctgaacaaggacgattacatcagagacctcaaaaggattatactttgcttcctgatcgtctatatggccattttggttgggaccgatcaggacttttacagcttactgggagtgtccaagacagcttcttcacgggagatccgccaagcattcaaaaagctagccctcaaactgcaccccgataagaatcctaacaatccaaacgcgcatggtaattttcttaagattaaccgagcttatgaagtactgaaagacgaggatttgcgtaagaaatacgacaagtatggcgaaaaagggctcgaggataatcagggaggccagtacgaaagttggaactattacagatacgacttcggtatctatgatgacgatccggagataatcactctggagaggcgggaatttgacgccgcagtgaatagcggggagctgtggttcgtcaacttttactcccccggatgttctcactgccatgacctcgcccctacgtggcgcgatttcgctaaggaagtggacggcttactgagaattggcgcagttaattgtggggatgacaggatgctttgccggatgaagggagtgaactcgtatccatcattgtttatcttccgcagcggtatggcccccgtcaaataccacggcgatcgaagtaaggagtccctggtgtcttttgctatgcagcatgtaagaagcaccgttacagagctatggactgggaatttcgtgaactccattcaaaccgcctttgcggcaggaatcggctggctcataacattctgttcaaaaggtggggactgcctgaccagtcagactaggcttcggctgagcggaatgttggatggcctcgtcaatgtgggctggatggactgtgccacacaggataacctgtgcaagtctttagacattaccacgtccactaccgcttatttccctccaggggccacactgaacaataaagaaaagaactcaatcctccttctgcactga

SEQ ID NO: 7726 - RNA, 999 nt, synthetic construct
  misc_feature 1..999: note = derived and/or modified sequence opt4 fromPDI/PDIA__Homo_sapiens__AAG32626
  source 1..999: mol_type = other RNA
atgggcgtgtggctgaacaaggacgactacatcagagacctgaagagaatcatcctgtgcttcctgatcgtgtacatggccatcctggtgggcaccgaccaggacttctacagcctgctgggcgtgagcaagaccgccagcagcagagagatcagacaggccttcaagaagctggccctgaagctgcaccccgacaagaaccccaacaaccccaacgcccacggcaacttcctgaagatcaacagagcctacgaggtgctgaaggacgaggacctgagaaagaagtacgacaagtacggcgagaagggcctggaggacaaccagggcggccagtacgagagctggaactactacagatacgacttcggcatctacgacgacgaccccgagatcatcaccctggagagaagagagttcgacgccgccgtgaacagcggcgagctgtggttcgtgaacttctacagccccggctgcagccactgccacgacctggcccccacctggagagacttcgccaaggaggtggacggcctgctgagaatcggcgccgtgaactgcggcgacgacagaatgctgtgcagaatgaagggcgtgaacagctaccccagcctgttcatcttcagaagcggcatggcccccgtgaagtaccacggcgacagaagcaaggagagcctggtgagcttcgccatgcagcacgtgagaagcaccgtgaccgagctgtggaccggcaacttcgtgaacagcatccagaccgccttcgccgccggcatcggctggctgatcaccttctgcagcaagggcggcgactgcctgaccagccagaccagactgagactgagcggcatgctggacggcctggtgaacgtgggctggatggactgcgccacccaggacaacctgtgcaagagcctggacatcaccaccagcaccaccgcctacttcccccccggcgccaccctgaacaacaaggagaagaacagcatcctgctgctgcactga

SEQ ID NO: 7727 - RNA, 999 nt, synthetic construct
  misc_feature 1..999: note = derived and/or modified sequence opt5 fromPDI/PDIA__Homo_sapiens__AAG32626
  source 1..999: mol_type = other RNA
atgggcgtgtggctgaacaaggacgattacatcagagacctcaaacggattatcctgtgcttccttattgtctatatggccatcctggttgggaccgatcaggacttttacagcctcctgggagtgtccaagacagcttctagccgcgagattagacaagccttcaaaaagctggcgcttaaactccaccccgataagaatcctaacaatccgaacgctcatggcaattttctgaagatcaaccgggcctatgaagtgctgaaagacgaggatctccgcaagaaatacgacaagtatggggaaaaaggactggaggataatcagggcgggcagtacgaatcctggaactattacagatacgacttcggaatctatgatgacgatcccgagattatcacgcttgagcggcgcgaatttgacgccgctgtcaattctggcgagctgtggttcgtgaacttttacagccctggctgttcccactgccatgacctcgcccccacctggagagatttcgctaaggaagttgacgggctgcttcggattggagccgtgaattgtggcgatgaccgcatgctgtgcagaatgaagggggtcaactcttatcctagcctctttatcttccggtccggaatggcgcccgtgaaataccacggcgatcgcagcaaggagtctctggtttcctttgccatgcagcatgtgagaagcacagtcaccgagctgtggacagggaatttcgtgaactctattcaaaccgcttttgccgctggaatcggctggctcattacattctgttccaaaggcggggactgcctgaccagccagacgcggcttcgcctgtctggaatgctcgatggcctggtgaatgtcgggtggatggactgtgccacccaggataacctttgcaagtccctggacatcacaaccagcacaaccgcgtatttccctccgggagccacgctcaacaataaagaaaagaactccatcctgctgctccactga

SEQ ID NO: 7728 - RNA, 999 nt, synthetic construct
  misc_feature 1..999: note = derived and/or modified sequence opt6 fromPDI/PDIA__Homo_sapiens__AAG32626
  source 1..999: mol_type = other RNA
atgggagtatggctaaacaaagacgattacatacgagatctaaaaagaataatattatgctttttaatagtatatatggcaatattagtaggaacagaccaagatttctatagtttattaggtgtatcaaaaacagcatcgagcagagaaataagacaagcatttaaaaaactagcactaaaactacatccagataaaaatccaaataatccaaacgcacacggaaactttctaaaaataaatagagcatatgaagtattaaaagatgaagatctaagaaaaaaatacgataagtatggagaaaaaggtctagaagacaaccaaggaggacaatacgaaagctggaattactaccgatacgatttcggtatatatgacgatgacccagaaataataacattagaaagaagagaattcgacgcagcagtaaactctggagaactatggttcgttaacttttactctcccggatgttcacactgtcacgatttagcaccaacatggagagactttgcaaaagaagttgacggattattaagaataggagcagtaaactgcggagacgatagaatgctatgtcgaatgaaaggagtaaatagctacccaagtctatttatattcagatcaggaatggcaccagtaaaataccacggcgatagatcaaaagaaagcttagtatcattcgcaatgcaacacgtaagatcgacagtaacagaactatggacaggaaactttgtaaatagcatacaaactgcatttgcagctggaataggatggctaataacattttgttcaaaaggaggagattgcttaacatctcaaacaagactaagactatcaggaatgttagacggactagtaaacgtaggatggatggattgtgctacacaagacaatttatgtaaaagtttagatataacaacatcaacaacagcatattttccaccaggagcaactctaaataacaaagaaaaaaactcgatactattattacactaa

SEQ ID NO: 7729 - protein, 177 aa, synthetic construct [sequence omitted]

SEQ ID NO: 7730 - RNA, 534 nt, synthetic construct
  misc_feature 1..534: note = PDI/PDIA__Homo_sapiens__AAQ14565
  source 1..534: mol_type = other RNA
atgggagtctggttaaataaagatgactatatcagagacttgaaaaggatcattctctgttttctgatagtgtatatggccattttagtgggcacagatcaggatttttacagtttacttggagtgtccaaaactgcaagcagtagagaaataagacaagctttcaagaaattggcattgaagttacatcctgataaaaacccgaataacccaaatgcacatggcgattttttaaaaataaatagagcatatgaagtactcaaagatgaagatctacggaaaaagtatgacaaatatggagaaaagggacttgaggataatcaaggtggccagtatgaaagctggaactattatcgttatgattttggtatttatgatgatgatcctgaaatcataacattggaaagaagagaatttgatgctgctgttaattctggagaactgtggtttgtaaatttttactccccaggctgttcacactgccatgatttagctcccacatggagagactttgccaaagaatccctgagataa

SEQ ID NO: 7731 - RNA, 534 nt, synthetic construct
  misc_feature 1..534: note = derived and/or modified sequence opt1 fromPDI/PDIA__Homo_sapiens__AAQ14565
  source 1..534: mol_type = other RNA
atgggcgtgtggctgaacaaggacgactacatccgcgacctcaagcggatcatcctgtgcttcctgatcgtctacatggccatcctcgtggggaccgaccaggacttctacagcctgctgggcgtgtccaagaccgccagctcccgcgagatccggcaggcgttcaagaagctcgccctgaagctgcaccccgacaagaacccgaacaaccccaacgcccacggggacttcctcaagatcaaccgcgcctacgaggtcctgaaggacgaggacctgcggaagaagtacgacaagtacggcgagaaggggctcgaggacaaccagggcggccagtacgagagctggaactactaccgctacgacttcgggatctacgacgacgaccccgagatcatcacgctggagcggcgcgagttcgacgccgcggtgaactccggcgagctgtggttcgtgaacttctacagccccgggtgctcccactgccacgacctcgccccgacctggcgggacttcgccaaggagagcctgcgctga

SEQ ID NO: 7732 - RNA, 534 nt, synthetic construct
  misc_feature 1..534: note = derived and/or modified sequence opt2 fromPDI/PDIA__Homo_sapiens__AAQ14565
  source 1..534: mol_type = other RNA
atgggcgtctggctcaacaaggacgactacatccgcgacctcaagcgcatcatcctctgcttcctcatcgtctacatggccatcctcgtcggcaccgaccaggacttctactccctcctcggcgtctccaagaccgcctcctcccgcgagatccgccaggccttcaagaagctcgccctcaagctccaccccgacaagaaccccaacaaccccaacgcccacggcgacttcctcaagatcaaccgcgcctacgaggtcctcaaggacgaggacctccgcaagaagtacgacaagtacggcgagaagggcctcgaggacaaccagggcggccagtacgagtcctggaactactaccgctacgacttcggcatctacgacgacgaccccgagatcatcaccctcgagcgccgcgagttcgacgccgccgtcaactccggcgagctctggttcgtcaacttctactcccccggctgctcccactgccacgacctcgcccccacctggcgcgacttcgccaaggagtccctccgctga

SEQ ID NO: 7733 - RNA, 534 nt, synthetic construct
  misc_feature 1..534: note = derived and/or modified sequence opt3 fromPDI/PDIA__Homo_sapiens__AAQ14565
  source 1..534: mol_type = other RNA
atgggcgtgtggctgaacaaggacgattacatcagagacctcaaaaggattatactttgcttcctgatcgtctatatggccattttggttgggaccgatcaggacttttacagcttactgggagtgtccaagacagcttcttcacgggagatccgccaagcattcaaaaagctagccctcaaactgcaccccgataagaatcctaacaatccaaacgcgcatggtgactttcttaagattaatcgagcttatgaagtactgaaagatgaggacttgcgtaagaaatacgataagtatggcgaaaaagggctcgaggacaaccagggaggccagtacgaaagttggaattattacagatacgatttcggtatctatgacgatgacccggagataatcactctggagaggcgggaatttgacgccgcagtgaacagcggggagctgtggttcgtcaatttttactcccccggatgttctcactgccatgatctcgcccctacgtggcgcgacttcgctaaggaatcgttaagatga

SEQ ID NO: 7734 - RNA, 534 nt, synthetic construct
  misc_feature 1..534: note = derived and/or modified sequence opt4 fromPDI/PDIA__Homo_sapiens__AAQ14565
  source 1..534: mol_type = other RNA
atgggcgtgtggctgaacaaggacgactacatcagagacctgaagagaatcatcctgtgcttcctgatcgtgtacatggccatcctggtgggcaccgaccaggacttctacagcctgctgggcgtgagcaagaccgccagcagcagagagatcagacaggccttcaagaagctggccctgaagctgcaccccgacaagaaccccaacaaccccaacgcccacggcgacttcctgaagatcaacagagcctacgaggtgctgaaggacgaggacctgagaaagaagtacgacaagtacggcgagaagggcctggaggacaaccagggcggccagtacgagagctggaactactacagatacgacttcggcatctacgacgacgaccccgagatcatcaccctggagagaagagagttcgacgccgccgtgaacagcggcgagctgtggttcgtgaacttctacagccccggctgcagccactgccacgacctggcccccacctggagagacttcgccaaggagagcctgagatga

SEQ ID NO: 7735 - RNA, 534 nt, synthetic construct
  misc_feature 1..534: note = derived and/or modified sequence opt5 fromPDI/PDIA__Homo_sapiens__AAQ14565
  source 1..534: mol_type = other RNA
atgggcgtgtggctgaacaaggacgattacatcagagacctcaaacggattatcctgtgcttccttattgtctatatggccatcctggttgggaccgatcaggacttttacagcctcctgggagtgtccaagacagcttctagccgcgagattagacaagccttcaaaaagctggcgcttaaactccaccccgataagaatcctaacaatccgaacgctcatggcgactttctgaagatcaatcgggcctatgaagtgctgaaagatgaggacctccgcaagaaatacgataagtatggggaaaaaggactggaggacaaccagggcgggcagtacgaatcctggaattattacagatacgatttcggaatctatgacgatgaccccgagattatcacgcttgagcggcgcgaatttgacgccgctgtcaactctggcgagctgtggttcgtgaatttttacagccctggctgttcccactgccatgatctcgcccccacctggagagacttcgctaaggaatctctgcggtga

SEQ ID NO: 7736 - RNA, 534 nt, synthetic construct
  misc_feature 1..534: note = derived and/or modified sequence opt6 fromPDI/PDIA__Homo_sapiens__AAQ14565
  source 1..534: mol_type = other RNA
atgggagtatggctaaacaaagacgactacataagagacttaaaaagaataatactatgcttcctaatagtatacatggcaatactagtaggaacagaccaagacttctacagcctactaggagtatcaaaaacagcatcatcaagagaaatacgacaagcattcaaaaaattagcactaaaattacatccagacaaaaacccaaacaacccaaacgcacacggagacttcctaaaaataaacagagcatacgaagtattaaaagacgaagacttaagaaaaaaatacgacaaatacggagaaaaaggactagaagacaaccaaggaggacaatacgaatcatggaactactacagatacgacttcggaatatacgacgacgacccagaaataataacactagaaagaagagaattcgacgcagcagtaaactcaggagaactatggttcgtaaacttctactcaccaggatgcagtcactgccacgacctagcaccaacatggagagacttcgcaaaagaatcactacgataa

SEQ ID NO: 7737 - protein, 480 aa, synthetic construct [sequence omitted]

SEQ ID NO: 7738 - RNA, 1443 nt, synthetic construct
  misc_feature 1..1443: note = Akt__Homo_sapiens__ABY87524
  source 1..1443: mol_type = other RNA
atgagcgacgtggctattgtgaaggagggttggctgcacaaacgaggggagtacatcaagacctggcggccacgctacttcctcctcaagaatgatggcaccttcattggctacaaggagcggccgcaggatgtggaccaacgtgaggctcccctcaacaacttctctgtggcgcagtgccagctgatgaagacggagcggccccggcccaacaccttcatcatccgctgcctgcagtggaccactgtcatcgaacgcaccttccatgtggagactcctgaggagcgggaggagtggacaaccgccatccagactgtggctgacggcctcaagaagcaggaggaggaggagatggacttccggtcgggctcacccagtgacaactcaggggctgaagagatggaggtgtccctggccaagcccaagcaccgcgtgaccatgaacgagtttgagtacctgaagctgctgggcaagggcactttcggcaaggtgatcctggtgaaggagaaggccacaggccgctactacgccatgaagatcctcaagaaggaagtcatcgtggccaaggacgaggtggcccacacactcaccgagaaccgcgtcctgcagaactccaggcaccccttcctcacagccctgaagtactctttccagacccacgaccgcctctgctttgtcatggagtacgccaacgggggcgagctgttcttccacctgtcccgggagcgtgtgttctccgaggaccgggcccgcttctatggcgctgagattgtgtcagccctggactacctgcactcggagaagaacgtggtgtaccgggacctcaagctggagaacctcatgctggacaaggacgggcacattaagatcacagacttcgggctgtgcaaggaggggatcaaggacggtgccaccatgaagaccttttgcggcacacctgagtacctggcccccgaggtgctggaggacaatgactacggccgtgcagtggactggtgggggctgggcgtggtcatgtacgagatgatgtgcggtcgcctgcccttctacaaccaggaccatgagaagctttttgagctcatcctcatggaggagatccgcttcccgcgcacgcttggtcccgaggccaagtccttgctttcagggctgctcaagaaggaccccaagcagaggcttggcgggggctccgaggacgccaaggagatcatgcagcatcgcttctttgccggtatcgtgtggcagcacgtgtacgagaagaagctcagcccacccttcaagccccaggtcacgtcggagactgacaccaggtattttgatgaggagttcacggcccagatgatcaccatcacaccacctgaccaagatgacagcatggagtgtgtggacagcgagcgcaggccccacttcccccagttctcctactcggccagcggcacggcctga

SEQ ID NO: 7739 - RNA, 1443 nt, synthetic construct
  misc_feature 1..1443: note = derived and/or modified sequence opt1 fromAkt__Homo_sapiens__ABY87524
  source 1..1443: mol_type = other RNA
atgagcgacgtggccatcgtcaaggagggctggctgcacaagcgcggggagtacatcaagacctggcggccccgctacttcctcctgaagaacgacggcaccttcatcgggtacaaggagcggccgcaggacgtggaccagcgcgaggcgcccctgaacaacttctccgtggcccagtgccagctcatgaagacggagcggccccgccccaacaccttcatcatccggtgcctgcagtggaccaccgtcatcgagcgcacgttccacgtggagaccccggaggagcgggaggagtggaccaccgccatccagacggtggccgacggcctgaagaagcaggaggaggaggagatggacttccgcagcgggtcccccagcgacaactccggcgccgaggagatggaggtcagcctcgccaagcccaagcaccgggtgaccatgaacgagttcgagtacctgaagctgctcggcaaggggaccttcggcaaggtgatcctggtcaaggagaaggcgaccgggcgctactacgccatgaagatcctgaagaaggaggtgatcgtggccaaggacgaggtcgcccacacgctcaccgagaaccgggtgctgcagaactcccgccaccccttcctgaccgcgctcaagtacagcttccagacccacgaccggctgtgcttcgtgatggagtacgccaacggcggggagctgttcttccacctctcccgcgagcgggtcttcagcgaggaccgcgcccggttctacggcgccgagatcgtgtccgccctggactacctgcacagcgagaagaacgtggtctaccgcgacctcaagctggagaacctgatgctcgacaaggacggccacatcaagatcacggacttcgggctgtgcaaggagggcatcaaggacggggcgaccatgaagaccttctgcggcaccccggagtacctggcccccgaggtgctcgaggacaacgactacggccgggccgtggactggtgggggctgggcgtcgtgatgtacgagatgatgtgcgggcgcctgcccttctacaaccaggaccacgagaagctgttcgagctcatcctgatggaggagatccgcttcccccggacgctcggcccggaggccaagtccctgctgagcgggctcctgaagaaggaccccaagcagcgcctgggcggcgggtccgaggacgccaaggagatcatgcagcaccggttcttcgcgggcatcgtgtggcagcacgtctacgagaagaagctcagcccgcccttcaagccccaggtgacctccgagaccgacacccgctacttcgacgaggagttcacggcccagatgatcaccatcaccccgcccgaccaggacgacagcatggagtgcgtcgactccgagcggcgcccccacttcccccagttcagctacagcgcctccgggaccgcctga

SEQ ID NO: 7740 - RNA, 1443 nt, synthetic construct
  misc_feature 1..1443: note = derived and/or modified sequence opt2 fromAkt__Homo_sapiens__ABY87524
  source 1..1443: mol_type = other RNA
atgtccgacgtcgccatcgtcaaggagggctggctccacaagcgcggcgagtacatcaagacctggcgcccccgctacttcctcctcaagaacgacggcaccttcatcggctacaaggagcgcccccaggacgtcgaccagcgcgaggcccccctcaacaacttctccgtcgcccagtgccagctcatgaagaccgagcgcccccgccccaacaccttcatcatccgctgcctccagtggaccaccgtcatcgagcgcaccttccacgtcgagacccccgaggagcgcgaggagtggaccaccgccatccagaccgtcgccgacggcctcaagaagcaggaggaggaggagatggacttccgctccggctccccctccgacaactccggcgccgaggagatggaggtctccctcgccaagcccaagcaccgcgtcaccatgaacgagttcgagtacctcaagctcctcggcaagggcaccttcggcaaggtcatcctcgtcaaggagaaggccaccggccgctactacgccatgaagatcctcaagaaggaggtcatcgtcgccaaggacgaggtcgcccacaccctcaccgagaaccgcgtcctccagaactcccgccaccccttcctcaccgccctcaagtactccttccagacccacgaccgcctctgcttcgtcatggagtacgccaacggcggcgagctcttcttccacctctcccgcgagcgcgtcttctccgaggaccgcgcccgcttctacggcgccgagatcgtctccgccctcgactacctccactccgagaagaacgtcgtctaccgcgacctcaagctcgagaacctcatgctcgacaaggacggccacatcaagatcaccgacttcggcctctgcaaggagggcatcaaggacggcgccaccatgaagaccttctgcggcacccccgagtacctcgcccccgaggtcctcgaggacaacgactacggccgcgccgtcgactggtggggcctcggcgtcgtcatgtacgagatgatgtgcggccgcctccccttctacaaccaggaccacgagaagctcttcgagctcatcctcatggaggagatccgcttcccccgcaccctcggccccgaggccaagtccctcctctccggcctcctcaagaaggaccccaagcagcgcctcggcggcggctccgaggacgccaaggagatcatgcagcaccgcttcttcgccggcatcgtctggcagcacgtctacgagaagaagctctccccccccttcaagccccaggtcacctccgagaccgacacccgctacttcgacgaggagttcaccgcccagatgatcaccatcaccccccccgaccaggacgactccatggagtgcgtcgactccgagcgccgcccccacttcccccagttctcctactccgcctccggcaccgcctga

SEQ ID NO: 7741 - RNA, 1443 nt, synthetic construct
  misc_feature 1..1443: note = derived and/or modified sequence opt3 fromAkt__Homo_sapiens__ABY87524
  source 1..1443: mol_type = other RNA
atgagcgacgtggccatcgtcaaggagggctggctgcacaaaagaggggaatacattaagacctggaggccccggtatttcctccttaaaaacgatggaacatttataggttacaaggagcgccctcaggacgttgatcaacgagaagctccactgaataacttctccgtggcacagtgccagttgatgaaaactgagcgtccgagacccaatacgtttatcattaggtgtttacagtggaccacagtaatcgaacggactttccatgtggagacccctgaggaacgcgaggaatggacaaccgccattcaaactgtcgcggacggcctgaagaagcaggaggaggaagagatggattttagatctgggtcaccaagtgacaacagcggagctgaagagatggaagtgtccctagccaaacccaagcacagggttacaatgaatgagttcgagtatctcaaactgcttggcaagggtacctttgggaaagtgatcctggtcaaggaaaaggcaacgggacggtactatgccatgaaaatattgaagaaagaggtgatcgtagctaaggatgaagttgcacatactctcaccgagaaccgcgtgctgcaaaattctcgacaccctttcctgacagccctcaaatactcgtttcagactcatgacagattatgcttcgtcatggaatatgctaacggcggcgagctgtttttccacctttcaagggagcgggtgtttagcgaagatcgtgcccgcttctacggggcggagattgtgagtgcattggactacctgcactccgaaaagaatgtcgtttatagagatctaaaactcgagaacctgatgcttgacaaggatggacatatcaagattaccgacttcggtctgtgtaaagaaggcatcaaggacggggccacaatgaaaaccttttgcggaacgccagagtacttggctcccgaggtgctcgaagataatgactatggcagggccgtagattggtggggtctgggggtggtcatgtacgagatgatgtgtggacggttacctttctataaccaggaccacgaaaagctgtttgagctcatacttatggaggaaattcgattcccacgcactctgggcccggaggcaaaatctttgctaagcggcctgctcaagaaggatcccaaacagagacttgggggaggttccgaagacgctaaggagatcatgcagcataggtttttcgccggcattgtgtggcagcacgtttacgaaaagaaactgtcacctccatttaaaccccaagtgacaagtgagaccgatactcggtatttcgacgaggaatttacagcgcagatgatcaccatcacgcctccagatcaggacgatagcatggagtgcgtcgactctgaacgcagaccccacttcccgcaattttcctactcagccagcgggaccgcatga

SEQ ID NO: 7742 - RNA, 1443 nt, synthetic construct
  misc_feature 1..1443: note = derived and/or modified sequence opt4 fromAkt__Homo_sapiens__ABY87524
  source 1..1443: mol_type = other RNA
atgagcgacgtggccatcgtgaaggagggctggctgcacaagagaggcgagtacatcaagacctggagacccagatacttcctgctgaagaacgacggcaccttcatcggctacaaggagagaccccaggacgtggaccagagagaggcccccctgaacaacttcagcgtggcccagtgccagctgatgaagaccgagagacccagacccaacaccttcatcatcagatgcctgcagtggaccaccgtgatcgagagaaccttccacgtggagacccccgaggagagagaggagtggaccaccgccatccagaccgtggccgacggcctgaagaagcaggaggaggaggagatggacttcagaagcggcagccccagcgacaacagcggcgccgaggagatggaggtgagcctggccaagcccaagcacagagtgaccatgaacgagttcgagtacctgaagctgctgggcaagggcaccttcggcaaggtgatcctggtgaaggagaaggccaccggcagatactacgccatgaagatcctgaagaaggaggtgatcgtggccaaggacgaggtggcccacaccctgaccgagaacagagtgctgcagaacagcagacaccccttcctgaccgccctgaagtacagcttccagacccacgacagactgtgcttcgtgatggagtacgccaacggcggcgagctgttcttccacctgagcagagagagagtgttcagcgaggacagagccagattctacggcgccgagatcgtgagcgccctggactacctgcacagcgagaagaacgtggtgtacagagacctgaagctggagaacctgatgctggacaaggacggccacatcaagatcaccgacttcggcctgtgcaaggagggcatcaaggacggcgccaccatgaagaccttctgcggcacccccgagtacctggcccccgaggtgctggaggacaacgactacggcagagccgtggactggtggggcctgggcgtggtgatgtacgagatgatgtgcggcagactgcccttctacaaccaggaccacgagaagctgttcgagctgatcctgatggaggagatcagattccccagaaccctgggccccgaggccaagagcctgctgagcggcctgctgaagaaggaccccaagcagagactgggcggcggcagcgaggacgccaaggagatcatgcagcacagattcttcgccggcatcgtgtggcagcacgtgtacgagaagaagctgagcccccccttcaagccccaggtgaccagcgagaccgacaccagatacttcgacgaggagttcaccgcccagatgatcaccatcaccccccccgaccaggacgacagcatggagtgcgtggacagcgagagaagaccccacttcccccagttcagctacagcgccagcggcaccgcctga

SEQ ID NO: 7743 - RNA, 1443 nt, synthetic construct
  misc_feature 1..1443: note = derived and/or modified sequence opt5 fromAkt__Homo_sapiens__ABY87524
  source 1..1443: mol_type = other RNA
atgagcgacgtggccatcgtcaaggagggctggctgcacaaaagaggggaatacattaagacctggcggccccgctatttcctcctgaaaaacgatggaacatttatcggctacaaggagagacctcaggacgttgatcaacgggaagctccgcttaataacttctccgtggcccagtgccagctgatgaaaacggagcgccccagacctaatacctttattatccggtgtctccagtggacaaccgtgattgaacgcacattccatgtcgagacccccgaggaaagagaggaatggacaaccgcgatccaaacggtggctgacgggctgaagaagcaggaggaggaagagatggattttcggtctggaagcccttccgacaactctggcgccgaagagatggaagttagccttgccaaacccaagcaccgcgtgaccatgaatgagttcgagtatctgaaactcctggggaagggaacatttggcaaagtcatcctggtgaaggaaaaggctaccggcagatactatgccatgaaaattctcaagaaagaggttatcgtggctaaggatgaagtcgcccatacactgaccgagaaccgggtgcttcaaaattcccgccaccctttcctgacggcgctcaaatactcttttcagacacatgacagactgtgcttcgtgatggaatatgccaacgggggagagctgtttttccaccttagccgggagcgcgtcttttccgaagatagagctcggttctacggcgccgagattgttagcgctctcgactacctgcactctgaaaagaatgtggtgtatagagatctgaaactcgagaacctgatgcttgacaaggatgggcatatcaagattaccgacttcggactgtgtaaagaaggcatcaaggacggggccacaatgaaaaccttttgcggaaccccggagtacctcgcgcccgaggtcctggaagataatgactatggccgcgccgtggattggtggggccttggggttgtgatgtacgagatgatgtgtggacggctgcctttctataaccaggaccacgaaaagctctttgagctgattctgatggaggaaatcagattcccccgcacactcggccctgaggctaaatccctgcttagcgggctgctcaagaaggatcccaaacagcggctgggaggcgggtctgaagacgccaaggagatcatgcagcatagatttttcgctggaattgtctggcagcacgtgtacgaaaagaaactttccccgccttttaaaccccaagttacgagcgagaccgatacacgctatttcgacgaggaatttaccgcccagatgatcacaattacccctcccgatcaggacgattctatggagtgcgtggactccgaacggagaccccacttccctcaatttagctactccgcctctggcacggcttga

SEQ ID NO: 7744 - protein, 480 aa, synthetic construct [sequence omitted]

SEQ ID NO: 7745 - RNA, 1443 nt, synthetic construct; identical to SEQ ID NO: 7738
  misc_feature 1..1443: note = Akt__Homo_sapiens__AAH00479
  source 1..1443: mol_type = other RNA

SEQ ID NO: 7746 - RNA, 1443 nt, synthetic construct; identical to SEQ ID NO: 7739
  misc_feature 1..1443: note = derived and/or modified sequence opt1 fromAkt__Homo_sapiens__AAH00479
  source 1..1443: mol_type = other RNA

SEQ ID NO: 7747 - RNA, 1443 nt, synthetic construct; identical to SEQ ID NO: 7740
  misc_feature 1..1443: note = derived and/or modified sequence opt2 fromAkt__Homo_sapiens__AAH00479
  source 1..1443: mol_type = other RNA

SEQ ID NO: 7748 - RNA, 1443 nt, synthetic construct; identical to SEQ ID NO: 7741
  misc_feature 1..1443: note = derived and/or modified sequence opt3 fromAkt__Homo_sapiens__AAH00479
  source 1..1443: mol_type = other RNA

SEQ ID NO: 7749 - RNA, 1443 nt, synthetic construct; identical to SEQ ID NO: 7742
  misc_feature 1..1443: note = derived and/or modified sequence opt4 fromAkt__Homo_sapiens__AAH00479
  source 1..1443: mol_type = other RNA

SEQ ID NO: 7750 - RNA, 1443 nt, synthetic construct; identical to SEQ ID NO: 7743
  misc_feature 1..1443: note = derived and/or modified sequence opt5 fromAkt__Homo_sapiens__AAH00479
  source 1..1443: mol_type = other RNA

SEQ ID NO: 7751 - protein, 481 aa, synthetic construct
  REGION 1..481: note = Akt__Homo_sapiens__P31751
MNEVSVIKEGWLHKRGEYIKTWRPRYFLLKSDGSFIGYKERPEAPDQTLPPLNNFSVAECQLMKTERPRPNTFVIRCLQWTTVIERTFHVDSPDEREEWMRAIQMVANSLKQRAPGEDPMDYKCGSPSDSSTTEEMEVAVSKARAKVTMNDFDYLKLLGKGTFGKVILVREKATGRYYAMKILRKEVIIAKDEVAHTVTESRVLQNTRHPFLTALKYAFQTHDRLCFVMEYANGGELFFHLSRERVFTEERARFYGAEIVSALEYLHSRDVVYRDIKLENLMLDKDGHIKITDFGLCKEGISDGATMKTFCGTPEYLAPEVLEDNDYGRAVDWWGLGVVMYEMMCGRLPFYNQDHERLFELILMEEIRFPRTLSPEAKSLLAGLLKKDPKQRLGGGPSDAKEVMEHRFFLSINWQDVVQKKLLPPFKPQVTSEVDTRYFDDEFTAQSITITPPDRYDSLGLLELDQRTHFPQFSYSASIRE

SEQ ID NO: 7752 - RNA, 1446 nt, synthetic construct
  misc_feature 1..1446: note = Akt__Homo_sapiens__AAA58364
  source 1..1446: mol_type = other RNA
atgaatgaggtgtctgtcatcaaagaaggctggctccacaagcgtggtgaatacatcaagacctggaggccacggtacttcctgctgaagagcgacggctccttcattgggtacaaggagaggcccgaggcccctgatcagactctaccccccttaaacaacttctccgtagcagaatgccagctgatgaagaccgagaggccgcgacccaacacctttgtcatacgctgcctgcagtggaccacagtcatcgagaggaccttccacgtggattctccagacgagagggaggagtggatgcgggccatccagatggtcgccaacagcctcaagcagcgggccccaggcgaggaccccatggactacaagtgtggctcccccagtgactcctccacgactgaggagatggaagtggcggtcagcaaggcacgggctaaagtgaccatgaatgacttcgactatctcaaactccttggcaagggaacctttggcaaagtcatcctggtgcgggagaaggccactggccgctactacgccatgaagatcctgcgaaaggaagtcatcattgccaaggatgaagtcgctcacacagtcaccgagagccgggtcctccagaacaccaggcacccgttcctcactgcgctgaagtatgccttccagacccacgaccgcctgtgctttgtgatggagtatgccaacgggggtgagctgttcttccacctgtcccgggagcgtgtcttcacagaggagcgggcccggttttatggtgcagagattgtctcggctcttgagtacttgcactcgcgggacgtggtataccgcgacatcaagctggaaaacctcatgctggacaaagatggccacatcaagatcactgactttggcctctgcaaagagggcatcagtgacggggccaccatgaaaaccttctgtgggaccccggagtacctggcgcctgaggtgctggaggacaatgactatggccgggccgtggactggtgggggctgggtgtggtcatgtacgagatgatgtgcggccgcctgcccttctacaaccaggaccacgagcgcctcttcgagctcatcctcatggaagagatccgcttcccgcgcacgctcagccccgaggccaagtccctgcttgctgggctgcttaagaaggaccccaagcagaggcttggtggggggcccagcgatgccaaggaggtcatggagcacaggttcttcctcagcatcaactggcaggacgtggtccagaagaagctcctgccacccttcaaacctcaggtcacgtccgaggtcgacacaaggtacttcgatgatgaatttaccgcccagtccatcacaatcacaccccctgaccgctatgacagcctgggcttactggagctggaccagcggacccacttcccccagttctcctactcggccagcatccgcgagtga

SEQ ID NO: 7753 - RNA, 1446 nt, synthetic construct
  misc_feature 1..1446: note = derived and/or modified sequence opt1 fromAkt__Homo_sapiens__AAA58364
  source 1..1446: mol_type = other RNA
atgaacgaggtgagcgtcatcaaggagggctggctgcacaagcgcggggagtacatcaagacctggcggccccgctacttcctcctgaagtccgacggcagcttcatcgggtacaaggagcggcccgaggcccccgaccagaccctgccgcccctcaacaacttctccgtggccgagtgccagctgatgaagacggagcgcccccggcccaacaccttcgtgatccgctgcctgcagtggaccaccgtcatcgagcggacgttccacgtggacagccccgacgagcgcgaggagtggatgcgggcgatccagatggtggccaactccctcaagcagcgcgcccccggcgaggacccgatggactacaagtgcgggagcccctccgacagctccaccaccgaggagatggaggtcgccgtgagcaaggcccgggcgaaggtgaccatgaacgacttcgactacctgaagctgctcggcaagggcacgttcgggaaggtcatcctggtgcgcgagaaggccaccggccggtactacgccatgaagatcctgcgcaaggaggtgatcatcgccaaggacgaggtcgcgcacaccgtgaccgagtcccgggtgctccagaacacgcgccaccccttcctgaccgccctgaagtacgccttccagacccacgaccggctctgcttcgtcatggagtacgccaacgggggcgagctgttcttccacctgagccgcgagcgggtgttcaccgaggagcgcgcccggttctacggggcggagatcgtgtccgccctcgagtacctgcacagccgcgacgtcgtgtaccgcgacatcaagctggagaacctcatgctggacaaggacggccacatcaagatcacggacttcggcctgtgcaaggaggggatctccgacggcgccaccatgaagaccttctgcgggacccccgagtacctcgccccggaggtgctggaggacaacgactacggccgggccgtcgactggtggggcctgggggtggtgatgtacgagatgatgtgcggccgcctccccttctacaaccaggaccacgagcggctgttcgagctgatcctcatggaggagatccgcttcccccggacgctgagccccgaggcgaagtccctgctcgccgggctgctgaagaaggacccgaagcagcgcctcggcgggggccccagcgacgccaaggaggtcatggagcaccggttcttcctgtccatcaactggcaggacgtggtccagaagaagctgctcccgcccttcaagccccaggtgaccagcgaggtggacacccgctacttcgacgacgagttcaccgcccagagcatcacgatcaccccgcccgaccggtacgactccctgggcctgctcgagctggaccagcgcacccacttcccccagttcagctactccgccagcatccgggagtga

SEQ ID NO: 7754 - RNA, 1446 nt, synthetic construct
  misc_feature 1..1446: note = derived and/or modified sequence opt2 fromAkt__Homo_sapiens__AAA58364
  source 1..1446: mol_type = other RNA
atgaacgaggtctccgtcatcaaggagggctggctccacaagcgcggcgagtacatcaagacctggcgcccccgctacttcctcctcaagtccgacggctccttcatcggctacaaggagcgccccgaggcccccgaccagaccctcccccccctcaacaacttctccgtcgccgagtgccagctcatgaagaccgagcgcccccgccccaacaccttcgtcatccgctgcctccagtggaccaccgtcatcgagcgcaccttccacgtcgactcccccgacgagcgcgaggagtggatgcgcgccatccagatggtcgccaactccctcaagcagcgcgcccccggcgaggaccccatggactacaagtgcggctccccctccgactcctccaccaccgaggagatggaggtcgccgtctccaaggcccgcgccaaggtcaccatgaacgacttcgactacctcaagctcctcggcaagggcaccttcggcaaggtcatcctcgtccgcgagaaggccaccggccgctactacgccatgaagatcctccgcaaggaggtcatcatcgccaaggacgaggtcgcccacaccgtcaccgagtcccgcgtcctccagaacacccgccaccccttcctcaccgccctcaagtacgccttccagacccacgaccgcctctgcttcgtcatggagtacgccaacggcggcgagctcttcttccacctctcccgcgagcgcgtcttcaccgaggagcgcgcccgcttctacggcgccgagatcgtctccgccctcgagtacctccactcccgcgacgtcgtctaccgcgacatcaagctcgagaacctcatgctcgacaaggacggccacatcaagatcaccgacttcggcctctgcaaggagggcatctccgacggcgccaccatgaagaccttctgcggcacccccgagtacctcgcccccgaggtcctcgaggacaacgactacggccgcgccgtcgactggtggggcctcggcgtcgtcatgtacgagatgatgtgcggccgcctccccttctacaaccaggaccacgagcgcctcttcgagctcatcctcatggaggagatccgcttcccccgcaccctctcccccgaggccaagtccctcctcgccggcctcctcaagaaggaccccaagcagcgcctcggcggcggcccctccgacgccaaggaggtcatggagcaccgcttcttcctctccatcaactggcaggacgtcgtccagaagaagctcctcccccccttcaagccccaggtcacctccgaggtcgacacccgctacttcgacgacgagttcaccgcccagtccatcaccatcaccccccccgaccgctacgactccctcggcctcctcgagctcgaccagcgcacccacttcccccagttctcctactccgcctccatccgcgagtga

SEQ ID NO: 7755 - RNA, 1446 nt, synthetic construct
  misc_feature 1..1446: note = derived and/or modified sequence opt3 fromAkt__Homo_sapiens__AAA58364
  source 1..1446: mol_type = other RNA
atgaacgaggtgagcgtcatcaaggaaggctggctgcacaaaagaggggagtacattaagacctggaggccccggtatttcctccttaaatccgacggatcttttataggttacaaggaacgccctgaggccccagatcagacactgccgcccttgaataacttctcagttgctgaatgccaattaatgaaaactgagcgacctcgtccaaatacgtttgtgatcagatgtctgcagtggaccacagtaattgagaggactttccatgtggacagtcccgatgaacgggaggaatggatgcgcgcaatccagatggtcgccaacagcctaaagcagagagcgcctggcgaggacccaatggattataagtgcgggtccccctctgactcgtcaaccacagaggaaatggaggtggctgttagcaaagccagggcaaaggtgaccatgaatgattttgactacctcaaactgcttggaaagggcactttcggtaaagtcattctggtgcgggaaaaggccacagggcgctattacgctatgaagatcttgcgaaaagaggtaataatcgcaaaggatgaagttgcccacaccgtgacggagagtagagtcctccaaaacactaggcatccttttctgaccgctctgaaatatgccttccagacacacgaccggctctgttttgtgatggagtacgcgaatggaggcgaattattctttcatctgtcccgtgagcgcgtgttcactgaagagagagcaaggttttacggcgccgaaattgtctctgctcttgagtatttgcacagccgggatgttgtgtaccgagacatcaagctggagaacctaatgctcgataaagacgggcacattaagatcaccgacttcggactgtgcaaagaaggtatatccgatggcgccacaatgaagaccttctgtgggacgccagagtatcttgcaccggaagtactggaggacaatgattacggacgcgctgtggactggtggggcttgggtgtcgtgatgtatgaaatgatgtgcgggagactccccttttacaaccaggatcatgagaggctgttcgagttaattctgatggaagagatccggtttcctcgcactctctcaccagaagccaagagtcttctggcgggattgctgaaaaaggaccccaaacagagactaggcggcgggcctagcgatgccaaggaggttatggagcacaggttctttctctctattaattggcaagacgtggtccagaaaaagctgcttccacccttcaagcctcaggtgacatccgaagtagatacccgttattttgacgatgagttcactgcacagtcaatcacaatcaccccgcccgaccggtacgacagcctgggattgctcgaactggatcaacgaacgcattttccacagttcagttactctgcttccattagagagtga

SEQ ID NO: 7756 - RNA, 1446 nt, synthetic construct
  misc_feature 1..1446: note = derived and/or modified sequence opt4 fromAkt__Homo_sapiens__AAA58364
  source 1..1446: mol_type = other RNA
atgaacgaggtgagcgtgatcaaggagggctggctgcacaagagaggcgagtacatcaagacctggagacccagatacttcctgctgaagagcgacggcagcttcatcggctacaaggagagacccgaggcccccgaccagaccctgccccccctgaacaacttcagcgtggccgagtgccagctgatgaagaccgagagacccagacccaacaccttcgtgatcagatgcctgcagtggaccaccgtgatcgagagaaccttccacgtggacagccccgacgagagagaggagtggatgagagccatccagatggtggccaacagcctgaagcagagagcccccggcgaggaccccatggactacaagtgcggcagccccagcgacagcagcaccaccgaggagatggaggtggccgtgagcaaggccagagccaaggtgaccatgaacgacttcgactacctgaagctgctgggcaagggcaccttcggcaaggtgatcctggtgagagagaaggccaccggcagatactacgccatgaagatcctgagaaaggaggtgatcatcgccaaggacgaggtggcccacaccgtgaccgagagcagagtgctgcagaacaccagacaccccttcctgaccgccctgaagtacgccttccagacccacgacagactgtgcttcgtgatggagtacgccaacggcggcgagctgttcttccacctgagcagagagagagtgttcaccgaggagagagccagattctacggcgccgagatcgtgagcgccctggagtacctgcacagcagagacgtggtgtacagagacatcaagctggagaacctgatgctggacaaggacggccacatcaagatcaccgacttcggcctgtgcaaggagggcatcagcgacggcgccaccatgaagaccttctgcggcacccccgagtacctggcccccgaggtgctggaggacaacgactacggcagagccgtggactggtggggcctgggcgtggtgatgtacgagatgatgtgcggcagactgcccttctacaaccaggaccacgagagactgttcgagctgatcctgatggaggagatcagattccccagaaccctgagccccgaggccaagagcctgctggccggcctgctgaagaaggaccccaagcagagactgggcggcggccccagcgacgccaaggaggtgatggagcacagattcttcctgagcatcaactggcaggacgtggtgcagaagaagctgctgccccccttcaagccccaggtgaccagcgaggtggacaccagatacttcgacgacgagttcaccgcccagagcatcaccatcaccccccccgacagatacgacagcctgggcctgctggagctggaccagagaacccacttcccccagttcagctacagcgccagcatcagagagtga

SEQ ID NO: 7757 - RNA, 1446 nt, synthetic construct
  misc_feature 1..1446: note = derived and/or modified sequence opt5 fromAkt__Homo_sapiens__AAA58364
  source 1..1446: mol_type = other RNA
atgaacgaggtgagcgtcatcaaggaaggctggctgcacaaaagaggggagtacattaagacctggcggccccgctatttcctcctgaaatccgacggatcttttatcggctacaaggaaagacctgaggccccggatcagacacttccccctctgaataacttcagcgttgctgaatgccaactcatgaaaacggagcggccccgccctaatacctttgtgattagatgtctgcagtggacaaccgtgatcgagcggacattccatgtcgactcccccgatgaacgcgaggaatggatgagagccattcagatggtggcgaactctcttaagcagcgggctcctggggaggacccgatggattataagtgcggaagcccctccgactctagcaccacagaggaaatggaggttgccgtgtccaaagcccgcgctaaggtcaccatgaatgattttgactacctgaaactcctgggcaaggggacgttcggaaaagtgatcctggttagagaaaaggccaccggccggtattacgctatgaagatcctccgcaaagaggtgattatcgccaaggatgaagtcgcgcacacagtgaccgagagcagagtgctgcaaaacacacggcatccttttcttaccgccctgaaatatgctttccagacgcacgaccgcctctgttttgtcatggagtacgccaatggcggggaactgttctttcatctttctagagagcgggttttcacagaagagagagctcgcttttacggagccgaaattgtgtccgcgctggagtatctccacagccgggatgtggtctacagagacatcaagctggagaacctgatgctcgataaagacggccacattaagatcaccgacttcgggctgtgcaaagaaggaatttctgatggcgccacaatgaagaccttctgtgggacccccgagtatcttgctcctgaagtgctggaggacaatgattacggacgcgccgttgactggtggggcctcggcgtggtcatgtatgaaatgatgtgcgggcggctgcccttttacaaccaggatcatgagagacttttcgagctgatcctcatggaagagatccgctttccgcggacactgtcccctgaagctaagagcctgctcgccggactgcttaaaaaggaccccaaacagagactgggcgggggaccttctgatgccaaggaggtgatggagcaccgcttctttctctccattaattggcaagacgttgtgcagaaaaagctgcttcctcccttcaagccccaggtcacgagcgaagtggatacccggtattttgacgatgagttcacagctcagtccatcaccattacaccgcccgacagatacgactctctgggcctcctggaactggatcaacgcacccattttcctcagttcagctactccgcgagcatccgggagtga

SEQ ID NO: 7758 - protein, 479 aa, synthetic construct
  REGION 1..479: note = Akt__Homo_sapiens__Q9Y243
MSDVTIVKEGWVQKRGEYIKNWRPRYFLLKTDGSFIGYKEKPQDVDLPYPLNNFSVAKCQLMKTERPKPNTFIIRCLQWTTVIERTFHVDTPEEREEWTEAIQAVADRLQRQEEERMNCSPTSQIDNIGEEEMDASTTHHKRKTMNDFDYLKLLGKGTFGKVILVREKASGKYYAMKILKKEVIIAKDEVAHTLTESRVLKNTRHPFLTSLKYSFQTKDRLCFVMEYVNGGELFFHLSRERVFSEDRTRFYGAEIVSALDYLHSGKIVYRDLKLENLMLDKDGHIKITDFGLCKEGITDAATMKTFCGTPEYLAPEVLEDNDYGRAVDWWGLGVVMYEMMCGRLPFYNQDHEKLFELILMEDIKFPRTLSSDAKSLLSGLLIKDPNKRLGGGPDDAKEIMRHSFFSGVNWQDVYDKKLVPPFKPQVTSETDTRYFDEEFTAQTITITPPEKYDEDGMDCMDNERRPHFPQFSYSASGRE

SEQ ID NO: 7759 - RNA, 1440 nt, synthetic construct
  misc_feature 1..1440: note = Akt__Homo_sapiens__AAD24196
  source 1..1440: mol_type = other RNA
atgagcgatgttaccattgtgaaagaaggttgggttcagaagaggggagaatatataaaaaactggaggccaagatacttccttttgaagacagatggctcattcataggatataaagagaaacctcaagatgtggatttaccttatcccctcaacaacttttcagtggcaaaatgccagttaatgaaaacagaacgaccaaagccaaacacatttataatcagatgtctccagtggactactgttatagagagaacatttcatgtagatactccagaggaaagggaagaatggacagaagctatccaggctgtagcagacagactgcagaggcaagaagaggagagaatgaattgtagtccaacttcacaaattgataatataggagaggaagagatggatgcctctacaacccatcataaaagaaagacaatgaatgattttgactatttgaaactactaggtaaaggcacttttgggaaagttattttggttcgagagaaggcaagtggaaaatactatgctatgaagattctgaagaaagaagtcattattgcaaaggatgaagtggcacacactctaactgaaagcagagtattaaagaacactagacatccctttttaacatccttgaaatattccttccagacaaaagaccgtttgtgttttgtgatggaatatgttaatgggggcgagctgtttttccatttgtcgagagagcgggtgttctctgaggaccgcacacgtttctatggtgcagaaattgtctctgccttggactatctacattccggaaagattgtgtaccgtgatctcaagttggagaatctaatgctggacaaagatggccacataaaaattacagattttggactttgcaaagaagggatcacagatgcagccaccatgaagacattctgtggcactccagaatatctggcaccagaggtgttagaagataatgactatggccgagcagtagactggtggggcctaggggttgtcatgtatgaaatgatgtgtgggaggttacctttctacaaccaggaccatgagaaactttttgaattaatattaatggaagacattaaatttcctcgaacactctcttcagatgcaaaatcattgctttcagggctcttgataaaggatccaaataaacgccttggtggaggaccagatgatgcaaaagaaattatgagacacagtttcttctctggagtaaactggcaagatgtatatgataaaaagcttgtacctccttttaaacctcaagtaacatctgagacagatactagatattttgatgaagaatttacagctcagactattacaataacaccacctgaaaaatatgatgaggatggtatggactgcatggacaatgagaggcggccgcatttccctcaattttcctactctgcaagtggacgagaataa

SEQ ID NO: 7760 - RNA, 1440 nt, synthetic construct
  misc_feature 1..1440: note = derived and/or modified sequence opt1 fromAkt__Homo_sapiens__AAD24196
  source 1..1440: mol_type = other RNA
atgagcgacgtgaccatcgtcaaggagggctgggtgcagaagcgcggggagtacatcaagaactggcggccccgctacttcctgctgaagaccgacggctccttcatcgggtacaaggagaagccgcaggacgtggacctgccctaccccctgaacaacttcagcgtcgccaagtgccagctcatgaagacggagcggcccaagccgaacaccttcatcatccgctgcctgcagtggaccaccgtgatcgagcggacgttccacgtggacacccccgaggagcgcgaggagtggaccgaggccatccaggcggtcgccgaccggctgcagcgccaggaggaggagcggatgaactgctcccccaccagccagatcgacaacatcggcgaggaggagatggacgcctccacgacccaccacaagcgcaagaccatgaacgacttcgactacctcaagctgctggggaagggcaccttcggcaaggtgatcctcgtgcgggagaaggccagcgggaagtactacgccatgaagatcctgaagaaggaggtcatcatcgcgaaggacgaggtggcccacacgctgaccgagtcccgcgtgctcaagaacacccggcaccccttcctgaccagcctgaagtactccttccagacgaaggaccgcctctgcttcgtcatggagtacgtgaacggcggggagctgttcttccacctgagccgggagcgcgtgttctccgaggaccggacccgcttctacggcgccgagatcgtcagcgccctcgactacctgcactccgggaagatcgtgtaccgggacctgaagctcgagaacctgatgctggacaaggacggccacatcaagatcaccgacttcggcctctgcaaggaggggatcaccgacgcggccacgatgaagaccttctgcggcaccccggagtacctggcccccgaggtgctggaggacaacgactacgggcgcgccgtcgactggtggggcctcggcgtggtgatgtacgagatgatgtgcgggcggctgcccttctacaaccaggaccacgagaagctgttcgagctcatcctgatggaggacatcaagttcccccgcaccctgagctccgacgccaagagcctcctgtccggcctgctcatcaaggacccgaacaagcgcctcgggggcgggcccgacgacgcgaaggagatcatgcggcacagcttcttctccggcgtcaactggcaggacgtgtacgacaagaagctggtgccgcccttcaagccccaggtcacgagcgagaccgacacccgctacttcgacgaggagttcaccgcccagacgatcaccatcaccccgcccgagaagtacgacgaggacggcatggactgcatggacaacgagcggcgcccccacttcccccagttcagctactccgccagcgggcgggagtga

SEQ ID NO: 7761 - RNA, 1440 nt, synthetic construct
  misc_feature 1..1440: note = derived and/or modified sequence opt2 fromAkt__Homo_sapiens__AAD24196
  source 1..1440: mol_type = other RNA
atgtccgacgtcaccatcgtcaaggagggctgggtccagaagcgcggcgagtacatcaagaactggcgcccccgctacttcctcctcaagaccgacggctccttcatcggctacaaggagaagccccaggacgtcgacctcccctaccccctcaacaacttctccgtcgccaagtgccagctcatgaagaccgagcgccccaagcccaacaccttcatcatccgctgcctccagtggaccaccgtcatcgagcgcaccttccacgtcgacacccccgaggagcgcgaggagtggaccgaggccatccaggccgtcgccgaccgcctccagcgccaggaggaggagcgcatgaactgctcccccacctcccagatcgacaacatcggcgaggaggagatggacgcctccaccacccaccacaagcgcaagaccatgaacgacttcgactacctcaagctcctcggcaagggcaccttcggcaaggtcatcctcgtccgcgagaaggcctccggcaagtactacgccatgaagatcctcaagaaggaggtcatcatcgccaaggacgaggtcgcccacaccctcaccgagtcccgcgtcctcaagaacacccgccaccccttcctcacctccctcaagtactccttccagaccaaggaccgcctctgcttcgtcatggagtacgtcaacggcggcgagctcttcttccacctctcccgcgagcgcgtcttctccgaggaccgcacccgcttctacggcgccgagatcgtctccgccctcgactacctccactccggcaagatcgtctaccgcgacctcaagctcgagaacctcatgctcgacaaggacggccacatcaagatcaccgacttcggcctctgcaaggagggcatcaccgacgccgccaccatgaagaccttctgcggcacccccgagtacctcgcccccgaggtcctcgaggacaacgactacggccgcgccgtcgactggtggggcctcggcgtcgtcatgtacgagatgatgtgcggccgcctccccttctacaaccaggaccacgagaagctcttcgagctcatcctcatggaggacatcaagttcccccgcaccctctcctccgacgccaagtccctcctctccggcctcctcatcaaggaccccaacaagcgcctcggcggcggccccgacgacgccaaggagatcatgcgccactccttcttctccggcgtcaactggcaggacgtctacgacaagaagctcgtcccccccttcaagccccaggtcacctccgagaccgacacccgctacttcgacgaggagttcaccgcccagaccatcaccatcaccccccccgagaagtacgacgaggacggcatggactgcatggacaacgagcgccgcccccacttcccccagttctcctactccgcctccggccgcgagtga

SEQ ID NO: 7762 - RNA, 1440 nt, synthetic construct
  misc_feature 1..1440: note = derived and/or modified sequence opt3 fromAkt__Homo_sapiens__AAD24196
  source 1..1440: mol_type = other RNA
atgagcgacgtgaccatcgtcaaggagggctgggttcagaaaagaggggaatacattaagaactggaggccccggtatttcctgctcaaaacagatggatcctttataggttacaaggagaaacctcaagacgtggatcttccatatccgctgaataacttctctgtagccaagtgccagttgatgaagactgaacgccccaaacctaatacgtttatcattcgatgtttacagtggaccacagtgatcgagcgtactttccacgtcgacaccccagaagagagagaggaatggacagaggctattcaggcagtggccgataggctgcaacggcaggaagaggagcgcatgaactgctcacccaccagtcagatcgacaatataggcgaagaggaaatggatgcgagcactacacatcacaagagaaaaaccatgaacgactttgattacctaaagctcctggggaaaggaacgttcggcaaggttatccttgtgagggagaaggcttccggtaaatattacgccatgaagattctgaaaaaggaagtcatcattgcaaaagacgaggtggcccatactttgaccgagtctcgggtactcaagaatacacgccacccttttctgacttcgctgaaatattcattccagaccaaggatcgactctgttttgttatggaatacgtgaacgggggagagttattctttcatctgagcagagaaagggtcttcagtgaggaccggacacgtttttacggcgctgaaatcgtgtccgcacttgattatttgcactctggcaagatagtgtaccgcgacctgaaactagagaatctcatgctggacaaggatgggcacattaaaatcaccgacttcggactttgcaaggagggtattacggatgccgctactatgaaaacattctgtggcaccccagaatatctggcccccgaggtcttggaagacaacgattacgggagagcggttgactggtggggactcggcgtggtaatgtatgagatgatgtgcggtaggctgcctttttacaatcaagatcatgaaaagttattcgagctgatcctcatggaggacatcaagtttccacggactcttagctccgatgcaaaatcactgttgagtgggctactgattaaggacccgaacaaacgactcggaggcggccccgatgacgccaaggaaataatgcgccacagcttcttttctggggtgaattggcaggacgtctatgataaaaagctggtgcctccattcaagccccaggttacatccgagaccgacacgagatactttgatgaagagttcaccgctcagacaatcactattacccctccagagaaatacgacgaagatggaatggactgtatggataacgagaggcggccccattttccgcaattctcatatagcgccagtggtcgcgaatga

SEQ ID NO: 7763 - RNA, 1440 nt, synthetic construct
  misc_feature 1..1440: note = derived and/or modified sequence opt4 fromAkt__Homo_sapiens__AAD24196
  source 1..1440: mol_type = other RNA
atgagcgacgtgaccatcgtgaaggagggctgggtgcagaagagaggcgagtacatcaagaactggagacccagatacttcctgctgaagaccgacggcagcttcatcggctacaaggagaagccccaggacgtggacctgccctaccccctgaacaacttcagcgtggccaagtgccagctgatgaagaccgagagacccaagcccaacaccttcatcatcagatgcctgcagtggaccaccgtgatcgagagaaccttccacgtggacacccccgaggagagagaggagtggaccgaggccatccaggccgtggccgacagactgcagagacaggaggaggagagaatgaactgcagccccaccagccagatcgacaacatcggcgaggaggagatggacgccagcaccacccaccacaagagaaagaccatgaacgacttcgactacctgaagctgctgggcaagggcaccttcggcaaggtgatcctggtgagagagaaggccagcggcaagtactacgccatgaagatcctgaagaaggaggtgatcatcgccaaggacgaggtggcccacaccctgaccgagagcagagtgctgaagaacaccagacaccccttcctgaccagcctgaagtacagcttccagaccaaggacagactgtgcttcgtgatggagtacgtgaacggcggcgagctgttcttccacctgagcagagagagagtgttcagcgaggacagaaccagattctacggcgccgagatcgtgagcgccctggactacctgcacagcggcaagatcgtgtacagagacctgaagctggagaacctgatgctggacaaggacggccacatcaagatcaccgacttcggcctgtgcaaggagggcatcaccgacgccgccaccatgaagaccttctgcggcacccccgagtacctggcccccgaggtgctggaggacaacgactacggcagagccgtggactggtggggcctgggcgtggtgatgtacgagatgatgtgcggcagactgcccttctacaaccaggaccacgagaagctgttcgagctgatcctgatggaggacatcaagttccccagaaccctgagcagcgacgccaagagcctgctgagcggcctgctgatcaaggaccccaacaagagactgggcggcggccccgacgacgccaaggagatcatgagacacagcttcttcagcggcgtgaactggcaggacgtgtacgacaagaagctggtgccccccttcaagccccaggtgaccagcgagaccgacaccagatacttcgacgaggagttcaccgcccagaccatcaccatcaccccccccgagaagtacgacgaggacggcatggactgcatggacaacgagagaagaccccacttcccccagttcagctacagcgccagcggcagagagtga

SEQ ID NO: 7764 - RNA, 1440 nt, synthetic construct
  misc_feature 1..1440: note = derived and/or modified sequence opt5 fromAkt__Homo_sapiens__AAD24196
  source 1..1440: mol_type = other RNA
atgagcgacgtgaccatcgtcaaggagggctgggttcagaaaagaggggaatacattaagaactggcggccccgctatttcctgctcaaaacagatggatcctttatcggctacaaggagaaacctcaagacgtggatctgccgtatccccttaataacttctctgtggccaagtgccagctgatgaagacggaaagacctaaacccaatacctttattatccggtgtctccagtggacaaccgtcattgagcgcacattccacgtggacacccctgaagagagagaggaatggacagaggctatccaggccgttgcggatcggctgcaacgccaggaagaggagagaatgaactgcagccccacctcccagatcgacaatattggggaagaggaaatggatgcttctacgacccatcacaagcggaaaacaatgaacgactttgattaccttaagctgctcggaaaaggcaccttcgggaaggtgatcctggtccgcgagaaggccagcggaaaatattacgccatgaagattctgaaaaaggaagtgatcattgctaaagacgaggttgcccatacactcaccgagtccagagtgctgaagaatacgcggcacccttttcttacatctctgaaatatagcttccagaccaaggatcgcctctgttttgtcatggaatacgtgaacggcggcgagctgttctttcatctttccagagaacgggtgttcagcgaggaccgcacaagattttacggggctgaaatcgtctctgccctggattatctccactccggaaagattgtttaccgggacctgaaactggagaatctcatgctggacaaggatggccacatcaaaatcaccgacttcgggctttgcaaggagggaattaccgatgcggccacaatgaaaacgttctgtggcaccccggaatatctggctcccgaggtgctcgaagacaacgattacgggagagccgtggactggtggggactgggcgtcgtgatgtatgagatgatgtgcggccgccttcctttttacaatcaagatcatgaaaagctgttcgagctcatcctgatggaggacattaagtttccccggacactgagctctgatgctaaatccctcctgagcgggcttctgatcaaggaccctaacaaaagactcggaggcgggcccgatgacgccaaggaaattatgcgccactctttcttttccggagttaattggcaggacgtgtatgataaaaagctggtcccgcctttcaagccccaggtgaccagcgagacagacacccggtactttgatgaagagttcacggcgcagacaatcaccatcacccctcccgagaaatacgacgaagatggcatggactgtatggataacgagagacgcccccattttcctcaattctcctattctgccagcgggcgggaatga

SEQ ID NO: 7765 - protein, 505 aa, synthetic construct
  REGION 1..505: note = ATF2__Homo_sapiens__P15336
MKFKLHVNSARQYKDLWNMSDDKPFLCTAPGCGQRFTNEDHLAVHKHKHEMTLKFGPARNDSVIVADQTPTPTRFLKNCEEVGLFNELASPFENEFKKASEDDIKKMPLDLSPLATPIIRSKIEEPSVVETTHQDSPLPHPESTTSDEKEVPLAQTAQPTSAIVRPASLQVPNVLLTSSDSSVIIQQAVPSPTSSTVITQAPSSNRPIVPVPGPFPLLLHLPNGQTMPVAIPASITSSNVHVPAAVPLVRPVTMVPSVPGIPGPSSPQPVQSEAKMRLKAALTQQHPPVTNGDTVKGHGSGLVRTQSEESRPQSLQQPATSTTETPASPAHTTPQTQSTSGRRRRAANEDPDEKRRKFLERNRAAASRCRQKRKVWVQSLEKKAEDLSSLNGQLQSEVTLLRNEVAQLKQLLLAHKDCPVTAMQKKSGYHTADKDDSSEDISVPSSPHTEAIQHSSVSTSNGVSSTSKAEAVATSVLTQMADQSTEPALSQIVMAPSSQSQPSGS

SEQ ID NO: 7766 - RNA, 1518 nt, synthetic construct
  misc_feature 1..1518: note = ATF2__Homo_sapiens__CCDS2262.1
  source 1..1518: mol_type = other RNA
atgaaattcaagttacatgtgaattctgccaggcaatacaaggacctgtggaatatgagtgatgacaaaccctttctatgtactgcgcctggatgtggccagcgttttaccaacgaggatcatttggctgtccataaacataaacatgagatgacactgaaatttggtccagcacgtaatgacagtgtcattgtggctgatcagaccccaacaccaacaagattcttgaaaaactgtgaagaagtgggtttgtttaatgagttggcgagtccatttgagaatgaattcaagaaagcttcagaagatgacattaaaaaaatgcctctagatttatcccctcttgcaacacctatcataagaagcaaaattgaggagccttctgttgtagaaacaactcaccaggatagtcctttacctcacccagagtctactaccagtgatgagaaggaagtaccattggcacaaactgcacagcccacatcagctattgttcgtccagcatcattacaggttcccaatgtgctgcttacaagttctgactcaagtgtaattattcagcaggcagtaccttcaccaacctcaagtactgtaatcacccaggcaccatcctctaacaggccaattgtccctgtaccaggcccatttcctcttctgttacatcttcctaatggacaaaccatgcctgttgctattcctgcatcaattacaagttctaatgtgcatgttccagctgcagtcccactcgttcgaccagtcaccatggtgcctagtgttccaggaatcccaggtccttcctctccccaaccagtacagtcagaagcaaaaatgagattaaaagctgctttgacccagcaacatcctccagttaccaatggtgatactgtcaaaggtcatggtagcggattggttaggactcagtcagaggaatctcgaccgcagtcattacaacagccagccacatccactacagaaactccggcttctccagctcacacaactccacagacccaaagtacaagtggtcgtcggagaagagcagctaacgaagatcctgatgaaaaaaggagaaagtttttagagcgaaatagagcagcagcttcaagatgccgacaaaaaaggaaagtctgggttcagtctttagagaagaaagctgaagacttgagttcattaaatggtcagctgcagagtgaagtcaccctgctgagaaatgaagtggcacagctgaaacagcttcttctggctcataaagattgccctgtaaccgccatgcagaagaaatctggctatcatactgctgataaagatgatagttcagaagacatttcagtgccgagtagtccacatacagaagctatacagcatagttcggtcagcacatccaatggagtcagttcaacctccaaggcagaagctgtagccacttcagtcctcacccagatggcggaccagagtacagagcctgctctttcacagatcgttatggctccttcctcccagtcacagccctcaggaagttga

SEQ ID NO: 7767 - RNA, 1518 nt, synthetic construct
  misc_feature 1..1518: note = derived and/or modified sequence opt1 fromATF2__Homo_sapiens__CCDS2262.1
  source 1..1518: mol_type = other RNA
atgaagttcaagctgcacgtgaacagcgcccgccagtacaaggacctctggaacatgtccgacgacaagcccttcctgtgcaccgccccgggctgcgggcagcggttcaccaacgaggaccacctggcggtccacaagcacaagcacgagatgacgctcaagttcggccccgcccgcaacgacagcgtgatcgtggccgaccagacccccacccccacccggttcctgaagaactgcgaggaggtcgggctgttcaacgagctcgcctccccgttcgagaacgagttcaagaaggccagcgaggacgacatcaagaagatgcccctggacctgagccccctcgcgacgcccatcatccgcagcaagatcgaggagccgtccgtggtggagaccacccaccaggacagccccctgccccaccccgagtccaccacgagcgacgagaaggaggtcccgctggcccagaccgcccagcccacctccgccatcgtgcggcccgcgagcctccaggtgcccaacgtcctgctgacctccagcgactccagcgtgatcatccagcaggccgtgccgtcccccacgagctccaccgtcatcacccaggcccccagcagcaaccgccccatcgtgccggtgcccggccccttccccctcctgctgcacctcccgaacgggcagaccatgcccgtcgccatccccgcctccatcacgagctccaacgtgcacgtgcccgcggccgtcccgctggtgcggcccgtgaccatggtccccagcgtgccgggcatccccggcccctccagcccccagccggtgcagtccgaggccaagatgcgcctgaaggccgccctcacccagcagcacccgcccgtcaccaacggggacacggtgaagggccacgggagcggcctggtccggacccagtccgaggagagccgcccccagtccctgcagcagcccgcgaccagcaccacggagacccccgcctcccccgcccacaccacgccccagacccagagcacctccgggcggcgccggcgcgccgccaacgaggacccggacgagaagcggcgcaagttcctcgagcggaaccgcgcggccgccagccggtgccgccagaagcggaaggtgtgggtgcagtccctggagaagaaggccgaggacctgagctccctcaacggccagctgcagagcgaggtcaccctgctccgcaacgaggtggcccagctgaagcagctgctcctggcgcacaaggactgccccgtgaccgccatgcagaagaagtccggctaccacacggccgacaaggacgactccagcgaggacatctccgtccccagcagcccccacaccgaggccatccagcactcctccgtgagcacctccaacggggtgagctccaccagcaaggcggaggccgtcgccacgtccgtgctgacccagatggccgaccagagcaccgagccggccctctcccagatcgtgatggcgcccagctcccagagccagcccagcggctcctga

SEQ ID NO: 7768 - RNA, 1518 nt, synthetic construct
  misc_feature 1..1518: note = derived and/or modified sequence opt2 fromATF2__Homo_sapiens__CCDS2262.1
  source 1..1518: mol_type = other RNA
atgaagttcaagctccacgtcaactccgcccgccagtacaaggacctctggaacatgtccgacgacaagcccttcctctgcaccgcccccggctgcggccagcgcttcaccaacgaggaccacctcgccgtccacaagcacaagcacgagatgaccctcaagttcggccccgcccgcaacgactccgtcatcgtcgccgaccagacccccacccccacccgcttcctcaagaactgcgaggaggtcggcctcttcaacgagctcgcctcccccttcgagaacgagttcaagaaggcctccgaggacgacatcaagaagatgcccctcgacctctcccccctcgccacccccatcatccgctccaagatcgaggagccctccgtcgtcgagaccacccaccaggactcccccctcccccaccccgagtccaccacctccgacgagaaggaggtccccctcgcccagaccgcccagcccacctccgccatcgtccgccccgcctccctccaggtccccaacgtcctcctcacctcctccgactcctccgtcatcatccagcaggccgtcccctcccccacctcctccaccgtcatcacccaggccccctcctccaaccgccccatcgtccccgtccccggccccttccccctcctcctccacctccccaacggccagaccatgcccgtcgccatccccgcctccatcacctcctccaacgtccacgtccccgccgccgtccccctcgtccgccccgtcaccatggtcccctccgtccccggcatccccggcccctcctccccccagcccgtccagtccgaggccaagatgcgcctcaaggccgccctcacccagcagcacccccccgtcaccaacggcgacaccgtcaagggccacggctccggcctcgtccgcacccagtccgaggagtcccgcccccagtccctccagcagcccgccacctccaccaccgagacccccgcctcccccgcccacaccaccccccagacccagtccacctccggccgccgccgccgcgccgccaacgaggaccccgacgagaagcgccgcaagttcctcgagcgcaaccgcgccgccgcctcccgctgccgccagaagcgcaaggtctgggtccagtccctcgagaagaaggccgaggacctctcctccctcaacggccagctccagtccgaggtcaccctcctccgcaacgaggtcgcccagctcaagcagctcctcctcgcccacaaggactgccccgtcaccgccatgcagaagaagtccggctaccacaccgccgacaaggacgactcctccgaggacatctccgtcccctcctccccccacaccgaggccatccagcactcctccgtctccacctccaacggcgtctcctccacctccaaggccgaggccgtcgccacctccgtcctcacccagatggccgaccagtccaccgagcccgccctctcccagatcgtcatggccccctcctcccagtcccagccctccggctcctga

SEQ ID NO: 7769 - RNA, 1518 nt, synthetic construct
  misc_feature 1..1518: note = derived and/or modified sequence opt3 fromATF2__Homo_sapiens__CCDS2262.1
  source 1..1518: mol_type = other RNA
atgaagttcaaactgcacgtgaacagcgccagacagtacaaggacctctggaatatgtccgatgacaaaccctttctttgcaccgctcctggctgtgggcaaaggttcacaaacgaggatcatctggcagtccacaagcataaacacgaaatgactttgaagtttggaccagcccggaatgactctgttatcgtggcggatcagacgccgacccccacacgcttcttaaagaactgcgaggaagtaggtctgtttaatgagctagcttcacctttcgaaaacgagtttaaaaaggccagtgaggacgatattaaaaagatgccactcgacctgagcccccttgcaactcctataatccgatccaaaattgaggaaccatctgtggtcgaaaccacacatcaggattcgcccctgcctcacccagagtcaaccactagcgacgagaaggaagtgccgttggcccagacagctcaacccaccagtgcaatcgttcgtcctgcctccctccaggtgccaaatgtcctgctgacgtctagcgattcctcagtgattatccagcaggctgtacccagtcctactagctctaccgttataacacaagccccatcctcaaacagacccatcgtgccggtccctggccccttcccactcttactgcaccttcctaatgggcagactatgcccgtggcgattccagcaagcatcaccagttctaacgtgcatgtccccgccgctgttcctttggtgaggccagtaacaatggtgccgtccgtccccggcattcctggaccaagctcgccccagcctgtgcagtctgaggccaagatgcggctgaaagcagctctaacccaacagcacccacccgttacgaatggtgacactgtgaaggggcatggatccggcctcgtccgcacacagtcagaagagagtagaccgcaaagcctgcagcagcctgccacctccactacagaaaccccagcgtctcccgcccacacgacccctcagacacaaagcacttcaggcaggcggcgccgagcagctaacgaggatcccgacgagaaaagaaggaagtttcttgaacggaatcgtgccgctgccagtcgctgtagacagaaaaggaaggtgtgggtacagtccctggagaaaaaggcagaagacttgagctctctcaacgggcagctgcaatcagaggttaccttactgcggaatgaagtggcccagctcaagcagcttctgttggctcacaaagattgcccagtcacagcgatgcagaagaaaagtggatatcatactgcagacaaggatgacagctccgaggatatctctgtgccttcgagcccccacaccgaggccatacaacattcctcagtcagtacatctaacggtgtgagctccacctcaaaagctgaagccgttgcaactagcgtgctaacgcagatggccgaccagtctacagagccagctctgtcccagattgtaatggccccgagtagccaatctcagccttccggctcatga

SEQ ID NO: 7770 - RNA, 1518 nt, synthetic construct
  misc_feature 1..1518: note = derived and/or modified sequence opt4 fromATF2__Homo_sapiens__CCDS2262.1
  source 1..1518: mol_type = other RNA
atgaagttcaagctgcacgtgaacagcgccagacagtacaaggacctgtggaacatgagcgacgacaagcccttcctgtgcaccgcccccggctgcggccagagattcaccaacgaggaccacctggccgtgcacaagcacaagcacgagatgaccctgaagttcggccccgccagaaacgacagcgtgatcgtggccgaccagacccccacccccaccagattcctgaagaactgcgaggaggtgggcctgttcaacgagctggccagccccttcgagaacgagttcaagaaggccagcgaggacgacatcaagaagatgcccctggacctgagccccctggccacccccatcatcagaagcaagatcgaggagcccagcgtggtggagaccacccaccaggacagccccctgccccaccccgagagcaccaccagcgacgagaaggaggtgcccctggcccagaccgcccagcccaccagcgccatcgtgagacccgccagcctgcaggtgcccaacgtgctgctgaccagcagcgacagcagcgtgatcatccagcaggccgtgcccagccccaccagcagcaccgtgatcacccaggcccccagcagcaacagacccatcgtgcccgtgcccggccccttccccctgctgctgcacctgcccaacggccagaccatgcccgtggccatccccgccagcatcaccagcagcaacgtgcacgtgcccgccgccgtgcccctggtgagacccgtgaccatggtgcccagcgtgcccggcatccccggccccagcagcccccagcccgtgcagagcgaggccaagatgagactgaaggccgccctgacccagcagcacccccccgtgaccaacggcgacaccgtgaagggccacggcagcggcctggtgagaacccagagcgaggagagcagaccccagagcctgcagcagcccgccaccagcaccaccgagacccccgccagccccgcccacaccaccccccagacccagagcaccagcggcagaagaagaagagccgccaacgaggaccccgacgagaagagaagaaagttcctggagagaaacagagccgccgccagcagatgcagacagaagagaaaggtgtgggtgcagagcctggagaagaaggccgaggacctgagcagcctgaacggccagctgcagagcgaggtgaccctgctgagaaacgaggtggcccagctgaagcagctgctgctggcccacaaggactgccccgtgaccgccatgcagaagaagagcggctaccacaccgccgacaaggacgacagcagcgaggacatcagcgtgcccagcagcccccacaccgaggccatccagcacagcagcgtgagcaccagcaacggcgtgagcagcaccagcaaggccgaggccgtggccaccagcgtgctgacccagatggccgaccagagcaccgagcccgccctgagccagatcgtgatggcccccagcagccagagccagcccagcggcagctga

SEQ ID NO: 7771 - RNA, 1518 nt, synthetic construct
  misc_feature 1..1518: note = derived and/or modified sequence opt5 fromATF2__Homo_sapiens__CCDS2262.1
  source 1..1518: mol_type = other RNA
atgaagttcaaactgcacgtgaacagcgccagacagtacaaggacctctggaatatgtccgatgacaaaccctttctgtgcaccgctcctggctgtgggcaacggttcacaaacgaggatcatcttgccgtccacaagcataaacacgaaatgacgctgaagtttggaccggcgcgcaatgactctgttatcgtggctgatcagacccccacacctaccagattcctcaagaactgcgaggaagtgggcctgtttaatgagcttgccagccccttcgaaaacgagtttaaaaaggcctccgaggacgatattaaaaagatgcctctggacctctctcccctggctacacctatcattcggagcaaaatcgaggaaccgtccgtcgtggaaaccacacatcaggattctcccctgcctcaccccgagagcaccacgtccgacgagaaggaagttcctctcgcccagaccgctcaacccacaagcgccattgtgcgcccggcgtctctgcaggtccctaatgtgcttctgacctccagcgattcttccgttatcatccagcaggccgtgcccagccctacatcttccaccgtcattacgcaagctcccagctccaacagacccatcgtgcctgtgccggggcccttccctctcctgcttcatctgcccaatggacagacaatgcctgtcgccattcccgcttctatcaccagctccaacgttcacgtgccggccgcggtgcctctcgtccggcccgtgacaatggttcctagcgtgcccggcattcctgggccctcttccccgcagcctgtccagagcgaggccaagatgcgcctgaaagctgccctgacccaacagcaccctcccgtgaccaatggagacacagttaagggccatggctctgggctcgtgagaacgcagagcgaagagtcccggccccaatctctgcagcagccggctaccagcacaaccgaaacacccgcctcccctgcccacaccacgccccagacacaaagcacctctggacgcagacggcgcgctgcgaacgaggatcctgacgagaaaagacggaagtttcttgaacgcaatagagccgctgcctcccggtgtagacagaaacgcaaggtctgggtgcagagcctggagaaaaaggccgaagacctctcttccctgaacggccagcttcaaagcgaggtcaccctgctccggaatgaagtggctcagctgaagcagctgctcctggcccacaaagattgccccgttacagcgatgcagaagaaatccgggtatcataccgctgacaaggatgactctagcgaggatatctccgtgccttctagcccccacacagaggccattcaacattccagcgtctctacgtccaacggagtgagctctacctccaaagccgaagctgttgccacaagcgtgcttacccagatggctgaccagtctacagagccggccctgagccagatcgtcatggcgccttccagccaatctcagccctccggcagctga

SEQ ID NO: 7772 - protein, 282 aa, synthetic construct
  REGION 1..282: note = C1QBP__Homo_sapiens__Q07021
MLPLLRCVPRVLGSSVAGLRAAAPASPFRQLLQPAPRLCTRPFGLLSVRAGSERRPGLLRPRGPCACGCGCGSLHTDGDKAFVDFLSDEIKEERKIQKHKTLPKMSGGWELELNGTEAKLVRKVAGEKITVTFNINNSIPPTFDGEEEPSQGQKVEEQEPELTSTPNFVVEVIKNDDGKKALVLDCHYPEDEVGQEDEAESDIFSIREVSFQSTGESEWKDTNYTLNTDSLDWALYDHLMDFLADRGVDNTFADELVELSTALEHQEYITFLEDLKSFVKSQ

SEQ ID NO: 7773 - RNA, 849 nt, synthetic construct
  misc_feature 1..849: note = C1QBP__Homo_sapiens__AAA16315
  source 1..849: mol_type = other RNA
atgctgcctctgctgcgctgcgtgccccgtgtgctgggctcctccgtcgccggcctccgcgctgccgcgcccgcctcgcctttccggcagctcctgcagccggcaccccggctgtgcacccggcccttcgggctgctcagcgtgcgcgcaggttccgagcggcggccgggcctcctgcggcctcgcggaccctgcgcctgtggctgtggctgcggctcgctgcacaccgacggagacaaagcttttgttgatttcctgagtgatgaaattaaggaggaaagaaaaattcagaagcataaaaccctccctaagatgtctggaggttgggagctggaactgaatgggacagaagcgaaattagtgcggaaagttgccggggaaaaaatcacggtcactttcaacattaacaacagcatcccaccaacatttgatggtgaggaggaaccctcgcaagggcagaaggttgaagaacaggagcctgaactgacatcaactcccaatttcgtggttgaagttataaagaatgatgatggcaagaaggcccttgtgttggactgtcattatccagaggatgaggttggacaagaagacgaggctgagagtgacatcttctctatcagggaagttagctttcagtccactggcgagtctgaatggaaggatactaattatacactcaacacagattccttggactgggccttatatgaccacctaatggatttccttgccgaccgaggggtggacaacacttttgcagatgagctggtggagctcagcacagccctggagcaccaggagtacattacttttcttgaagacctcaagagttttgtcaagagccagtag

SEQ ID NO: 7774 - RNA, 849 nt, synthetic construct
  misc_feature 1..849: note = derived and/or modified sequence opt1 fromC1QBP__Homo_sapiens__AAA16315
  source 1..849: mol_type = other RNA
atgctgcccctgctgcgctgcgtgccgcgggtcctgggcagctccgtggccgggctccgcgccgcggcccccgccagccccttccggcagctgctgcagcccgccccgcgcctctgcacccggcccttcggcctgctgtccgtgcgcgccgggagcgagcggcgccccggcctcctgcggccccgcgggccgtgcgcgtgcggctgcggctgcgggtccctgcacaccgacggcgacaaggccttcgtcgacttcctcagcgacgagatcaaggaggagcggaagatccagaagcacaagacgctgcccaagatgtccgggggctgggagctggagctcaacgggaccgaggccaagctggtgcgcaaggtggccggcgagaagatcaccgtcaccttcaacatcaacaacagcatcccgcccacgttcgacggcgaggaggagccctcccaggggcagaaggtggaggagcaggagcccgagctgaccagcacccccaacttcgtggtcgaggtgatcaagaacgacgacggcaagaaggcgctcgtgctggactgccactaccccgaggacgaggtcgggcaggaggacgaggccgagtccgacatcttcagcatccgggaggtgtccttccagagcaccggcgagtccgagtggaaggacacgaactacaccctgaacaccgacagcctcgactgggccctgtacgaccacctgatggacttcctcgccgaccgcggcgtggacaacaccttcgccgacgagctggtcgagctgtccacggcgctcgagcaccaggagtacatcaccttcctggaggacctcaagagcttcgtgaagtcccagtga

SEQ ID NO: 7775 - RNA, 849 nt, synthetic construct
  misc_feature 1..849: note = derived and/or modified sequence opt2 fromC1QBP__Homo_sapiens__AAA16315
  source 1..849: mol_type = other RNA
atgctccccctcctccgctgcgtcccccgcgtcctcggctcctccgtcgccggcctccgcgccgccgcccccgcctcccccttccgccagctcctccagcccgccccccgcctctgcacccgccccttcggcctcctctccgtccgcgccggctccgagcgccgccccggcctcctccgcccccgcggcccctgcgcctgcggctgcggctgcggctccctccacaccgacggcgacaaggccttcgtcgacttcctctccgacgagatcaaggaggagcgcaagatccagaagcacaagaccctccccaagatgtccggcggctgggagctcgagctcaacggcaccgaggccaagctcgtccgcaaggtcgccggcgagaagatcaccgtcaccttcaacatcaacaactccatcccccccaccttcgacggcgaggaggagccctcccagggccagaaggtcgaggagcaggagcccgagctcacctccacccccaacttcgtcgtcgaggtcatcaagaacgacgacggcaagaaggccctcgtcctcgactgccactaccccgaggacgaggtcggccaggaggacgaggccgagtccgacatcttctccatccgcgaggtctccttccagtccaccggcgagtccgagtggaaggacaccaactacaccctcaacaccgactccctcgactgggccctctacgaccacctcatggacttcctcgccgaccgcggcgtcgacaacaccttcgccgacgagctcgtcgagctctccaccgccctcgagcaccaggagtacatcaccttcctcgaggacctcaagtccttcgtcaagtcccagtga

SEQ ID NO: 7776 - RNA, 849 nt, synthetic construct
  misc_feature 1..849: note = derived and/or modified sequence opt3 fromC1QBP__Homo_sapiens__AAA16315
  source 1..849: mol_type = other RNA
atgctgcccctccttagatgcgtgcctagggtcctgggcagctccgttgccgggttgcgggctgcagccccagcgtctccgttccgccagttactgcaacccgctcctcgactatgtacccgtccatttggactcctgtcagtgagagccggtagtgagaggcggcccggccttctgcgccctagagggccatgcgcatgtggatgcggctgtggtagcttgcacacagacggggataaggccttcgtagactttctctccgatgaaatcaaagaggaaaggaagattcagaaacataagactctgcccaaaatgtctggaggctgggagctggaactcaacggcacggaggctaagttagtgcggaaggtcgcaggggagaaaataaccgtgacattcaatatcaacaattcgattcctccaacttttgacggagaagaggaaccgtcacagggtcagaaggttgaggagcaagaacccgagctgaccagcacacctaacttcgtggtcgaagtgatcaaaaatgatgacggcaagaaagcccttgtattggattgccactacccagaggacgaagttgggcaggaggatgaggctgaaagtgacatcttttccattcgcgaggtgtctttccagagcaccggagaatccgagtggaaggatactaactatacactgaataccgactcactagattgggccctctacgaccatctgatggactttcttgcggatcgaggcgtcgacaacacgttcgcagatgaactggtggagttgagtactgccctcgagcaccaggaatatataacctttctggaggacttaaagagcttcgtgaaatctcaatga

SEQ ID NO: 7777 - RNA, 849 nt, synthetic construct
  misc_feature 1..849: note = derived and/or modified sequence opt4 fromC1QBP__Homo_sapiens__AAA16315
  source 1..849: mol_type = other RNA
atgctgcccctgctgagatgcgtgcccagagtgctgggcagcagcgtggccggcctgagagccgccgcccccgccagccccttcagacagctgctgcagcccgcccccagactgtgcaccagacccttcggcctgctgagcgtgagagccggcagcgagagaagacccggcctgctgagacccagaggcccctgcgcctgcggctgcggctgcggcagcctgcacaccgacggcgacaaggccttcgtggacttcctgagcgacgagatcaaggaggagagaaagatccagaagcacaagaccctgcccaagatgagcggcggctgggagctggagctgaacggcaccgaggccaagctggtgagaaaggtggccggcgagaagatcaccgtgaccttcaacatcaacaacagcatcccccccaccttcgacggcgaggaggagcccagccagggccagaaggtggaggagcaggagcccgagctgaccagcacccccaacttcgtggtggaggtgatcaagaacgacgacggcaagaaggccctggtgctggactgccactaccccgaggacgaggtgggccaggaggacgaggccgagagcgacatcttcagcatcagagaggtgagcttccagagcaccggcgagagcgagtggaaggacaccaactacaccctgaacaccgacagcctggactgggccctgtacgaccacctgatggacttcctggccgacagaggcgtggacaacaccttcgccgacgagctggtggagctgagcaccgccctggagcaccaggagtacatcaccttcctggaggacctgaagagcttcgtgaagagccagtga

SEQ ID NO: 7778 - RNA, 849 nt, synthetic construct
  misc_feature 1..849: note = derived and/or modified sequence opt5 fromC1QBP__Homo_sapiens__AAA16315
  source 1..849: mol_type = other RNA
atgctgcccctcctgagatgcgtgcctcgggtccttggcagctccgttgccgggctgcgcgctgccgcgccggcttctcccttcagacagctcctgcaacctgctccccggctttgtacccgcccttttggactgctcagcgtgagagccggctccgagcggcgccccgggctgctgagacctcggggaccgtgcgcctgtggctgcgggtgtggatctctccacacagacggcgataaggccttcgtggactttctgagcgatgaaatcaaagaggaacgcaagattcagaaacataagacgcttcccaaaatgtccggcgggtgggagctggaactcaacggaaccgaggctaagctggtcagaaaggtggccggcgagaaaatcacagttaccttcaatattaacaattctatccctcccacatttgacggggaagaggaacctagccagggacagaaggtggaggagcaagaacccgagcttacctccacaccgaacttcgtcgtggaagttattaaaaatgatgacggcaagaaagcgctggtgctcgattgccactaccctgaggacgaagtcgggcaggaggatgaggccgaaagcgacatcttttctatccgggaggtgtccttccagagcaccggagaatctgagtggaaggatacgaactataccctgaatacagactccctggattgggctctctacgaccatctgatggactttcttgccgatcgcggcgtggacaacaccttcgctgatgaactggtcgagctcagcacagccctggagcaccaggaatatattacctttcttgaggacctgaagtctttcgttaaatcccaatga

SEQ ID NO: 7779 - protein, 245 aa, synthetic construct
  REGION 1..245: note = C1QC__Homo_sapiens__P02747
MDVGPSSLPHLGLKLLLLLLLLPLRGQANTGCYGIPGMPGLPGAPGKDGYDGLPGPKGEPGIPAIPGIRGPKGQKGEPGLPGHPGKNGPMGPPGMPGVPGPMGIPGEPGEEGRYKQKFQSVFTVTRQTHQPPAPNSLIRFNAVLTNPQGDYDTSTGKFTCKVPGLYYFVYHASHTANLCVLLYRSGVKVVTFCGHTSKTNQVNSGGVLLRLQVGEEVWLAVNDYYDMVGIQGSDSVFSGFLLFPD

SEQ ID NO: 7780 - RNA, 738 nt, synthetic construct
  misc_feature 1..738: note = C1QC__Homo_sapiens__CCDS227.1
  source 1..738: mol_type = other RNA
atggacgtggggcccagctccctgccccaccttgggctgaagctgctgctgctcctgctgctgctgcccctcaggggccaagccaacacaggctgctacgggatcccagggatgcccggcctgcccggggcaccagggaaggatgggtacgacggactgccggggcccaagggggagccaggaatcccagccattcccgggatccgaggacccaaagggcagaagggagaacccggcttacccggccatcctgggaaaaatggccccatgggaccccctgggatgccaggggtgcccggccccatgggcatccctggagagccaggtgaggagggcagatacaagcagaaattccagtcagtgttcacggtcactcggcagacccaccagccccctgcacccaacagcctgatcagattcaacgcggtcctcaccaacccgcagggagattatgacacgagcactggcaagttcacctgcaaagtccccggcctctactactttgtctaccacgcgtcgcatacagccaacctgtgcgtgctgctgtaccgcagcggcgtcaaagtggtcaccttctgtggccacacgtccaaaaccaatcaggtcaactcgggcggtgtgctgctgaggttgcaggtgggcgaggaggtgtggctggctgtcaatgactactacgacatggtgggcatccagggctctgacagcgtcttctccggcttcctgctcttccccgactag

SEQ ID NO: 7781 - RNA, 738 nt, synthetic construct
  misc_feature 1..738: note = derived and/or modified sequence opt1 fromC1QC__Homo_sapiens__CCDS227.1
  source 1..738: mol_type = other RNA
atggacgtgggccccagctccctgccgcacctcgggctgaagctgctcctgctgctcctgctgctccccctgcgcggccaggccaacaccgggtgctacggcatccccgggatgcccggcctgccgggcgcccccgggaaggacggctacgacgggctccccggccccaagggggagccgggcatccccgcgatccccggcatccgggggcccaagggccagaagggggagccgggcctgcccggccaccccgggaagaacggccccatggggccgcccggcatgcccggggtccccggcccgatgggcatccccggggagcccggcgaggaggggcgctacaagcagaagttccagagcgtgttcaccgtgacgcggcagacccaccagcccccggcccccaactccctgatccgcttcaacgccgtcctcaccaacccccagggcgactacgacaccagcacggggaagttcacgtgcaaggtgcccggcctgtactacttcgtgtaccacgcctcccacaccgccaacctgtgcgtcctcctgtaccggagcggcgtgaaggtggtcaccttctgcgggcacacctccaagaccaaccaggtgaacagcggcggggtgctgctccgcctgcaggtcggcgaggaggtgtggctggcggtgaacgactactacgacatggtcgggatccagggctccgacagcgtgttctccggcttcctcctgttcccggactga

SEQ ID NO: 7782 - RNA, 738 nt, synthetic construct
  misc_feature 1..738: note = derived and/or modified sequence opt2 fromC1QC__Homo_sapiens__CCDS227.1
  source 1..738: mol_type = other RNA
atggacgtcggcccctcctccctcccccacctcggcctcaagctcctcctcctcctcctcctcctccccctccgcggccaggccaacaccggctgctacggcatccccggcatgcccggcctccccggcgcccccggcaaggacggctacgacggcctccccggccccaagggcgagcccggcatccccgccatccccggcatccgcggccccaagggccagaagggcgagcccggcctccccggccaccccggcaagaacggccccatgggcccccccggcatgcccggcgtccccggccccatgggcatccccggcgagcccggcgaggagggccgctacaagcagaagttccagtccgtcttcaccgtcacccgccagacccaccagccccccgcccccaactccctcatccgcttcaacgccgtcctcaccaacccccagggcgactacgacacctccaccggcaagttcacctgcaaggtccccggcctctactacttcgtctaccacgcctcccacaccgccaacctctgcgtcctcctctaccgctccggcgtcaaggtcgtcaccttctgcggccacacctccaagaccaaccaggtcaactccggcggcgtcctcctccgcctccaggtcggcgaggaggtctggctcgccgtcaacgactactacgacatggtcggcatccagggctccgactccgtcttctccggcttcctcctcttccccgactga

SEQ ID NO: 7783 - RNA, 738 nt, synthetic construct
  misc_feature 1..738: note = derived and/or modified sequence opt3 fromC1QC__Homo_sapiens__CCDS227.1
  source 1..738: mol_type = other RNA
atggacgtgggccccagctccctgcctcacctcgggcttaagctgttgttactgctactcctgcttccactgagaggacaggccaacaccggttgctacggcatcccggggatgcccggattgcctggcgctccaggtaaagatgggtatgacggactccccggccctaagggcgagccagggattcccgcaatacctggaatcaggggtccaaaaggccaaaagggggaaccgggactgcccggccatcctggtaaaaatgggccaatgggaccccctggcatgccaggcgtccccgggccgatgggtattcctggagagcccggcgaagaggggcggtacaagcagaagttccagtctgtttttacagtgactcgccagacgcaccaacctccagcccccaactcactgatccgattcaatgcggtactcaccaacccacagggagattatgacacaagtactggcaaatttacctgtaaggtgcccggtttatactatttcgtctaccatgctagccacacagccaatctgtgcgtgcttttgtatcgttccggggttaaagtggtcaccttttgtggccatacttctaagacaaaccaggtaaattcgggaggcgtgctgctaagactccaggttggggaagaggtgtggctggcagtcaacgattactacgacatggtgggtattcaaggatcagatagcgtgttcagtggctttcttctgttccctgactga

SEQ ID NO: 7784 - RNA, 738 nt, synthetic construct
  misc_feature 1..738: note = derived and/or modified sequence opt4 fromC1QC__Homo_sapiens__CCDS227.1
  source 1..738: mol_type = other RNA
atggacgtgggccccagcagcctgccccacctgggcctgaagctgctgctgctgctgctgctgctgcccctgagaggccaggccaacaccggctgctacggcatccccggcatgcccggcctgcccggcgcccccggcaaggacggctacgacggcctgcccggccccaagggcgagcccggcatccccgccatccccggcatcagaggccccaagggccagaagggcgagcccggcctgcccggccaccccggcaagaacggccccatgggcccccccggcatgcccggcgtgcccggccccatgggcatccccggcgagcccggcgaggagggcagatacaagcagaagttccagagcgtgttcaccgtgaccagacagacccaccagccccccgcccccaacagcctgatcagattcaacgccgtgctgaccaacccccagggcgactacgacaccagcaccggcaagttcacctgcaaggtgcccggcctgtactacttcgtgtaccacgccagccacaccgccaacctgtgcgtgctgctgtacagaagcggcgtgaaggtggtgaccttctgcggccacaccagcaagaccaaccaggtgaacagcggcggcgtgctgctgagactgcaggtgggcgaggaggtgtggctggccgtgaacgactactacgacatggtgggcatccagggcagcgacagcgtgttcagcggcttcctgctgttccccgactga

SEQ ID NO: 7785 - RNA, 738 nt, synthetic construct
  misc_feature 1..738: note = derived and/or modified sequence opt5 fromC1QC__Homo_sapiens__CCDS227.1
  source 1..738: mol_type = other RNA
atggacgtgggccccagctccctgcctcacctcgggctgaaacttctgctcctgcttctgctcctgccgctgagaggacaggccaacaccggctgctacgggatccccggaatgcctggcctccccggggctcctggaaaggatggctatgacggcctgcccgggcctaagggagagccgggcattcccgccatccctgggattcggggacccaaaggccaaaagggggaacctggacttcccggccatccgggcaaaaatgggcctatgggaccccctggcatgcccggggtccccggacctatgggcatcccgggggagcccggagaagagggccgctacaagcagaagttccagtctgtttttacagtgacgagacagacccaccaacctcccgcgcctaacagcctgattcggttcaatgctgtgctcacaaacccccagggcgattatgacacctccacagggaaatttacctgtaaggtcccgggactgtactatttcgtgtaccatgcctctcacacagccaatctttgcgttctgctctatcgcagcggcgtgaaagtcgtgaccttttgtgggcatacgtccaagaccaaccaggttaattctggaggcgtgctgctgagactccaggtcggggaagaggtgtggctggctgtgaacgattactacgacatggtcggcatccaaggaagcgattccgttttcagcggctttcttctgttccctgactga

SEQ ID NO: 7786 - protein, 540 aa, synthetic construct
  REGION 1..540: note = Cardif__Homo_sapiens__Q7Z434
MPFAEDKTYKYICRNFSNFCNVDVVEILPYLPCLTARDQDRLRATCTLSGNRDTLWHLFNTLQRRPGWVEYFIAALRGCELVDLADEVASVYQSYQPRTSDRPPDPLEPPSLPAERPGPPTPAAAHSIPYNSCREKEPSYPMPVQETQAPESPGENSEQALQTLSPRAIPRNPDGGPLESSSDLAALSPLTSSGHQEQDTELGSTHTAGATSSLTPSRGPVSPSVSFQPLARSTPRASRLPGPTGSVVSTGTSFSSSSPGLASAGAAEGKQGAESDQAEPIICSSGAEAPANSLPSKVPTTLMPVNTVALKVPANPASVSTVPSKLPTSSKPPGAVPSNALTNPAPSKLPINSTRAGMVPSKVPTSMVLTKVSASTVPTDGSSRNEETPAAPTPAGATGGSSAWLDSSSENRGLGSELSKPGVLASQVDSPFSGCFEDLAISASTSLGMGPCHGPEENEYKSEGTFGIHVAENPSIQLLEGNPGPPADPDGGPRPQADRKFQEREVPCHRPSPGALWLQVAVTGVLVVTLLVVLYRRRLH

SEQ ID NO: 7787 - RNA, 1623 nt, synthetic construct
  misc_feature 1..1623: note = Cardif__Homo_sapiens__ABA54890
  source 1..1623: mol_type = other RNA
atgccgtttgctgaagacaagacctataagtatatctgccgcaatttcagcaatttttgcaatgtggatgttgtagagattctgccttacctgccctgcctcacagcaagagaccaggatcgactgcgggccacctgcacactctcagggaaccgggacaccctctggcatctcttcaatacccttcagcggcggcccggctgggtggagtacttcattgcggcactgaggggctgtgagctagttgatctcgcggacgaagtggcctctgtctaccagagctaccagcctcggacctcggaccgtcccccagacccactggagccaccgtcacttcctgctgagaggccagggccccccacacctgctgcggcccacagcatcccctacaacagctgcagagagaaggagccaagttaccccatgcctgtccaggagacccaggcgccagagtccccaggagagaattcagagcaagccctgcagacgctcagccccagagccatcccaaggaatccagatggtggccccctggagtcctcctctgacctggcagccctcagccctctgacctccagcgggcatcaggagcaggacacagaactgggcagtacccacacagcaggtgcgacctccagcctcacaccatcccgtgggcctgtgtctccatctgtctccttccagcccctggcccgttccacccccagggcaagccgcttgcctggacccacagggtcagttgtatctactggcacctccttctcctcctcatcccctggcttggcctctgcaggggctgcagagggtaaacagggtgcagagagtgaccaggccgagcctatcatctgctccagtggggcagaggcacctgccaactctctgccctccaaagtgcctaccaccttgatgcctgtgaacacagtggccctgaaagtgcctgccaacccagcatctgtcagcacagtgccctccaagttgccaactagctcaaagccccctggtgcagtgccttctaatgcgctcaccaatccagcaccatccaaattgcccatcaactcaacccgtgctggcatggtgccatccaaagtgcctactagcatggtgctcaccaaggtgtctgccagcacagtccccactgacgggagcagcagaaatgaggagaccccagcagctccaacacccgccggcgccactggaggcagctcagcctggctagacagcagctctgagaataggggccttgggtcggagctgagtaagcctggcgtgctggcatcccaggtagacagcccgttctcgggctgcttcgaggatcttgccatcagtgccagcacctccttgggcatggggccctgccatggcccagaggagaatgagtataagtccgagggcacctttgggatccacgtggctgagaaccccagcatccagctcctggagggcaaccctgggccacctgcggacccggatggcggccccaggccacaagccgaccggaagttccaggagagggaggtgccatgccacaggccctcacctggggctctgtggctccaggtggctgtgacaggggtgctggtagtcacactcctggtggtgctgtaccggcggcgtctgcactag

SEQ ID NO: 7788 - RNA, 1623 nt, synthetic construct
  misc_feature 1..1623: note = derived and/or modified sequence opt1 fromCardif__Homo_sapiens__ABA54890
  source 1..1623: mol_type = other RNA
atgcccttcgccgaggacaagacctacaagtacatctgccgcaacttcagcaacttctgcaacgtggacgtcgtggagatcctgccgtacctcccctgcctgaccgcccgggaccaggaccgcctgcgggcgacgtgcaccctctccggcaaccgcgacaccctgtggcacctgttcaacaccctccagcggcgccccgggtgggtggagtacttcatcgccgccctgcggggctgcgagctggtcgacctcgccgacgaggtggccagcgtgtaccagtcctaccagccccgcacgagcgaccggccgcccgaccccctggagcccccgtccctgcccgcggagcgccccgggcccccgacccccgccgccgcccacagcatcccctacaactcctgccgggagaaggagcccagctacccgatgcccgtccaggagacccaggcgcccgagtcccccggcgagaacagcgagcaggccctccagaccctgtccccgcgcgccatcccccggaaccccgacgggggccccctggagagctccagcgacctcgccgccctgtccccgctgacgagctccggccaccaggagcaggacaccgagctcgggagcacccacaccgcgggcgccacgtccagcctgacccccagccgcgggcccgtgtcccccagcgtgtccttccagccgctggcccggagcacgccccgcgcctcccggctccccggcccgaccgggagcgtcgtgtccaccggcaccagcttctccagctccagccccggcctggcctccgcgggggccgccgagggcaagcagggggccgagagcgaccaggccgagcccatcatctgctccagcggcgcggaggcccccgccaactccctgccgagcaaggtgcccaccaccctcatgcccgtcaacacggtggccctgaaggtgcccgccaacccggcgtccgtcagcaccgtgcccagcaagctgcccacctccagcaagcccccgggcgccgtgccctccaacgccctcaccaaccccgcccccagcaagctgccgatcaactccacgcgcgcggggatggtccccagcaaggtgcccacctccatggtgctgaccaaggtcagcgcctccaccgtgcccacggacggcagctcccggaacgaggagaccccggccgcccccacccccgccggggcgaccggcgggagctccgcctggctcgacagctccagcgagaaccgcggcctgggctccgagctgagcaagcccggggtgctcgccagccaggtcgactccccgttcagcggctgcttcgaggacctggccatctccgccagcacgtccctggggatgggcccctgccacgggcccgaggagaacgagtacaagagcgagggcaccttcggcatccacgtggcggagaacccgtccatccagctcctggaggggaaccccggcccgcccgccgaccccgacgggggcccccggccccaggccgaccgcaagttccaggagcgcgaggtcccctgccaccggccgagccccggggccctgtggctccaggtggccgtgaccggcgtcctggtggtgaccctgctcgtcgtgctgtaccgccggcgcctgcactga

SEQ ID NO: 7789 - RNA, 1623 nt, synthetic construct
  misc_feature 1..1623: note = derived and/or modified sequence opt2 fromCardif__Homo_sapiens__ABA54890
  source 1..1623: mol_type = other RNA
atgcccttcgccgaggacaagacctacaagtacatctgccgcaacttctccaacttctgcaacgtcgacgtcgtcgagatcctcccctacctcccctgcctcaccgcccgcgaccaggaccgcctccgcgccacctgcaccctctccggcaaccgcgacaccctctggcacctcttcaacaccctccagcgccgccccggctgggtcgagtacttcatcgccgccctccgcggctgcgagctcgtcgacctcgccgacgaggtcgcctccgtctaccagtcctaccagccccgcacctccgaccgcccccccgaccccctcgagcccccctccctccccgccgagcgccccggcccccccacccccgccgccgcccactccatcccctacaactcctgccgcgagaaggagccctcctaccccatgcccgtccaggagacccaggcccccgagtcccccggcgagaactccgagcaggccctccagaccctctccccccgcgccatcccccgcaaccccgacggcggccccctcgagtcctcctccgacctcgccgccctctcccccctcacctcctccggccaccaggagcaggacaccgagctcggctccacccacaccgccggcgccacctcctccctcaccccctcccgcggccccgtctccccctccgtctccttccagcccctcgcccgctccaccccccgcgcctcccgcctccccggccccaccggctccgtcgtctccaccggcacctccttctcctcctcctcccccggcctcgcctccgccggcgccgccgagggcaagcagggcgccgagtccgaccaggccgagcccatcatctgctcctccggcgccgaggcccccgccaactccctcccctccaaggtccccaccaccctcatgcccgtcaacaccgtcgccctcaaggtccccgccaaccccgcctccgtctccaccgtcccctccaagctccccacctcctccaagccccccggcgccgtcccctccaacgccctcaccaaccccgccccctccaagctccccatcaactccacccgcgccggcatggtcccctccaaggtccccacctccatggtcctcaccaaggtctccgcctccaccgtccccaccgacggctcctcccgcaacgaggagacccccgccgcccccacccccgccggcgccaccggcggctcctccgcctggctcgactcctcctccgagaaccgcggcctcggctccgagctctccaagcccggcgtcctcgcctcccaggtcgactcccccttctccggctgcttcgaggacctcgccatctccgcctccacctccctcggcatgggcccctgccacggccccgaggagaacgagtacaagtccgagggcaccttcggcatccacgtcgccgagaacccctccatccagctcctcgagggcaaccccggcccccccgccgaccccgacggcggcccccgcccccaggccgaccgcaagttccaggagcgcgaggtcccctgccaccgcccctcccccggcgccctctggctccaggtcgccgtcaccggcgtcctcgtcgtcaccctcctcgtcgtcctctaccgccgccgcctccactga

SEQ ID NO: 7790 - RNA, 1623 nt, synthetic construct
  misc_feature 1..1623: note = derived and/or modified sequence opt3 fromCardif__Homo_sapiens__ABA54890
  source 1..1623: mol_type = other RNA
atgcccttcgccgaggacaagacctacaaatatatctgcagaaactttagcaatttctgtaacgtggatgtcgttgaaattctgccttacctcccatgccttacagctagggaccaggatcggctgcgcgcaacttgtacgttgtccggcaatcgagacaccttatggcacctgtttaacacactacaacgtagaccggggtgggtggagtatttcatagccgcgctcaggggatgcgaactggtagatcttgctgacgaggtggcctctgtctaccagtcatatcagccccggactagcgatcgccctccagaccccctggaacctccaagtttgcccgcagagagacctggtccaccgacccccgccgctgcacattccatcccttacaattcttgtagggagaaggaaccatcgtatcccatgcctgtgcaggagacacaagccccagaatcacccggcgagaacagcgagcaggctctccagaccctgagtccgcgggccattcctcgcaatcccgatgggggaccactggaatcctctagcgacctcgcggcattatcccctctgacttcaagtggccaccaggagcaagatacagaacttggtagcacccatacggccggggctacttcttccttgaccccctcacgaggaccagttagccccagtgtgtcttttcagcctctggccagatccacaccaagggcaagccggctaccgggccccactggctcggtcgtgtctaccgggacatccttctcaagtagctcccctggactcgcttctgccggtgcggccgagggcaaacagggggcagaaagcgaccaggctgagccaatcatttgctcaagtggagccgaggctcccgccaactccctgcctagcaaggtaccaaccacgcttatgcccgttaatactgtggcactgaaagtcccggccaaccctgcttctgtgtcaacagtgccaagtaagttgcccaccagctccaagcctcccggcgcggtcccatctaatgcactcactaaccctgccccctcgaaactgccaatcaatagcacacgtgctggtatggttccgtccaaggtgcctacctcaatggtattaacgaaagtgagtgcctctaccgtccccacagatgggagctcccgcaacgaagagactccagcagcccccacccctgctggagccacaggcggctcaagcgcatggctggactcttccagtgaaaatagagggctcggaagcgagctttctaagccaggtgtgctggcgtcccaagttgactcaccctttagtggctgtttcgaagatttggctataagcgcctcgacttccctagggatgggaccttgccacggcccggaggagaacgaatacaaatctgagggtacctttgggatccatgtggcagaaaacccaagcattcagctgctcgagggcaatcccggacctccagccgaccccgatggcgggcctaggccgcaggctgaccggaagttccaagaacgagaggtcccctgtcaccgcccatcacctggagccctgtggcttcaggtggcagtaacaggtgttctggtggtcaccttgctcgtggtcctgtacagaaggcggttacactga

SEQ ID NO: 7791 - RNA, 1623 nt, synthetic construct
  misc_feature 1..1623: note = derived and/or modified sequence opt4 fromCardif__Homo_sapiens__ABA54890
  source 1..1623: mol_type = other RNA
atgcccttcgccgaggacaagacctacaagtacatctgcagaaacttcagcaacttctgcaacgtggacgtggtggagatcctgccctacctgccctgcctgaccgccagagaccaggacagactgagagccacctgcaccctgagcggcaacagagacaccctgtggcacctgttcaacaccctgcagagaagacccggctgggtggagtacttcatcgccgccctgagaggctgcgagctggtggacctggccgacgaggtggccagcgtgtaccagagctaccagcccagaaccagcgacagaccccccgaccccctggagccccccagcctgcccgccgagagacccggcccccccacccccgccgccgcccacagcatcccctacaacagctgcagagagaaggagcccagctaccccatgcccgtgcaggagacccaggcccccgagagccccggcgagaacagcgagcaggccctgcagaccctgagccccagagccatccccagaaaccccgacggcggccccctggagagcagcagcgacctggccgccctgagccccctgaccagcagcggccaccaggagcaggacaccgagctgggcagcacccacaccgccggcgccaccagcagcctgacccccagcagaggccccgtgagccccagcgtgagcttccagcccctggccagaagcacccccagagccagcagactgcccggccccaccggcagcgtggtgagcaccggcaccagcttcagcagcagcagccccggcctggccagcgccggcgccgccgagggcaagcagggcgccgagagcgaccaggccgagcccatcatctgcagcagcggcgccgaggcccccgccaacagcctgcccagcaaggtgcccaccaccctgatgcccgtgaacaccgtggccctgaaggtgcccgccaaccccgccagcgtgagcaccgtgcccagcaagctgcccaccagcagcaagccccccggcgccgtgcccagcaacgccctgaccaaccccgcccccagcaagctgcccatcaacagcaccagagccggcatggtgcccagcaaggtgcccaccagcatggtgctgaccaaggtgagcgccagcaccgtgcccaccgacggcagcagcagaaacgaggagacccccgccgcccccacccccgccggcgccaccggcggcagcagcgcctggctggacagcagcagcgagaacagaggcctgggcagcgagctgagcaagcccggcgtgctggccagccaggtggacagccccttcagcggctgcttcgaggacctggccatcagcgccagcaccagcctgggcatgggcccctgccacggccccgaggagaacgagtacaagagcgagggcaccttcggcatccacgtggccgagaaccccagcatccagctgctggagggcaaccccggcccccccgccgaccccgacggcggccccagaccccaggccgacagaaagttccaggagagagaggtgccctgccacagacccagccccggcgccctgtggctgcaggtggccgtgaccggcgtgctggtggtgaccctgctggtggtgctgtacagaagaagactgcactga

SEQ ID NO: 7792 - RNA, 1623 nt, synthetic construct
  misc_feature 1..1623: note = derived and/or modified sequence opt5 fromCardif__Homo_sapiens__ABA54890
  source 1..1623: mol_type = other RNA
atgcccttcgccgaggacaagacctacaaatatatctgcagaaactttagcaatttctgtaacgtggatgtcgttgaaattctgccttacctcccgtgcctgacagctcgggaccaggatcgccttagagccacgtgtaccctgtccggcaatcgggacacactctggcacctgtttaacacccttcaacgcagacccgggtgggtggagtatttcatcgcggctctgcggggatgcgaactcgtggatctggccgacgaggtcgcctctgtgtaccagagctatcagcctcgcacatccgatagaccccctgaccccctggaacctccgtctctccccgctgagcggcctgggccccctacccccgccgctgcccatagcattccgtacaattcctgtcgcgagaaggaaccttcttatcccatgcctgttcaggagacacaagcgcccgaaagccccggcgagaactccgagcaggccctgcagacccttagccctagagctatcccgcggaatcccgatggaggccctctggaatcttccagcgacctcgccgctctgtctccccttacgtccagcgggcaccaggagcaagataccgaactgggatctacacataccgccggcgcgacatccagcctcaccccttcccgcggccccgtgtctccgagcgtctcctttcagcctctggccagaagcacgccccgggcttctcgcctgcctgggcccacaggatccgtggttagcaccggcacatctttcagctcctctagccctgggctcgcctccgctggagccgccgagggcaaacagggggctgaaagcgaccaggcggagcccattatctgttcttccggagccgaggctccggccaacagcctgccttctaaggtgcccaccacccttatgcccgtcaatacagtggccctgaaagtgcctgctaacccggcctccgtcagcacggttccctccaagctccctacctctagcaagccccctggcgcggtgccctccaatgctctgacaaaccctgccccctctaaacttccgatcaatagcaccagagccggcatggtgccttccaaggtccccacaagcatggtgctgaccaaagtttctgcttccacggtgcctacagatgggagctctcggaacgaagagacccccgccgctccgacccctgccggagcgacaggcgggtccagcgcctggctcgactctagctccgaaaatagaggactgggcagcgagctgtctaagcccggggtcctcgcttcccaagtggacagccctttttccggatgcttcgaagatctggccatttctgctagcacctcccttggcatgggcccctgccacgggcccgaggagaacgaatacaaatctgagggaacatttggcatccatgttgccgaaaaccctagcattcagctgctcgaggggaatccgggaccccctgcggaccccgatggcgggcctcgcccccaggccgaccggaagttccaagaaagagaggtgccttgtcaccgcccgtcccccggcgctctgtggcttcaggtcgccgtgacgggagtcctggtggttaccctcctggtggtcctgtaccggagacgcctccactga

SEQ ID NO: 7793 - protein, 128 aa, synthetic construct
  REGION 1..128: note = CD59,Beta-Defensin__Homo_sapiens__P13987
MGIQGGSVLFGLLLVLAVFCHSGHSLQCYNCPNPTADCKTAVNCSSDFDACLITKAGLQVYNKCWKFEHCNFNDVTTRLRENELTYYCCKKDLCNFNEQLENGGTSLSEKTVLLLVTPFLAAAWSLHP

SEQ ID NO: 7794 - RNA, 387 nt, synthetic construct
  misc_feature 1..387: note = CD59,Beta-Defensin__Homo_sapiens__AAA51952
  source 1..387: mol_type = other RNA
atgggaatccaaggagggtctgtcctgttcgggctgctgctcgtcctggctgtcttctgccattcaggtcatagcctgcagtgctacaactgtcctaacccaactgctgactgcaaaacagccgtcaattgttcatctgattttgatgcgtgtctcattaccaaagctgggttacaagtgtataacaagtgttggaagtttgagcattgcaatttcaacgacgtcacaacccgcttgagggaaaatgagctaacgtactactgctgcaagaaggacctgtgtaactttaacgaacagcttgaaaatggtgggacatccttatcagagaaaacagttcttctgctggtgactccatttctggcagcagcctggagccttcatccctaa

SEQ ID NO: 7795 - RNA, 387 nt, synthetic construct
  misc_feature 1..387: note = derived and/or modified sequence opt1 fromCD59,Beta-Defensin__Homo_sapiens__AAA51952
  source 1..387: mol_type = other RNA
atgggcatccagggcgggagcgtgctgttcgggctcctgctggtcctcgccgtgttctgccactccggccacagcctgcagtgctacaactgccccaacccgaccgccgactgcaagaccgcggtgaactgctccagcgacttcgacgcctgcctgatcacgaaggccgggctccaggtctacaacaagtgctggaagttcgagcactgcaacttcaacgacgtgaccacccgcctgcgggagaacgagctgacctactactgctgcaagaaggacctctgcaacttcaacgagcagctggagaacggcggcacgtccctgagcgagaagaccgtgctcctgctggtcacccccttcctcgccgccgcgtggtccctgcacccctga

SEQ ID NO: 7796 - RNA, 387 nt, synthetic construct
  misc_feature 1..387: note = derived and/or modified sequence opt2 fromCD59,Beta-Defensin__Homo_sapiens__AAA51952
  source 1..387: mol_type = other RNA
atgggcatccagggcggctccgtcctcttcggcctcctcctcgtcctcgccgtcttctgccactccggccactccctccagtgctacaactgccccaaccccaccgccgactgcaagaccgccgtcaactgctcctccgacttcgacgcctgcctcatcaccaaggccggcctccaggtctacaacaagtgctggaagttcgagcactgcaacttcaacgacgtcaccacccgcctccgcgagaacgagctcacctactactgctgcaagaaggacctctgcaacttcaacgagcagctcgagaacggcggcacctccctctccgagaagaccgtcctcctcctcgtcacccccttcctcgccgccgcctggtccctccacccctga

SEQ ID NO: 7797 - RNA, 387 nt, synthetic construct
  misc_feature 1..387: note = derived and/or modified sequence opt3 fromCD59,Beta-Defensin__Homo_sapiens__AAA51952
  source 1..387: mol_type = other RNA
atgggcatccaagggggaagcgtgctgttcggtctccttctggtcttggccgtgttttgccactccggccattctttacagtgttacaactgccccaatcctaccgctgactgtaagacagcagttaactgctcaagtgatttcgacgcctgtctgattactaaagcggggctacaggtatataataagtgctggaaatttgagcactgtaacttcaatgatgtgacgaccagactcagggaaaacgagctgacatactattgctgtaagaaagacctttgcaattttaacgaacagctggagaatggaggcactagcttgtccgaaaagaccgtcctcctgctggtgacaccattcctcgctgccgcatggtctttacatccgtga

SEQ ID NO: 7798 - RNA, 387 nt, synthetic construct
  misc_feature 1..387: note = derived and/or modified sequence opt4 fromCD59,Beta-Defensin__Homo_sapiens__AAA51952
  source 1..387: mol_type = other RNA
atgggcatccagggcggcagcgtgctgttcggcctgctgctggtgctggccgtgttctgccacagcggccacagcctgcagtgctacaactgccccaaccccaccgccgactgcaagaccgccgtgaactgcagcagcgacttcgacgcctgcctgatcaccaaggccggcctgcaggtgtacaacaagtgctggaagttcgagcactgcaacttcaacgacgtgaccaccagactgagagagaacgagctgacctactactgctgcaagaaggacctgtgcaacttcaacgagcagctggagaacggcggcaccagcctgagcgagaagaccgtgctgctgctggtgacccccttcctggccgccgcctggagcctgcacccctga

SEQ ID NO: 7799 - RNA, 387 nt, synthetic construct
  misc_feature 1..387: note = derived and/or modified sequence opt5 fromCD59,Beta-Defensin__Homo_sapiens__AAA51952
  source 1..387: mol_type = other RNA
atgggcatccaagggggaagcgtgctgttcggcctcctgcttgtcctggccgtgttttgccactccgggcattctctccagtgttacaactgccccaatcctaccgctgactgtaagacagccgttaactgcagctccgatttcgacgcgtgtctgattacgaaagctggacttcaggtgtataataagtgctggaaatttgagcactgtaacttcaatgatgtcaccacaagactgcgggaaaacgagctcacctactattgctgtaagaaagacctgtgcaattttaacgaacagctggagaatggcgggacatctctcagcgaaaagaccgtgctgcttctggttacaccgttcctcgccgccgcttggtccctgcatccctga

SEQ ID NO: 7800 - protein, 128 aa, synthetic construct; identical to SEQ ID NO: 7793
  REGION 1..128: note = CD59,Beta-Defensin__Homo_sapiens__Q6FHM9

SEQ ID NO: 7801 - RNA, 387 nt, synthetic construct; identical to SEQ ID NO: 7794
  misc_feature 1..387: note = CD59,Beta-Defensin__Homo_sapiens__BAG34721
  source 1..387: mol_type = other RNA

SEQ ID NO: 7802 - RNA, 387 nt, synthetic construct; identical to SEQ ID NO: 7795
  misc_feature 1..387: note = derived and/or modified sequence opt1 fromCD59,Beta-Defensin__Homo_sapiens__BAG34721
  source 1..387: mol_type = other RNA

SEQ ID NO: 7803 - RNA, 387 nt, synthetic construct; identical to SEQ ID NO: 7796
  misc_feature 1..387: note = derived and/or modified sequence opt2 fromCD59,Beta-Defensin__Homo_sapiens__BAG34721
  source 1..387: mol_type = other RNA

SEQ ID NO: 7804 - RNA, 387 nt, synthetic construct; identical to SEQ ID NO: 7797
  misc_feature 1..387: note = derived and/or modified sequence opt3 fromCD59,Beta-Defensin__Homo_sapiens__BAG34721
  source 1..387: mol_type = other RNA

SEQ ID NO: 7805 - RNA, 387 nt, synthetic construct; identical to SEQ ID NO: 7798
  misc_feature 1..387: note = derived and/or modified sequence opt4 fromCD59,Beta-Defensin__Homo_sapiens__BAG34721
  source 1..387: mol_type = other RNA

SEQ ID NO: 7806 - RNA, 387 nt, synthetic construct; identical to SEQ ID NO: 7799
  misc_feature 1..387: note = derived and/or modified sequence opt5 fromCD59,Beta-Defensin__Homo_sapiens__BAG34721
  source 1..387: mol_type = other RNA

SEQ ID NO: 7807 - protein, 191 aa, synthetic construct
  REGION 1..191: note = Cdc42__Homo_sapiens__A0A024RAE4
MQTIKCVVVGDGAVGKTCLLISYTTNKFPSEYVPTVFDNYAVTVMIGGEPYTLGLFDTAGQEDYDRLRPLSYPQTDVFLVCFSVVSPSSFENVKEKWVPEITHHCPKTPFLLVGTQIDLRDDPSTIEKLAKNKQKPITPETAEKLARDLKAVKYVECSALTQKGLKNVFDEAILAALEPPEPKKSRRCVLL

SEQ ID NO: 7808 - RNA, 576 nt, synthetic construct
  misc_feature 1..576: note = Cdc42__Homo_sapiens__EAW95002
  source 1..576: mol_type = other RNA
atgcagacaattaagtgtgttgttgtgggcgatggtgctgttggtaaaacatgtctcctgatatcctacacaacaaacaaatttccatcggaatatgtaccgactgtttttgacaactatgcagtcacagttatgattggtggagaaccatatactcttggactttttgatactgcagggcaagaggattatgacagattacgaccgctgagttatccacaaacagatgtatttctagtctgtttttcagtggtctctccatcttcatttgaaaacgtgaaagaaaagtgggtgcctgagataactcaccactgtccaaagactcctttcttgcttgttgggactcaaattgatctcagagatgacccctctactattgagaaacttgccaagaacaaacagaagcctatcactccagagactgctgaaaagctggcccgtgacctgaaggctgtcaagtatgtggagtgttctgcacttacacagaaaggcctaaagaatgtatttgacgaagcaatattggctgccctggagcctccagaaccgaagaagagccgcaggtgtgtgctgctatga

SEQ ID NO: 7809 - RNA, 576 nt, synthetic construct
  misc_feature 1..576: note = derived and/or modified sequence opt1 fromCdc42__Homo_sapiens__EAW95002
  source 1..576: mol_type = other RNA
atgcagaccatcaagtgcgtggtcgtgggcgacggggccgtgggcaagacctgcctgctcatcagctacacgaccaacaagttcccctccgagtacgtcccgaccgtgttcgacaactacgccgtgaccgtcatgatcgggggcgagccctacacgctggggctgttcgacaccgcgggccaggaggactacgaccgcctccggcccctgagctacccccagaccgacgtgttcctggtgtgcttctccgtcgtgagcccgtccagcttcgagaacgtgaaggagaagtgggtccccgagatcacccaccactgccccaagacgcccttcctcctggtgggcacccagatcgacctgcgcgacgacccgtccaccatcgagaagctcgccaagaacaagcagaagcccatcacccccgagacggccgagaagctggcccgggacctgaaggccgtgaagtacgtcgagtgcagcgcgctcacccagaaggggctgaagaacgtgttcgacgaggccatcctggccgccctcgagcccccggagcccaagaagtcccgccggtgcgtgctgctgtga

SEQ ID NO: 7810 - RNA, 576 nt, synthetic construct
  misc_feature 1..576: note = derived and/or modified sequence opt2 fromCdc42__Homo_sapiens__EAW95002
  source 1..576: mol_type = other RNA
atgcagaccatcaagtgcgtcgtcgtcggcgacggcgccgtcggcaagacctgcctcctcatctcctacaccaccaacaagttcccctccgagtacgtccccaccgtcttcgacaactacgccgtcaccgtcatgatcggcggcgagccctacaccctcggcctcttcgacaccgccggccaggaggactacgaccgcctccgccccctctcctacccccagaccgacgtcttcctcgtctgcttctccgtcgtctccccctcctccttcgagaacgtcaaggagaagtgggtccccgagatcacccaccactgccccaagacccccttcctcctcgtcggcacccagatcgacctccgcgacgacccctccaccatcgagaagctcgccaagaacaagcagaagcccatcacccccgagaccgccgagaagctcgcccgcgacctcaaggccgtcaagtacgtcgagtgctccgccctcacccagaagggcctcaagaacgtcttcgacgaggccatcctcgccgccctcgagccccccgagcccaagaagtcccgccgctgcgtcctcctctga

SEQ ID NO: 7811 - RNA, 576 nt, synthetic construct
  misc_feature 1..576: note = derived and/or modified sequence opt3 fromCdc42__Homo_sapiens__EAW95002
  source 1..576: mol_type = other RNA
atgcagaccatcaagtgcgtggtcgttggcgacggggccgtgggaaaaacatgtctgctcattagctacactacgaacaagttcccctccgagtatgtacctaccgtgtttgataattacgctgtcacagtgatgataggtggcgaaccatatactcttgggctgttcgacaccgcaggacaagaggattacgacagattgaggccgttatcttatccccagacagatgtttttctggtgtgcttctcagtcgtgagtcctagctcctttgaaaacgtaaaagagaagtgggttccagaaatcacccaccattgtcccaaaactcctttcctactcgtgggcacacagattgacctgcgggatgacccatctaccatcgagaaacttgccaagaataagcagaagcccattacgcctgagactgcggaaaaactggctcgcgatttgaaggccgtcaaatacgtggagtgctcggcactcacccaaaagggtctgaagaacgtgtttgacgaagccatcctggctgcactcgagccaccggagcccaaaaagtcacgacgttgtgtcttactgtga

SEQ ID NO: 7812 - RNA, 576 nt, synthetic construct
  misc_feature 1..576: note = derived and/or modified sequence opt4 fromCdc42__Homo_sapiens__EAW95002
  source 1..576: mol_type = other RNA
atgcagaccatcaagtgcgtggtggtgggcgacggcgccgtgggcaagacctgcctgctgatcagctacaccaccaacaagttccccagcgagtacgtgcccaccgtgttcgacaactacgccgtgaccgtgatgatcggcggcgagccctacaccctgggcctgttcgacaccgccggccaggaggactacgacagactgagacccctgagctacccccagaccgacgtgttcctggtgtgcttcagcgtggtgagccccagcagcttcgagaacgtgaaggagaagtgggtgcccgagatcacccaccactgccccaagacccccttcctgctggtgggcacccagatcgacctgagagacgaccccagcaccatcgagaagctggccaagaacaagcagaagcccatcacccccgagaccgccgagaagctggccagagacctgaaggccgtgaagtacgtggagtgcagcgccctgacccagaagggcctgaagaacgtgttcgacgaggccatcctggccgccctggagccccccgagcccaagaagagcagaagatgcgtgctgctgtga

SEQ ID NO: 7813 - RNA, 576 nt, synthetic construct
  misc_feature 1..576: note = derived and/or modified sequence opt5 fromCdc42__Homo_sapiens__EAW95002
  source 1..576: mol_type = other RNA
atgcagaccatcaagtgcgtggtcgttggcgacggggccgtgggaaaaacatgtctgctcattagctacacgaccaacaagttcccctccgagtatgtgcctacagtctttgataattacgctgtgaccgttatgatcggcggggaaccgtatacactgggacttttcgacaccgccggccaagaggattacgacagactgcggcccctctcttatcctcagacagatgtgtttctggtctgcttcagcgtggtttccccctctagctttgaaaacgtgaaagagaagtgggtccctgaaattacccaccattgtcccaaaacgcctttccttctggtggggacccagatcgacctccgcgatgacccgtccacaattgagaagctggcgaagaataaacagaagcccatcacccctgagacagctgaaaaactggccagagatctcaaggccgtgaaatacgtcgagtgctctgctctgacccaaaagggacttaagaacgtttttgacgaagccatcctggctgccctcgagccccctgagcccaaaaagagccggcgctgtgtgctgctttga

SEQ ID NO: 7814 - protein, 191 aa, synthetic construct
  REGION 1..191: note = Cdc42__Homo_sapiens__A0A024RAE6
MQTIKCVVVGDGAVGKTCLLISYTTNKFPSEYVPTVFDNYAVTVMIGGEPYTLGLFDTAGQEDYDRLRPLSYPQTDVFLVCFSVVSPSSFENVKEKWVPEITHHCPKTPFLLVGTQIDLRDDPSTIEKLAKNKQKPITPETAEKLARDLKAVKYVECSALTQRGLKNVFDEAILAALEPPETQPKRKCCIF

SEQ ID NO: 7815 - RNA, 576 nt, synthetic construct
  misc_feature 1..576: note = Cdc42__Homo_sapiens__EAW95006
  source 1..576: mol_type = other RNA
atgcagacaattaagtgtgttgttgtgggcgatggtgctgttggtaaaacatgtctcctgatatcctacacaacaaacaaatttccatcggaatatgtaccgactgtttttgacaactatgcagtcacagttatgattggtggagaaccatatactcttggactttttgatactgcagggcaagaggattatgacagattacgaccgctgagttatccacaaacagatgtatttctagtctgtttttcagtggtctctccatcttcatttgaaaacgtgaaagaaaagtgggtgcctgagataactcaccactgtccaaagactcctttcttgcttgttgggactcaaattgatctcagagatgacccctctactattgagaaacttgccaagaacaaacagaagcctatcactccagagactgctgaaaagctggcccgtgacctgaaggctgtcaagtatgtggagtgttctgcacttacacagagaggtctgaagaatgtgtttgatgaggctatcctagctgccctcgagcctccggaaactcaacccaaaaggaagtgctgtatattctaa

SEQ ID NO: 7816 - RNA, 576 nt, synthetic construct
  misc_feature 1..576: note = derived and/or modified sequence opt1 fromCdc42__Homo_sapiens__EAW95006
  source 1..576: mol_type = other RNA
atgcagaccatcaagtgcgtggtcgtgggcgacggggccgtgggcaagacctgcctgctcatcagctacacgaccaacaagttcccctccgagtacgtcccgaccgtgttcgacaactacgccgtgaccgtcatgatcgggggcgagccctacacgctggggctgttcgacaccgcgggccaggaggactacgaccgcctccggcccctgagctacccccagaccgacgtgttcctggtgtgcttctccgtcgtgagcccgtccagcttcgagaacgtgaaggagaagtgggtccccgagatcacccaccactgccccaagacgcccttcctcctggtgggcacccagatcgacctgcgcgacgacccgtccaccatcgagaagctcgccaagaacaagcagaagcccatcacccccgagacggccgagaagctggcccgggacctgaaggccgtgaagtacgtcgagtgcagcgcgctcacccagcgcgggctgaagaacgtgttcgacgaggccatcctggccgccctcgagcccccggagacccagcccaagcggaagtgctgcatcttctga

SEQ ID NO: 7817 - RNA, 576 nt, synthetic construct
  misc_feature 1..576: note = derived and/or modified sequence opt2 fromCdc42__Homo_sapiens__EAW95006
  source 1..576: mol_type = other RNA
atgcagaccatcaagtgcgtcgtcgtcggcgacggcgccgtcggcaagacctgcctcctcatctcctacaccaccaacaagttcccctccgagtacgtccccaccgtcttcgacaactacgccgtcaccgtcatgatcggcggcgagccctacaccctcggcctcttcgacaccgccggccaggaggactacgaccgcctccgccccctctcctacccccagaccgacgtcttcctcgtctgcttctccgtcgtctccccctcctccttcgagaacgtcaaggagaagtgggtccccgagatcacccaccactgccccaagacccccttcctcctcgtcggcacccagatcgacctccgcgacgacccctccaccatcgagaagctcgccaagaacaagcagaagcccatcacccccgagaccgccgagaagctcgcccgcgacctcaaggccgtcaagtacgtcgagtgctccgccctcacccagcgcggcctcaagaacgtcttcgacgaggccatcctcgccgccctcgagccccccgagacccagcccaagcgcaagtgctgcatcttctga

SEQ ID NO: 7818 - RNA, 576 nt, synthetic construct
  misc_feature 1..576: note = derived and/or modified sequence opt3 fromCdc42__Homo_sapiens__EAW95006
  source 1..576: mol_type = other RNA
atgcagaccatcaagtgcgtggtcgttggcgacggggccgtgggaaaaacatgtctgctcattagctacactacgaacaagttcccctccgagtatgtacctaccgtgtttgataattacgctgtcacagtgatgataggtggcgaaccatatactcttgggctgttcgacaccgcaggacaagaggattacgacagattgaggccgttatcttatccccagacagatgtttttctggtgtgcttctcagtcgtgagtcctagctcctttgaaaacgtaaaagagaagtgggttccagaaatcacccaccattgtcccaaaactcctttcctactcgtgggcacacagattgacctgcgggatgacccatctaccatcgagaaacttgccaagaataagcagaagcccattacgcctgagactgcggaaaaactggctcgcgatttgaaggccgtcaaatacgtggagtgctcggcactcacccaacgaggtctgaagaacgtgtttgacgaagccatcctggctgcactcgagccaccggagacacagcccaagcgtaaatgttgcatattctga

SEQ ID NO: 7819 - RNA, 576 nt, synthetic construct
  misc_feature 1..576: note = derived and/or modified sequence opt4 fromCdc42__Homo_sapiens__EAW95006
  source 1..576: mol_type = other RNA
atgcagaccatcaagtgcgtggtggtgggcgacggcgccgtgggcaagacctgcctgctgatcagctacaccaccaacaagttccccagcgagtacgtgcccaccgtgttcgacaactacgccgtgaccgtgatgatcggcggcgagccctacaccctgggcctgttcgacaccgccggccaggaggactacgacagactgagacccctgagctacccccagaccgacgtgttcctggtgtgcttcagcgtggtgagccccagcagcttcgagaacgtgaaggagaagtgggtgcccgagatcacccaccactgccccaagacccccttcctgctggtgggcacccagatcgacctgagagacgaccccagcaccatcgagaagctggccaagaacaagcagaagcccatcacccccgagaccgccgagaagctggccagagacctgaaggccgtgaagtacgtggagtgcagcgccctgacccagagaggcctgaagaacgtgttcgacgaggccatcctggccgccctggagccccccgagacccagcccaagagaaagtgctgcatcttctga

SEQ ID NO: 7820 - RNA, 576 nt, synthetic construct
  misc_feature 1..576: note = derived and/or modified sequence opt5 fromCdc42__Homo_sapiens__EAW95006
  source 1..576: mol_type = other RNA
atgcagaccatcaagtgcgtggtcgttggcgacggggccgtgggaaaaacatgtctgctcattagctacacgaccaacaagttcccctccgagtatgtgcctacagtctttgataattacgctgtgaccgttatgatcggcggggaaccgtatacactgggacttttcgacaccgccggccaagaggattacgacagactgcggcccctctcttatcctcagacagatgtgtttctggtctgcttcagcgtggtttccccctctagctttgaaaacgtgaaagagaagtgggtccctgaaattacccaccattgtcccaaaacgcctttccttctggtggggacccagatcgacctccgcgatgacccgtccacaattgagaagctggcgaagaataaacagaagcccatcacccctgagacagctgaaaaactggccagagatctcaaggccgtgaaatacgtcgagtgctctgctctgacccaacggggacttaagaacgtttttgacgaagccatcctggctgccctcgagccccctgagacgcagcccaagcgcaaatgttgcattttctga

SEQ ID NO: 7821 - protein, 191 aa, synthetic construct; identical to SEQ ID NO: 7807
  REGION 1..191: note = Cdc42__Homo_sapiens__P60953

SEQ ID NO: 7822 - RNA, 576 nt, synthetic construct; identical to SEQ ID NO: 7808
  misc_feature 1..576: note = Cdc42__Homo_sapiens__AAA52592
  source 1..576: mol_type = other RNA

SEQ ID NO: 7823 - RNA, 576 nt, synthetic construct; identical to SEQ ID NO: 7809
  misc_feature 1..576: note = derived and/or modified sequence opt1 fromCdc42__Homo_sapiens__AAA52592
  source 1..576: mol_type = other RNA

SEQ ID NO: 7824 - RNA, 576 nt, synthetic construct; identical to SEQ ID NO: 7810
  misc_feature 1..576: note = derived and/or modified sequence opt2 fromCdc42__Homo_sapiens__AAA52592
  source 1..576: mol_type = other RNA

SEQ ID NO: 7825 - RNA, 576 nt, synthetic construct; identical to SEQ ID NO: 7811
  misc_feature 1..576: note = derived and/or modified sequence opt3 fromCdc42__Homo_sapiens__AAA52592
  source 1..576: mol_type = other RNA

SEQ ID NO: 7826 - RNA, 576 nt, synthetic construct; identical to SEQ ID NO: 7812
  misc_feature 1..576: note = derived and/or modified sequence opt4 fromCdc42__Homo_sapiens__AAA52592
  source 1..576: mol_type = other RNA

SEQ ID NO: 7827 - RNA, 576 nt, synthetic construct; identical to SEQ ID NO: 7813
  misc_feature 1..576: note = derived and/or modified sequence opt5 fromCdc42__Homo_sapiens__AAA52592
  source 1..576: mol_type = other RNA

SEQ ID NO: 7828 - protein, 253 aa, synthetic construct
  REGION 1..253: note = CFAD__Homo_sapiens__P00746
MHSWERLAVLVLLGAAACAAPPRGRILGGREAEAHARPYMASVQLNGAHLCGGVLVAEQWVLSAAHCLEDAADGKVQVLLGAHSLSQPEPSKRLYDVLRAVPHPDSQPDTIDHDLLLLQLSEKATLGPAVRPLPWQRVDRDVAPGTLCDVAGWGIVNHAGRRPDSLQHVLLPVLDRATCNRRTHHDGAITERLMCAESNRRDSCKGDSGGPLVCGGVLEGVVTSGSRVCGNRKKPGIYTRVASYAAWIDSVLA

SEQ ID NO: 7829 - RNA, 762 nt, synthetic construct
  misc_feature 1..762: note = CFAD__Homo_sapiens__CCDS12046.1
  source 1..762: mol_type = other RNA
atgcacagctgggagcgcctggcagttctggtcctcctaggagcggccgcctgcgcggcgccgccccgtggtcggatcctgggcggcagagaggccgaggcgcacgcgcggccctacatggcgtcggtgcagctgaacggcgcgcacctgtgcggcggcgtcctggtggcggagcagtgggtgctgagcgcggcgcactgcctggaggacgcggccgacgggaaggtgcaggttctcctgggcgcgcactccctgtcgcagccggagccctccaagcgcctgtacgacgtgctccgcgcagtgccccacccggacagccagcccgacaccatcgaccacgacctcctgctgctacagctgtcggagaaggccacactgggccctgctgtgcgccccctgccctggcagcgcgtggaccgcgacgtggcaccgggaactctctgcgacgtggccggctggggcatagtcaaccacgcgggccgccgcccggacagcctgcagcacgtgctcttgccagtgctggaccgcgccacctgcaaccggcgcacgcaccacgacggcgccatcaccgagcgcttgatgtgcgcggagagcaatcgccgggacagctgcaagggtgactccgggggcccgctggtgtgcgggggcgtgctcgagggcgtggtcacctcgggctcgcgcgtttgcggcaaccgcaagaagcccgggatctacacccgcgtggcgagctatgcggcctggatcgacagcgtcctggcctag

SEQ ID NO: 7830 - RNA, 762 nt, synthetic construct
  misc_feature 1..762: note = derived and/or modified sequence opt1 fromCFAD__Homo_sapiens__CCDS12046.1
  source 1..762: mol_type = other RNA
atgcacagctgggagcgcctggccgtgctcgtcctgctgggcgccgcggcctgcgccgcgcccccgcgggggcgcatcctcggcgggcgggaggccgaggcccacgcccgcccctacatggcctccgtgcagctgaacggcgcccacctgtgcgggggcgtgctcgtcgcggagcagtgggtgctgagcgccgcccactgcctggaggacgccgccgacggcaaggtgcaggtcctcctgggggcgcactccctgagccagcccgagccctccaagcggctctacgacgtgctgcgcgccgtgccgcaccccgacagccagcccgacaccatcgaccacgacctgctcctgctgcagctctccgagaaggccaccctgggccccgccgtccggccgctgccctggcagcgcgtggaccgggacgtggcccccgggacgctctgcgacgtcgcgggctgggggatcgtgaaccacgccggccgccggcccgacagcctgcagcacgtgctgctcccggtcctggaccgcgcgacctgcaaccggcgcacccaccacgacggcgccatcaccgagcggctgatgtgcgccgagtccaaccgccgggacagctgcaagggggactccggcgggcccctcgtgtgcggcggcgtgctggagggggtcgtgacgagcggctcccgcgtgtgcgggaaccggaagaagcccggcatctacacccgcgtcgccagctacgccgcctggatcgactccgtgctggcctga

SEQ ID NO: 7831 - RNA, 762 nt, synthetic construct
  misc_feature 1..762: note = derived and/or modified sequence opt2 fromCFAD__Homo_sapiens__CCDS12046.1
  source 1..762: mol_type = other RNA
atgcactcctgggagcgcctcgccgtcctcgtcctcctcggcgccgccgcctgcgccgcccccccccgcggccgcatcctcggcggccgcgaggccgaggcccacgcccgcccctacatggcctccgtccagctcaacggcgcccacctctgcggcggcgtcctcgtcgccgagcagtgggtcctctccgccgcccactgcctcgaggacgccgccgacggcaaggtccaggtcctcctcggcgcccactccctctcccagcccgagccctccaagcgcctctacgacgtcctccgcgccgtcccccaccccgactcccagcccgacaccatcgaccacgacctcctcctcctccagctctccgagaaggccaccctcggccccgccgtccgccccctcccctggcagcgcgtcgaccgcgacgtcgcccccggcaccctctgcgacgtcgccggctggggcatcgtcaaccacgccggccgccgccccgactccctccagcacgtcctcctccccgtcctcgaccgcgccacctgcaaccgccgcacccaccacgacggcgccatcaccgagcgcctcatgtgcgccgagtccaaccgccgcgactcctgcaagggcgactccggcggccccctcgtctgcggcggcgtcctcgagggcgtcgtcacctccggctcccgcgtctgcggcaaccgcaagaagcccggcatctacacccgcgtcgcctcctacgccgcctggatcgactccgtcctcgcctga

SEQ ID NO: 7832 - RNA, 762 nt, synthetic construct
  misc_feature 1..762: note = derived and/or modified sequence opt3 fromCFAD__Homo_sapiens__CCDS12046.1
  source 1..762: mol_type = other RNA
atgcacagctgggagagactggccgtgctcgtccttctgggcgctgcagcctgcgcggctccccctagggggcggatcttgggaggtcgcgaagccgaggcacatgcccgaccatacatggcttccgttcagttaaacggcgcacacctgtgtgggggagtgctagtagccgaacaatgggtgctctctgctgcccattgcctggaggacgcggcagatggcaaggtccaggtgcttctgggtgcccactcattgagtcagccggaacccagcaaacgtctctatgacgttctgagagctgtgcctcatccagattcccagcccgacaccattgatcacgacctgctcttactgcaactttctgagaaggccacattggggcctgcagtcaggccactgccctggcagcgggtggatcgcgacgtagctcctggaactctatgtgatgttgccggctggggcatagtgaatcacgcggggagaaggccagactcgctccagcatgtcctgcttccggtgctggatcgggccacgtgcaaccgccgaacccaccatgacggagcaatcacagagagattgatgtgtgctgaatcaaataggcgggatagctgcaaaggtgacagtggcgggcccctcgtgtgtggaggcgtcctggagggtgttgtgacttccgggtctcgtgtatgcggaaaccgcaagaaacctggcatttacaccagagtggccagctatgctgcctggatcgactccgtcttagcatga

SEQ ID NO: 7833 - RNA, 762 nt, synthetic construct
  misc_feature 1..762: note = derived and/or modified sequence opt4 fromCFAD__Homo_sapiens__CCDS12046.1
  source 1..762: mol_type = other RNA
atgcacagctgggagagactggccgtgctggtgctgctgggcgccgccgcctgcgccgccccccccagaggcagaatcctgggcggcagagaggccgaggcccacgccagaccctacatggccagcgtgcagctgaacggcgcccacctgtgcggcggcgtgctggtggccgagcagtgggtgctgagcgccgcccactgcctggaggacgccgccgacggcaaggtgcaggtgctgctgggcgcccacagcctgagccagcccgagcccagcaagagactgtacgacgtgctgagagccgtgccccaccccgacagccagcccgacaccatcgaccacgacctgctgctgctgcagctgagcgagaaggccaccctgggccccgccgtgagacccctgccctggcagagagtggacagagacgtggcccccggcaccctgtgcgacgtggccggctggggcatcgtgaaccacgccggcagaagacccgacagcctgcagcacgtgctgctgcccgtgctggacagagccacctgcaacagaagaacccaccacgacggcgccatcaccgagagactgatgtgcgccgagagcaacagaagagacagctgcaagggcgacagcggcggccccctggtgtgcggcggcgtgctggagggcgtggtgaccagcggcagcagagtgtgcggcaacagaaagaagcccggcatctacaccagagtggccagctacgccgcctggatcgacagcgtgctggcctga

SEQ ID NO: 7834 - RNA, 762 nt, synthetic construct
  misc_feature 1..762: note = derived and/or modified sequence opt5 fromCFAD__Homo_sapiens__CCDS12046.1
  source 1..762: mol_type = other RNA
atgcacagctgggagagactggccgtgctcgtcctgcttggcgctgccgcgtgcgctgctccccctcgggggcgcatcctgggaggcagagaagccgaggcccatgcccggccgtacatggcttccgttcagctcaacggggcccacctgtgtggaggcgtgcttgtggcggaacaatgggtcctgtctgccgctcattgcctcgaggacgccgctgatgggaaggtgcaggttctgctgggagcccacagcctctcccagcccgaaccttctaaacgcctgtatgacgtgcttagagcggtcccccatcctgatagccagcccgacaccattgatcacgacctgctcctgcttcaactgtccgagaaggccacactcggccctgctgtgcggccgctgccctggcagcgcgttgatagagacgtggcccctggcacgctgtgtgatgtcgctgggtggggaatcgtgaatcacgccggccggcgccccgactctctccagcatgtgctgcttcctgtcctggatagagctacctgcaaccggcgcacacaccatgacggggccattaccgagagactcatgtgtgcggaaagcaatcggcgcgattcctgcaaaggagacagcggcgggcccctggtttgtggaggcgtgcttgagggcgtggtcacatctgggtccagagtgtgcggaaaccggaagaaaccgggcatctacaccagagttgccagctatgctgcctggattgactctgtgctggcctga

SEQ ID NO: 7835 - protein, 1231 aa, synthetic construct
  REGION 1..1231: note = CFAH__Homo_sapiens__P08603
MRLLAKIICLMLWAICVAEDCNELPPRRNTEILTGSWSDQTYPEGTQAIYKCRPGYRSLGNVIMVCRKGEWVALNPLRKCQKRPCGHPGDTPFGTFTLTGGNVFEYGVKAVYTCNEGYQLLGEINYRECDTDGWTNDIPICEVVKCLPVTAPENGKIVSSAMEPDREYHFGQAVRFVCNSGYKIEGDEEMHCSDDGFWSKEKPKCVEISCKSPDVINGSPISQKIIYKENERFQYKCNMGYEYSERGDAVCTESGWRPLPSCEEKSCDNPYIPNGDYSPLRIKHRTGDEITYQCRNGFYPATRGNTAKCTSTGWIPAPRCTLKPCDYPDIKHGGLYHENMRRPYFPVAVGKYYSYYCDEHFETPSGSYWDHIHCTQDGWSPAVPCLRKCYFPYLENGYNQNHGRKFVQGKSIDVACHPGYALPKAQTTVTCMENGWSPTPRCIRVKTCSKSSIDIENGFISESQYTYALKEKAKYQCKLGYVTADGETSGSITCGKDGWSAQPTCIKSCDIPVFMNARTKNDFTWFKLNDTLDYECHDGYESNTGSTTGSIVCGYNGWSDLPICYERECELPKIDVHLVPDRKKDQYKVGEVLKFSCKPGFTIVGPNSVQCYHFGLSPDLPICKEQVQSCGPPPELLNGNVKEKTKEEYGHSEVVEYYCNPRFLMKGPNKIQCVDGEWTTLPVCIVEESTCGDIPELEHGWAQLSSPPYYYGDSVEFNCSESFTMIGHRSITCIHGVWTQLPQCVAIDKLKKCKSSNLIILEEHLKNKKEFDHNSNIRYRCRGKEGWIHTVCINGRWDPEVNCSMAQIQLCPPPPQIPNSHNMTTTLNYRDGEKVSVLCQENYLIQEGEEITCKDGRWQSIPLCVEKIPCSQPPQIEHGTINSSRSSQESYAHGTKLSYTCEGGFRISEENETTCYMGKWSSPPQCEGLPCKSPPEISHGVVAHMSDSYQYGEEVTYKCFEGFGIDGPAIAKCLGEKWSHPPSCIKTDCLSLPSFENAIPMGEKKDVYKAGEQVTYTCATYYKMDGASNVTCINSRWTGRPTCRDTSCVNPPTVQNAYIVSRQMSKYPSGERVRYQCRSPYEMFGDEEVMCLNGNWTEPPQCKDSTGKCGPPPPIDNGDITSFPLSVYAPASSVEYQCQNLYQLEGNKRITCRNGQWSEPPKCLHPCVISREIMENYNIALRWTAKQKLYSRTGESVEFVCKRGYRLSSRSHTLRTTCWDGKLEYPTCAKR

SEQ ID NO: 7836 - RNA, 3696 nt, synthetic construct
  misc_feature 1..3696: note = CFAH__Homo_sapiens__CCDS1385.1
  source 1..3696: mol_type = other RNA
atgagacttctagcaaagattatttgccttatgttatgggctatttgtgtagcagaagattgcaatgaacttcctccaagaagaaatacagaaattctgacaggttcctggtctgaccaaacatatccagaaggcacccaggctatctataaatgccgccctggatatagatctcttggaaatgtaataatggtatgcaggaagggagaatgggttgctcttaatccattaaggaaatgtcagaaaaggccctgtggacatcctggagatactccttttggtacttttacccttacaggaggaaatgtgtttgaatatggtgtaaaagctgtgtatacatgtaatgaggggtatcaattgctaggtgagattaattaccgtgaatgtgacacagatggatggaccaatgatattcctatatgtgaagttgtgaagtgtttaccagtgacagcaccagagaatggaaaaattgtcagtagtgcaatggaaccagatcgggaataccattttggacaagcagtacggtttgtatgtaactcaggctacaagattgaaggagatgaagaaatgcattgttcagacgatggtttttggagtaaagagaaaccaaagtgtgtggaaatttcatgcaaatccccagatgttataaatggatctcctatatctcagaagattatttataaggagaatgaacgatttcaatataaatgtaacatgggttatgaatacagtgaaagaggagatgctgtatgcactgaatctggatggcgtccgttgccttcatgtgaagaaaaatcatgtgataatccttatattccaaatggtgactactcacctttaaggattaaacacagaactggagatgaaatcacgtaccagtgtagaaatggtttttatcctgcaacccggggaaatacagcaaaatgcacaagtactggctggatacctgctccgagatgtaccttgaaaccttgtgattatccagacattaaacatggaggtctatatcatgagaatatgcgtagaccatactttccagtagctgtaggaaaatattactcctattactgtgatgaacattttgagactccgtcaggaagttactgggatcacattcattgcacacaagatggatggtcgccagcagtaccatgcctcagaaaatgttattttccttatttggaaaatggatataatcaaaatcatggaagaaagtttgtacagggtaaatctatagacgttgcctgccatcctggctacgctcttccaaaagcgcagaccacagttacatgtatggagaatggctggtctcctactcccagatgcatccgtgtcaaaacatgttccaaatcaagtatagatattgagaatgggtttatttctgaatctcagtatacatatgccttaaaagaaaaagcgaaatatcaatgcaaactaggatatgtaacagcagatggtgaaacatcaggatcaattacatgtgggaaagatggatggtcagctcaacccacgtgcattaaatcttgtgatatcccagtatttatgaatgccagaactaaaaatgacttcacatggtttaagctgaatgacacattggactatgaatgccatgatggttatgaaagcaatactggaagcaccactggttccatagtgtgtggttacaatggttggtctgatttacccatatgttatgaaagagaatgcgaacttcctaaaatagatgtacacttagttcctgatcgcaagaaagaccagtataaagttggagaggtgttgaaattctcctgcaaaccaggatttacaatagttggacctaattccgttcagtgctaccactttggattgtctcctgacctcccaatatgtaaagagcaagtacaatcatgtggtccacctcctgaactcctcaatgggaatgttaaggaaaaaacgaaagaagaatatggacacagtgaagtggtggaatattattgcaatcctagatttctaatgaagggacctaataaaattcaatgtgttgatggagagtggacaactttaccagtgtgtattgtggaggagagtacctgtggagatatacctgaacttgaacatggctgggcccagctttcttcccctccttattactatggagattcagtggaattcaattgctcagaatcatttacaatgattggacacagatcaattacgtgtattcatggagtatggacccaacttccccagtgtgtggcaatagataaacttaagaagtgcaaatcatcaaatttaattatacttgaggaacatttaaaaaacaagaaggaattcgatcataattctaacataaggtacagatgtagaggaaaagaaggatggatacacacagtctgcataaatggaagatgggatccagaagtgaactgctcaatggcacaaatacaattatgcccacctccacctcagattcccaattctcacaatatgacaaccacactgaattatcgggatggagaaaaagtatctgttctttgccaagaaaattatctaattcaggaaggagaagaaattacatgcaaagatggaagatggcagtcaataccactctgtgttgaaaaaattccatgttcacaaccacctcagatagaacacggaaccattaattcatccaggtcttcacaagaaagttatgcacatgggactaaattgagttatacttgtgagggtggtttcaggatatctgaagaaaatgaaacaacatgctacatgggaaaatggagttctccacctcagtgtgaaggccttccttgtaaatctccacctgagatttctcatggtgttgtagctcacatgtcagacagttatcagtatggagaagaagttacgtacaaatgttttgaaggttttggaattgatgggcctgcaattgcaaaatgcttaggagaaaaatggtctcaccctccatcatgcataaaaacagattgtctcagtttacctagctttgaaaatgccatacccatgggagagaagaaggatgtgtataaggcgggtgagcaagtgacttacacttgtgcaacatattacaaaatggatggagccagtaatgtaacatgcattaatagcagatggacaggaaggccaacatgcagagacacctcctgtgtgaatccgcccacagtacaaaatgcttatatagtgtcgagacagatgagtaaatatccatctggtgagagagtacgttatcaatgtaggagcccttatgaaatgtttggggatgaagaagtgatgtgtttaaatggaaactggacggaaccacctcaatgcaaagattctacaggaaaatgtgggccccctccacctattgacaatggggacattacttcattcccgttgtcagtatatgctccagcttcatcagttgagtaccaatgccagaacttgtatcaacttgagggtaacaagcgaataacatgtagaaatggacaatggtcagaaccaccaaaatgcttacatccgtgtgtaatatcccgagaaattatggaaaattataacatagcattaaggtggacagccaaacagaagctttattcgagaacaggtgaatcagttgaatttgtgtgtaaacggggatatcgtctttcatcacgttctcacacattgcgaacaacatgttgggatgggaaactggagtatccaacttgtgcaaaaagatag

SEQ ID NO: 7837 - RNA, 3696 nt, synthetic construct
  misc_feature 1..3696: note = derived and/or modified sequence opt1 fromCFAH__Homo_sapiens__CCDS1385.1
  source 1..3696: mol_type = other RNA
atgcgcctgctcgccaagatcatctgcctgatgctgtgggccatctgcgtggcggaggactgcaacgagctccccccgcggcgcaacaccgagatcctgaccggcagctggtccgaccagacgtaccccgaggggacccaggccatctacaagtgccggcccggctaccgcagcctggggaacgtcatcatggtgtgccggaagggcgagtgggtggccctcaaccccctgcgcaagtgccagaagcggccgtgcgggcaccccggcgacacccccttcggcaccttcacgctgaccgggggcaacgtcttcgagtacggggtgaaggccgtgtacacctgcaacgagggctaccagctcctgggggagatcaactaccgcgagtgcgacaccgacggctggacgaacgacatccccatctgcgaggtcgtgaagtgcctgccggtgaccgcccccgagaacggcaagatcgtctccagcgcgatggagcccgaccgggagtaccacttcgggcaggccgtgcgcttcgtgtgcaactccggctacaagatcgagggggacgaggagatgcactgcagcgacgacggcttctggtccaaggagaagcccaagtgcgtcgagatcagctgcaagtccccggacgtgatcaacggcagccccatctcccagaagatcatctacaaggagaacgagcggttccagtacaagtgcaacatggggtacgagtacagcgagcgcggcgacgccgtgtgcaccgagtccgggtggcggcccctccccagctgcgaggagaagtcctgcgacaacccgtacatccccaacggcgactacagccccctgcgcatcaagcaccggaccggggacgagatcacgtaccagtgccgcaacggcttctaccccgccacccggggcaacaccgcgaagtgcacctccacggggtggatcccggccccccgctgcaccctgaagccctgcgactaccccgacatcaagcacggcgggctctaccacgagaacatgcggcgcccgtacttccccgtcgccgtgggcaagtactacagctactactgcgacgagcacttcgagaccccctccgggagctactgggaccacatccactgcacccaggacggctggagccccgccgtgccgtgcctgcggaagtgctacttcccctacctggagaacggctacaaccagaaccacgggcgcaagttcgtccagggcaagtccatcgacgtggcctgccaccccgggtacgcgctcccgaaggcccagacgaccgtgacctgcatggagaacggctggagccccaccccccgctgcatccgggtcaagacgtgctccaagagctccatcgacatcgagaacgggttcatcagcgagtcccagtacacctacgccctgaaggagaaggccaagtaccagtgcaagctgggctacgtgaccgccgacggcgagaccagcgggtccatcacgtgcggcaaggacgggtggagcgcgcagcccacctgcatcaagtcctgcgacatcccggtgttcatgaacgcccgcaccaagaacgacttcacctggttcaagctcaacgacacgctggactacgagtgccacgacggctacgagagcaacaccggctccaccaccgggagcatcgtctgcggctacaacgggtggtccgacctgcccatctgctacgagcgggagtgcgagctccccaagatcgacgtgcacctggtccccgaccgcaagaaggaccagtacaaggtgggcgaggtgctgaagttcagctgcaagccggggttcacgatcgtcggccccaactccgtgcagtgctaccacttcggcctcagccccgacctgcccatctgcaaggagcaggtgcagtcctgcgggccgccccccgagctgctcaacggcaacgtcaaggagaagaccaaggaggagtacgggcacagcgaggtggtggagtactactgcaacccccggttcctgatgaagggcccgaacaagatccagtgcgtcgacggggagtggaccaccctgcccgtgtgcatcgtggaggagagcacctgcggcgacatccccgagctcgagcacggctgggcccagctgtccagccccccgtactactacggggactccgtcgagttcaactgcagcgagtccttcacgatgatcggccaccgcagcatcacctgcatccacggggtgtggacccagctgccccagtgcgtggccatcgacaagctcaagaagtgcaagtccagcaacctgatcatcctggaggagcacctcaagaacaagaaggagttcgaccacaactccaacatccggtaccgctgccggggcaaggaggggtggatccacaccgtctgcatcaacggccgctgggaccccgaggtgaactgcagcatggcccagatccagctgtgccccccgcccccccagatcccgaactcccacaacatgacgaccaccctgaactaccgggacggcgagaaggtgagcgtcctctgccaggagaactacctgatccaggagggggaggagatcacctgcaaggacggccgctggcagtccatccccctgtgcgtggagaagatcccctgcagccagcccccgcagatcgagcacgggacgatcaactccagccggtccagccaggagagctacgcgcacggcaccaagctctcctacacctgcgaggggggcttccgcatcagcgaggagaacgagaccacgtgctacatgggcaagtggtccagccccccccagtgcgaggggctgccctgcaagtccccgcccgagatcagccacggcgtggtcgcccacatgtccgacagctaccagtacggggaggaggtgacctacaagtgcttcgagggcttcggcatcgacgggcccgccatcgccaagtgcctgggcgagaagtggtcccaccccccgagctgcatcaagaccgactgcctctccctgcccagcttcgagaacgccatccccatgggggagaagaaggacgtgtacaaggcgggcgagcaggtcacctacacgtgcgccacctactacaagatggacggggcctccaacgtgacctgcatcaacagccggtggaccggccgccccacgtgccgggacacctcctgcgtgaacccgcccaccgtccagaacgcctacatcgtgagccgccagatgtccaagtaccccagcggcgagcgggtgcgctaccagtgccgctccccctacgagatgttcggggacgaggaggtcatgtgcctgaacggcaactggaccgagccgccccagtgcaaggacagcacggggaagtgcggcccccccccgcccatcgacaacggggacatcaccagcttccccctgtccgtgtacgcgcccgccagctccgtggagtaccagtgccagaacctctaccagctggagggcaacaagcggatcacctgccgcaacggccagtggagcgagccgcccaagtgcctgcacccctgcgtcatctcccgggagatcatggagaactacaacatcgccctccgctggaccgccaagcagaagctgtacagccggacgggggagtccgtggagttcgtgtgcaagcgcggctaccggctgagctcccgcagccacaccctccggaccacctgctgggacgggaagctggagtacccgacgtgcgccaagcgctga

SEQ ID NO: 7838 - RNA, 3696 nt, synthetic construct
  misc_feature 1..3696: note = derived and/or modified sequence opt2 fromCFAH__Homo_sapiens__CCDS1385.1
  source 1..3696: mol_type = other RNA
atgcgcctcctcgccaagatcatctgcctcatgctctgggccatctgcgtcgccgaggactgcaacgagctccccccccgccgcaacaccgagatcctcaccggctcctggtccgaccagacctaccccgagggcacccaggccatctacaagtgccgccccggctaccgctccctcggcaacgtcatcatggtctgccgcaagggcgagtgggtcgccctcaaccccctccgcaagtgccagaagcgcccctgcggccaccccggcgacacccccttcggcaccttcaccctcaccggcggcaacgtcttcgagtacggcgtcaaggccgtctacacctgcaacgagggctaccagctcctcggcgagatcaactaccgcgagtgcgacaccgacggctggaccaacgacatccccatctgcgaggtcgtcaagtgcctccccgtcaccgcccccgagaacggcaagatcgtctcctccgccatggagcccgaccgcgagtaccacttcggccaggccgtccgcttcgtctgcaactccggctacaagatcgagggcgacgaggagatgcactgctccgacgacggcttctggtccaaggagaagcccaagtgcgtcgagatctcctgcaagtcccccgacgtcatcaacggctcccccatctcccagaagatcatctacaaggagaacgagcgcttccagtacaagtgcaacatgggctacgagtactccgagcgcggcgacgccgtctgcaccgagtccggctggcgccccctcccctcctgcgaggagaagtcctgcgacaacccctacatccccaacggcgactactcccccctccgcatcaagcaccgcaccggcgacgagatcacctaccagtgccgcaacggcttctaccccgccacccgcggcaacaccgccaagtgcacctccaccggctggatccccgccccccgctgcaccctcaagccctgcgactaccccgacatcaagcacggcggcctctaccacgagaacatgcgccgcccctacttccccgtcgccgtcggcaagtactactcctactactgcgacgagcacttcgagaccccctccggctcctactgggaccacatccactgcacccaggacggctggtcccccgccgtcccctgcctccgcaagtgctacttcccctacctcgagaacggctacaaccagaaccacggccgcaagttcgtccagggcaagtccatcgacgtcgcctgccaccccggctacgccctccccaaggcccagaccaccgtcacctgcatggagaacggctggtcccccaccccccgctgcatccgcgtcaagacctgctccaagtcctccatcgacatcgagaacggcttcatctccgagtcccagtacacctacgccctcaaggagaaggccaagtaccagtgcaagctcggctacgtcaccgccgacggcgagacctccggctccatcacctgcggcaaggacggctggtccgcccagcccacctgcatcaagtcctgcgacatccccgtcttcatgaacgcccgcaccaagaacgacttcacctggttcaagctcaacgacaccctcgactacgagtgccacgacggctacgagtccaacaccggctccaccaccggctccatcgtctgcggctacaacggctggtccgacctccccatctgctacgagcgcgagtgcgagctccccaagatcgacgtccacctcgtccccgaccgcaagaaggaccagtacaaggtcggcgaggtcctcaagttctcctgcaagcccggcttcaccatcgtcggccccaactccgtccagtgctaccacttcggcctctcccccgacctccccatctgcaaggagcaggtccagtcctgcggccccccccccgagctcctcaacggcaacgtcaaggagaagaccaaggaggagtacggccactccgaggtcgtcgagtactactgcaacccccgcttcctcatgaagggccccaacaagatccagtgcgtcgacggcgagtggaccaccctccccgtctgcatcgtcgaggagtccacctgcggcgacatccccgagctcgagcacggctgggcccagctctcctcccccccctactactacggcgactccgtcgagttcaactgctccgagtccttcaccatgatcggccaccgctccatcacctgcatccacggcgtctggacccagctcccccagtgcgtcgccatcgacaagctcaagaagtgcaagtcctccaacctcatcatcctcgaggagcacctcaagaacaagaaggagttcgaccacaactccaacatccgctaccgctgccgcggcaaggagggctggatccacaccgtctgcatcaacggccgctgggaccccgaggtcaactgctccatggcccagatccagctctgccccccccccccccagatccccaactcccacaacatgaccaccaccctcaactaccgcgacggcgagaaggtctccgtcctctgccaggagaactacctcatccaggagggcgaggagatcacctgcaaggacggccgctggcagtccatccccctctgcgtcgagaagatcccctgctcccagcccccccagatcgagcacggcaccatcaactcctcccgctcctcccaggagtcctacgcccacggcaccaagctctcctacacctgcgagggcggcttccgcatctccgaggagaacgagaccacctgctacatgggcaagtggtcctcccccccccagtgcgagggcctcccctgcaagtccccccccgagatctcccacggcgtcgtcgcccacatgtccgactcctaccagtacggcgaggaggtcacctacaagtgcttcgagggcttcggcatcgacggccccgccatcgccaagtgcctcggcgagaagtggtcccaccccccctcctgcatcaagaccgactgcctctccctcccctccttcgagaacgccatccccatgggcgagaagaaggacgtctacaaggccggcgagcaggtcacctacacctgcgccacctactacaagatggacggcgcctccaacgtcacctgcatcaactcccgctggaccggccgccccacctgccgcgacacctcctgcgtcaacccccccaccgtccagaacgcctacatcgtctcccgccagatgtccaagtacccctccggcgagcgcgtccgctaccagtgccgctccccctacgagatgttcggcgacgaggaggtcatgtgcctcaacggcaactggaccgagcccccccagtgcaaggactccaccggcaagtgcggcccccccccccccatcgacaacggcgacatcacctccttccccctctccgtctacgcccccgcctcctccgtcgagtaccagtgccagaacctctaccagctcgagggcaacaagcgcatcacctgccgcaacggccagtggtccgagccccccaagtgcctccacccctgcgtcatctcccgcgagatcatggagaactacaacatcgccctccgctggaccgccaagcagaagctctactcccgcaccggcgagtccgtcgagttcgtctgcaagcgcggctaccgcctctcctcccgctcccacaccctccgcaccacctgctgggacggcaagctcgagtaccccacctgcgccaagcgctga

SEQ ID NO: 7839 - RNA, 3696 nt, synthetic construct
  misc_feature 1..3696: note = derived and/or modified sequence opt3 fromCFAH__Homo_sapiens__CCDS1385.1
  source 1..3696: mol_type = other RNA
atgagactgctcgccaagatcatttgccttatgctgtgggctatatgtgtggcagaggactgcaacgaattgccccctaggcggaataccgagatcttaacaggcagctggtccgatcagacttacccagaagggacgcaagccatttataaatgtcgcccgggataccgatctctgggtaacgtcatcatggtttgccgtaagggcgagtgggtggcgctaaatcccctcagaaaatgtcagaagaggccttgcgggcacccaggagacacccccttcggcacatttactctgaccggtgggaacgtattcgaatatggagtgaaagctgtctacacatgtaatgagggctatcagcttctgggcgagattaactaccgggaatgcgataccgacgggtggactaatgatatccctatatgtgaggtggttaagtgcttgccagtgacagcccccgaaaacggaaagatcgtctcaagtgcaatggagcctgaccgcgagtatcattttggtcaggccgtgagattcgtatgtaatagcggctacaaaattgaaggggatgaggaaatgcactgctccgacgatggattttggtctaaggagaaaccaaagtgcgttgaaatctcgtgtaaatcaccggacgtgattaacggcagccccatcagtcaaaagataatttacaaggagaatgagaggttccagtataaatgcaacatgggttacgaatattccgagcgcggggatgctgtctgtaccgaatctggatggcggcctctcccaagctgcgaggaaaagtcctgtgacaatccctacatccctaacggcgattattcaccactgcgaattaaacatagaacgggcgacgagatcacttaccagtgcaggaatgggttttatcccgcaacccggggaaacacagccaagtgtacttccaccggttggatcccggctcctcgttgcacactgaaaccctgtgactacccagatattaagcacggcgggctctaccatgagaacatgcgcagaccttatttccccgtggccgtgggaaaatactatagctactattgcgacgaacactttgagaccccatctggctcctactgggatcacatacattgtacgcaggacggttggtcacccgcggtcccttgcttaaggaagtgctatttcccatacctggaaaatgggtacaaccaaaatcacggccggaagtttgttcagggaaaaagcatcgatgtggcatgtcatccgggctatgcccttcccaaggctcagactacagtaacctgcatggagaacgggtggagtcctactccacgatgtattcgcgtgaaaacatgctctaagtccagcatcgacatagaaaatggattcatttcggagtctcagtacacctatgccttgaaagagaaggcaaagtaccaatgtaaactgggttatgtcacggctgatggcgaaacctccgggtcaatcacatgcggaaaggacggctggagtgcccagcccacttgtatcaaaagctgcgatattcctgtgtttatgaacgcgagaaccaagaatgacttcacatggttcaaactaaacgatactctcgactacgagtgtcacgacggttatgaatccaataccgggtctacaaccggcagcatcgtttgcggatacaacggctggtcagatctgccaatttgttacgagagggagtgcgaacttcccaagatagacgtgcacctggtcccggatcggaagaaagaccagtataaggtgggggaggtattgaaatttagttgcaagcctggattcactatcgttggtccaaattccgtgcaatgttaccattttggcctcagccccgatctgcctatttgcaaagaacaggtccagtcttgtgggcccccacctgagttactgaacggaaatgtgaaggaaaagacgaaagaggagtatggccactcagaagtcgtggagtactattgcaacccccgcttcctcatgaagggtccaaataaaatccagtgtgttgacggggaatggacaacccttccggtgtgcatcgtagaggaaagtacttgtggcgatattcctgagctggagcatggatgggcccaattgagcagtcccccatactattacggcgactctgtcgaatttaactgctcggagagcttcaccatgatagggcacagatccatcacatgtattcatggagtgtggacccagctaccccagtgcgttgcaatcgataagctgaaaaagtgtaaatcaagtaacctcattatcctggaagaacaccttaagaataagaaagaatttgaccacaactctaatataaggtaccgttgccggggcaaggagggttggatccatactgtgtgcattaacgggcgatgggatcctgaggtcaattgtagcatggctcagatccaactgtgcccaccccctccgcagattccaaactcccacaatatgacaacgaccttgaactatagagacggagaaaaagtgtcagtactctgtcaggagaattacctgatccaggaaggcgaggagataacttgcaaggatggtaggtggcaaagcattcccttatgtgtggagaaaatcccttgctctcagccaccccagattgagcatggcacaatcaactccagtcgcagctctcaggaatcctatgcccacgggaccaagctgtcatacacatgtgagggaggcttccggataagtgaagagaatgagactacctgctatatggggaagtggagctcgcctccgcaatgtgaaggactaccctgcaaatccccacctgagatctctcacggcgttgtcgctcatatgagcgactcataccagtatggtgaagaggtgacgtacaagtgttttgaagggttcggaattgacggccccgccatcgcaaaatgcctcggtgagaagtggagtcacccaccttcctgcattaaaaccgattgtctgtctcttcccagctttgagaacgccatcccaatgggcgaaaagaaggacgtgtacaaagctggggagcaggtcacatatacttgcgcgacctactataagatggatggagcatccaatgttacatgtataaactcaagatggactggcaggccgacctgccgcgacacgagctgtgtgaatcctcccacagtgcaaaacgcctacattgtaagtcgacagatgtctaaatatccatccggggaacgggtccgttaccagtgcagaagcccctatgagatgttcggagatgaagaggtgatgtgtttgaacggcaattggaccgagcctccacagtgcaaggactcgactggtaaatgtgggccccctccgccaatcgataacggagacatcacatcatttcccctgtctgtttacgctcctgccagttccgtggaataccaatgccagaatctctatcagctggagggcaacaagaggattacctgtcgcaatggtcagtggagcgaacccccaaagtgccttcatccttgcgtcatctctcgggagattatggagaactacaatatagcactgagatggactgccaaacaaaagttgtatagcaggaccggcgaatccgtggagttcgtttgtaaacgagggtaccgcctctcaagtcggagccacacactgagaacgacctgctgggatggaaagttagaatatcccacttgtgctaaaaggtga

SEQ ID NO: 7840 - RNA, 3696 nt, synthetic construct
  misc_feature 1..3696: note = derived and/or modified sequence opt4 fromCFAH__Homo_sapiens__CCDS1385.1
  source 1..3696: mol_type = other RNA
atgagactgctggccaagatcatctgcctgatgctgtgggccatctgcgtggccgaggactgcaacgagctgccccccagaagaaacaccgagatcctgaccggcagctggagcgaccagacctaccccgagggcacccaggccatctacaagtgcagacccggctacagaagcctgggcaacgtgatcatggtgtgcagaaagggcgagtgggtggccctgaaccccctgagaaagtgccagaagagaccctgcggccaccccggcgacacccccttcggcaccttcaccctgaccggcggcaacgtgttcgagtacggcgtgaaggccgtgtacacctgcaacgagggctaccagctgctgggcgagatcaactacagagagtgcgacaccgacggctggaccaacgacatccccatctgcgaggtggtgaagtgcctgcccgtgaccgcccccgagaacggcaagatcgtgagcagcgccatggagcccgacagagagtaccacttcggccaggccgtgagattcgtgtgcaacagcggctacaagatcgagggcgacgaggagatgcactgcagcgacgacggcttctggagcaaggagaagcccaagtgcgtggagatcagctgcaagagccccgacgtgatcaacggcagccccatcagccagaagatcatctacaaggagaacgagagattccagtacaagtgcaacatgggctacgagtacagcgagagaggcgacgccgtgtgcaccgagagcggctggagacccctgcccagctgcgaggagaagagctgcgacaacccctacatccccaacggcgactacagccccctgagaatcaagcacagaaccggcgacgagatcacctaccagtgcagaaacggcttctaccccgccaccagaggcaacaccgccaagtgcaccagcaccggctggatccccgcccccagatgcaccctgaagccctgcgactaccccgacatcaagcacggcggcctgtaccacgagaacatgagaagaccctacttccccgtggccgtgggcaagtactacagctactactgcgacgagcacttcgagacccccagcggcagctactgggaccacatccactgcacccaggacggctggagccccgccgtgccctgcctgagaaagtgctacttcccctacctggagaacggctacaaccagaaccacggcagaaagttcgtgcagggcaagagcatcgacgtggcctgccaccccggctacgccctgcccaaggcccagaccaccgtgacctgcatggagaacggctggagccccacccccagatgcatcagagtgaagacctgcagcaagagcagcatcgacatcgagaacggcttcatcagcgagagccagtacacctacgccctgaaggagaaggccaagtaccagtgcaagctgggctacgtgaccgccgacggcgagaccagcggcagcatcacctgcggcaaggacggctggagcgcccagcccacctgcatcaagagctgcgacatccccgtgttcatgaacgccagaaccaagaacgacttcacctggttcaagctgaacgacaccctggactacgagtgccacgacggctacgagagcaacaccggcagcaccaccggcagcatcgtgtgcggctacaacggctggagcgacctgcccatctgctacgagagagagtgcgagctgcccaagatcgacgtgcacctggtgcccgacagaaagaaggaccagtacaaggtgggcgaggtgctgaagttcagctgcaagcccggcttcaccatcgtgggccccaacagcgtgcagtgctaccacttcggcctgagccccgacctgcccatctgcaaggagcaggtgcagagctgcggccccccccccgagctgctgaacggcaacgtgaaggagaagaccaaggaggagtacggccacagcgaggtggtggagtactactgcaaccccagattcctgatgaagggccccaacaagatccagtgcgtggacggcgagtggaccaccctgcccgtgtgcatcgtggaggagagcacctgcggcgacatccccgagctggagcacggctgggcccagctgagcagccccccctactactacggcgacagcgtggagttcaactgcagcgagagcttcaccatgatcggccacagaagcatcacctgcatccacggcgtgtggacccagctgccccagtgcgtggccatcgacaagctgaagaagtgcaagagcagcaacctgatcatcctggaggagcacctgaagaacaagaaggagttcgaccacaacagcaacatcagatacagatgcagaggcaaggagggctggatccacaccgtgtgcatcaacggcagatgggaccccgaggtgaactgcagcatggcccagatccagctgtgccccccccccccccagatccccaacagccacaacatgaccaccaccctgaactacagagacggcgagaaggtgagcgtgctgtgccaggagaactacctgatccaggagggcgaggagatcacctgcaaggacggcagatggcagagcatccccctgtgcgtggagaagatcccctgcagccagcccccccagatcgagcacggcaccatcaacagcagcagaagcagccaggagagctacgcccacggcaccaagctgagctacacctgcgagggcggcttcagaatcagcgaggagaacgagaccacctgctacatgggcaagtggagcagccccccccagtgcgagggcctgccctgcaagagcccccccgagatcagccacggcgtggtggcccacatgagcgacagctaccagtacggcgaggaggtgacctacaagtgcttcgagggcttcggcatcgacggccccgccatcgccaagtgcctgggcgagaagtggagccacccccccagctgcatcaagaccgactgcctgagcctgcccagcttcgagaacgccatccccatgggcgagaagaaggacgtgtacaaggccggcgagcaggtgacctacacctgcgccacctactacaagatggacggcgccagcaacgtgacctgcatcaacagcagatggaccggcagacccacctgcagagacaccagctgcgtgaacccccccaccgtgcagaacgcctacatcgtgagcagacagatgagcaagtaccccagcggcgagagagtgagataccagtgcagaagcccctacgagatgttcggcgacgaggaggtgatgtgcctgaacggcaactggaccgagcccccccagtgcaaggacagcaccggcaagtgcggcccccccccccccatcgacaacggcgacatcaccagcttccccctgagcgtgtacgcccccgccagcagcgtggagtaccagtgccagaacctgtaccagctggagggcaacaagagaatcacctgcagaaacggccagtggagcgagccccccaagtgcctgcacccctgcgtgatcagcagagagatcatggagaactacaacatcgccctgagatggaccgccaagcagaagctgtacagcagaaccggcgagagcgtggagttcgtgtgcaagagaggctacagactgagcagcagaagccacaccctgagaaccacctgctgggacggcaagctggagtaccccacctgcgccaagagatga

SEQ ID NO: 7841 - RNA, 3696 nt, synthetic construct
  misc_feature 1..3696: note = derived and/or modified sequence opt5 fromCFAH__Homo_sapiens__CCDS1385.1
  source 1..3696: mol_type = other RNA
atgagactgctcgccaagatcatttgcctgatgctttgggctatctgtgtggccgaggactgcaacgaactgccccctcggcgcaataccgagattctcacaggcagctggtccgatcagacgtacccggaagggacccaagcgatctataaatgtagacccggataccggtctctgggcaacgtcattatggtttgccgcaagggggagtgggtggctcttaatcctctgagaaaatgtcagaagcggccctgcggacaccctggcgacacacccttcgggacctttacactcaccggaggcaacgtgttcgaatatggcgtcaaagccgtgtacacatgtaatgaggggtatcagctgctgggagagatcaactaccgcgaatgcgataccgacggctggacgaatgatatccctatttgtgaggttgtgaagtgcctcccggtcaccgcccccgaaaacgggaagatcgtgagctccgctatggagcctgacagagagtatcattttggacaggccgttcggttcgtgtgtaattctggctacaaaattgaaggggatgaggaaatgcactgcagcgacgatggattttggtccaaggagaaacccaagtgcgtcgaaatctcttgtaaaagccctgacgtgattaacggctcccccatcagccaaaagattatctacaaggagaatgagcgcttccagtataaatgcaacatgggctacgaatattctgagagaggggatgctgtgtgtacagaatccggatggcggccgctgcctagctgcgaggaaaagtcttgtgacaatccctacatccctaacggcgattatagcccccttcgcattaaacatagaaccggggacgagatcacataccagtgccggaatggattttatcccgccacccgcggcaacacggcgaagtgtacatccaccgggtggattcctgccccgagatgcacactgaaaccctgtgactaccctgatatcaagcacggaggcctctaccatgagaacatgcggagaccctatttccctgtcgctgttggcaaatactattcttactattgcgacgaacactttgagaccccctccgggagctactgggatcacattcattgtacccaggacggatggtccccggccgtgccttgcctgcgcaagtgctatttcccctaccttgaaaatggctacaaccaaaatcacgggcggaagtttgtgcagggaaaatctatcgatgtcgcttgtcatcctggctatgccctgcccaaggcgcagacaacggtgacctgcatggagaacgggtggagccctacacccagatgtatccgcgttaaaacctgctccaagagctctattgacatcgaaaatggcttcatttccgagagccagtacacatatgccctcaaagagaaggctaagtaccaatgtaaactgggatatgtgaccgccgatggcgaaacgtctgggagcatcacatgcggaaaggacggctggtccgctcagccgacctgtattaaatcttgcgatatccctgtctttatgaacgcccggaccaagaatgacttcacatggttcaaactgaacgataccctcgactacgagtgtcacgacgggtatgaaagcaatacaggatccacgaccggcagcatcgtgtgcgggtacaacggctggtctgatctgcccatttgttacgagagagagtgcgaacttcccaagatcgacgttcacctggtgcctgatcgcaagaaagaccagtataaggtcggagaggtgctcaaattttcctgcaagccgggcttcacaattgtcgggcccaatagcgtgcaatgttaccattttggactgtctcctgatcttcccatctgcaaagaacaggttcagtcctgtggccctccccctgagctgctcaacgggaatgtgaaggaaaagaccaaagaggagtatggacacagcgaagtcgtggagtactattgcaacccccggttcctgatgaagggcccgaataaaattcagtgtgttgacggggaatggacaaccctgcctgtgtgcatcgtcgaggaatccacgtgtggcgatattcccgagctcgagcatggatgggcccaactgtctagccctccctactattacggcgactccgtggaatttaactgctctgagagcttcaccatgatcgggcacagatccatcacatgtattcatggagtgtggacccagcttccgcagtgcgttgctatcgataagctgaaaaagtgtaaaagctctaacctcattatcctggaggagcaccttaagaataagaaagaatttgaccacaactccaatattcgctaccggtgcagaggcaaggaggggtggatccatacagtctgcatcaacggacgctgggatcctgaggtgaattgtagcatggcgcagattcaactgtgtccccctcctccccagatccccaactctcacaatatgaccacgacactcaactatcgggacggcgaaaaagtgtccgtcctgtgccaggagaattacctgattcaggaaggggaggagattacctgcaaggatggcagatggcaaagcatcccgctctgtgtggagaaaatcccctgctctcagcctccccagatcgaacatggaacaattaacagctcccggagctctcaggaatcctatgcccacggcaccaagctgagctacacctgtgaagggggattccgcatctccgaagagaatgagacaacgtgctatatgggcaagtggtctagccctccccaatgtgaagggcttccttgcaaatccccgcccgagatttctcacggagttgtggctcatatgagcgactcctaccagtatggcgaagaggtcacctacaagtgttttgaaggcttcgggatcgacggacctgccattgccaaatgcctgggcgagaagtggtctcatccccctagctgcatcaaaacagattgtctctccctgcccagctttgagaacgctatcccgatgggggaaaagaaggacgtgtacaaagccggagagcaggttacctatacatgcgcgacctactataagatggatggcgcttctaatgtgacgtgtattaactccagatggacagggcggcctacctgcagagacaccagctgtgtcaatcctcccacagtgcaaaacgcctacatcgtttctcgccagatgtccaaatatcccagcggagaacgggtgagataccagtgccgctctccctatgagatgttcggcgatgaagaggtcatgtgtctgaacggcaattggaccgagcctccgcagtgcaaggactccacagggaaatgtggaccccctccccctattgataacggcgacatcacgagctttcccctttccgtgtacgccccggctagctctgtggaataccaatgccagaatctctatcagctggaggggaacaagagaattacctgtcggaatggacagtggagcgaacctcccaagtgcctgcacccttgcgtcatctcccgcgagattatggagaactacaatatcgccctcagatggacagctaaacaaaagctgtattctcggaccggcgaaagcgttgagttcgtgtgtaaacgcgggtacagactttcctctcggagccacacactgcgcaccacgtgctgggatggaaagctcgaatatcccacctgtgccaaaagatga

SEQ ID NO: 7842 - protein, 583 aa, synthetic construct
  REGION 1..583: note = CFAI__Homo_sapiens__P05156
MKLLHVFLLFLCFHLRFCKVTYTSQEDLVEKKCLAKKYTHLSCDKVFCQPWQRCIEGTCVCKLPYQCPKNGTAVCATNRRSFPTYCQQKSLECLHPGTKFLNNGTCTAEGKFSVSLKHGNTDSEGIVEVKLVDQDKTMFICKSSWSMREANVACLDLGFQQGADTQRRFKLSDLSINSTECLHVHCRGLETSLAECTFTKRRTMGYQDFADVVCYTQKADSPMDDFFQCVNGKYISQMKACDGINDCGDQSDELCCKACQGKGFHCKSGVCIPSQYQCNGEVDCITGEDEVGCAGFASVTQEETEILTADMDAERRRIKSLLPKLSCGVKNRMHIRRKRIVGGKRAQLGDLPWQVAIKDASGITCGGIYIGGCWILTAAHCLRASKTHRYQIWTTVVDWIHPDLKRIVIEYVDRIIFHENYNAGTYQNDIALIEMKKDGNKKDCELPRSIPACVPWSPYLFQPNDTCIVSGWGREKDNERVFSLQWGEVKLISNCSKFYGNRFYEKEMECAGTYDGSIDACKGDSGGPLVCMDANNVTYVWGVVSWGENCGKPEFPGVYTKVANYFDWISYHVGRPFISQYNV

SEQ ID NO: 7843 - RNA, 1752 nt, synthetic construct
  misc_feature 1..1752: note = CFAI__Homo_sapiens__CCDS34049.1
  source 1..1752: mol_type = other RNA
atgaagcttcttcatgttttcctgttatttctgtgcttccacttaaggttttgcaaggtcacttatacatctcaagaggatctggtggagaaaaagtgcttagcaaaaaaatatactcacctctcctgcgataaagtcttctgccagccatggcagagatgcattgagggcacctgtgtttgtaaactaccgtatcagtgcccaaagaatggcactgcagtgtgtgcaactaacaggagaagcttcccaacatactgtcaacaaaagagtttggaatgtcttcatccagggacaaagtttttaaataacggaacatgcacagccgaaggaaagtttagtgtttccttgaagcatggaaatacagattcagagggaatagttgaagtaaaacttgtggaccaagataagacaatgttcatatgcaaaagcagctggagcatgagggaagccaacgtggcctgccttgaccttgggtttcaacaaggtgctgatactcaaagaaggtttaagttgtctgatctctctataaattccactgaatgtctacatgtgcattgccgaggattagagaccagtttggctgaatgtacttttactaagagaagaactatgggttaccaggatttcgctgatgtggtttgttatacacagaaagcagattctccaatggatgacttctttcagtgtgtgaatgggaaatacatttctcagatgaaagcctgtgatggtatcaatgattgtggagaccaaagtgatgaactgtgttgtaaagcatgccaaggcaaaggcttccattgcaaatcgggtgtttgcattccaagccagtatcaatgcaatggtgaggtggactgcattacaggggaagatgaagttggctgtgcaggctttgcatctgtgactcaagaagaaacagaaattttgactgctgacatggatgcagaaagaagacggataaaatcattattacctaaactatcttgtggagttaaaaacagaatgcacattcgaaggaaacgaattgtgggaggaaagcgagcacaactgggagacctcccatggcaggtggcaattaaggatgccagtggaatcacctgtgggggaatttatattggtggctgttggattctgactgctgcacattgtctcagagccagtaaaactcatcgttaccaaatatggacaacagtagtagactggatacaccccgaccttaaacgtatagtaattgaatacgtggatagaattattttccatgaaaactacaatgcaggcacttaccaaaatgacatcgctttgattgaaatgaaaaaagacggaaacaaaaaagattgtgagctgcctcgttccatccctgcctgtgtcccctggtctccttacctattccaacctaatgatacatgcatcgtttctggctggggacgagaaaaagataacgaaagagtcttttcacttcagtggggtgaagttaaactaataagcaactgctctaagttttacggaaatcgtttctatgaaaaagaaatggaatgtgcaggtacatatgatggttccatcgatgcctgtaaaggggactctggaggccccttagtctgtatggatgccaacaatgtgacttatgtctggggtgttgtgagttggggggaaaactgtggaaaaccagagttcccaggtgtttacaccaaagtggccaattattttgactggattagctaccatgtaggaaggccttttatttctcagtacaatgtataa

SEQ ID NO: 7844 - RNA, 1752 nt, synthetic construct
  misc_feature 1..1752: note = derived and/or modified sequence opt1 fromCFAI__Homo_sapiens__CCDS34049.1
  source 1..1752: mol_type = other RNA
atgaagctgctccacgtgttcctgctgttcctctgcttccacctccgcttctgcaaggtcacctacaccagccaggaggacctggtggagaagaagtgcctggccaagaagtacacgcacctgtcctgcgacaaggtgttctgccagccctggcagcggtgcatcgaggggacctgcgtctgcaagctgccgtaccagtgccccaagaacgggaccgccgtgtgcgcgaccaaccgccggagcttccccacgtactgccagcagaagtccctcgagtgcctgcaccccggcaccaagttcctgaacaacgggacctgcaccgccgagggcaagttcagcgtgtccctcaagcacgggaacacggacagcgagggcatcgtcgaggtgaagctggtggaccaggacaagaccatgttcatctgcaagtccagctggtccatgcgcgaggccaacgtcgcctgcctggacctcggcttccagcagggggccgacacccagcggcgcttcaagctgagcgacctgtccatcaacagcaccgagtgcctccacgtgcactgccggggcctggagacgtccctggcggagtgcaccttcaccaagcgccggaccatggggtaccaggacttcgccgacgtggtctgctacacgcagaaggccgacagcccgatggacgacttcttccagtgcgtgaacggcaagtacatctcccagatgaaggcctgcgacgggatcaacgactgcggcgaccagagcgacgagctctgctgcaaggcgtgccagggcaaggggttccactgcaagtccggcgtgtgcatccccagccagtaccagtgcaacggggaggtcgactgcatcaccggcgaggacgaggtgggctgcgccgggttcgcctccgtgacccaggaggagaccgagatcctgacggccgacatggacgccgagcgccggcgcatcaagagcctgctccccaagctgagctgcggcgtcaagaaccggatgcacatccgccggaagcgcatcgtcgggggcaagcgggcgcagctgggggacctcccctggcaggtcgccatcaaggacgcctccggcatcacgtgcggcgggatctacatcggcgggtgctggatcctgaccgccgcccactgcctgcgcgcgagcaagacccaccggtaccagatctggaccaccgtggtggactggatccacccggacctcaagcgcatcgtgatcgagtacgtggaccggatcatcttccacgagaactacaacgccggcacctaccagaacgacatcgccctgatcgagatgaagaaggacgggaacaagaaggactgcgagctgccccgctccatccccgcctgcgtgccctggagcccgtacctcttccagcccaacgacacgtgcatcgtctccggctggggccgcgagaaggacaacgagcgggtgttcagcctgcagtggggcgaggtgaagctgatctccaactgcagcaagttctacggcaaccgcttctacgagaaggagatggagtgcgccgggacctacgacggctccatcgacgcgtgcaagggggacagcggcggccccctcgtctgcatggacgccaacaacgtgacctacgtgtggggcgtcgtgtcctggggcgagaactgcgggaagcccgagttcccgggggtgtacaccaaggtcgccaactacttcgactggatcagctaccacgtgggccggcccttcatctcccagtacaacgtgtga

SEQ ID NO: 7845 - RNA, 1752 nt, synthetic construct
  misc_feature 1..1752: note = derived and/or modified sequence opt2 fromCFAI__Homo_sapiens__CCDS34049.1
  source 1..1752: mol_type = other RNA
atgaagctcctccacgtcttcctcctcttcctctgcttccacctccgcttctgcaaggtcacctacacctcccaggaggacctcgtcgagaagaagtgcctcgccaagaagtacacccacctctcctgcgacaaggtcttctgccagccctggcagcgctgcatcgagggcacctgcgtctgcaagctcccctaccagtgccccaagaacggcaccgccgtctgcgccaccaaccgccgctccttccccacctactgccagcagaagtccctcgagtgcctccaccccggcaccaagttcctcaacaacggcacctgcaccgccgagggcaagttctccgtctccctcaagcacggcaacaccgactccgagggcatcgtcgaggtcaagctcgtcgaccaggacaagaccatgttcatctgcaagtcctcctggtccatgcgcgaggccaacgtcgcctgcctcgacctcggcttccagcagggcgccgacacccagcgccgcttcaagctctccgacctctccatcaactccaccgagtgcctccacgtccactgccgcggcctcgagacctccctcgccgagtgcaccttcaccaagcgccgcaccatgggctaccaggacttcgccgacgtcgtctgctacacccagaaggccgactcccccatggacgacttcttccagtgcgtcaacggcaagtacatctcccagatgaaggcctgcgacggcatcaacgactgcggcgaccagtccgacgagctctgctgcaaggcctgccagggcaagggcttccactgcaagtccggcgtctgcatcccctcccagtaccagtgcaacggcgaggtcgactgcatcaccggcgaggacgaggtcggctgcgccggcttcgcctccgtcacccaggaggagaccgagatcctcaccgccgacatggacgccgagcgccgccgcatcaagtccctcctccccaagctctcctgcggcgtcaagaaccgcatgcacatccgccgcaagcgcatcgtcggcggcaagcgcgcccagctcggcgacctcccctggcaggtcgccatcaaggacgcctccggcatcacctgcggcggcatctacatcggcggctgctggatcctcaccgccgcccactgcctccgcgcctccaagacccaccgctaccagatctggaccaccgtcgtcgactggatccaccccgacctcaagcgcatcgtcatcgagtacgtcgaccgcatcatcttccacgagaactacaacgccggcacctaccagaacgacatcgccctcatcgagatgaagaaggacggcaacaagaaggactgcgagctcccccgctccatccccgcctgcgtcccctggtccccctacctcttccagcccaacgacacctgcatcgtctccggctggggccgcgagaaggacaacgagcgcgtcttctccctccagtggggcgaggtcaagctcatctccaactgctccaagttctacggcaaccgcttctacgagaaggagatggagtgcgccggcacctacgacggctccatcgacgcctgcaagggcgactccggcggccccctcgtctgcatggacgccaacaacgtcacctacgtctggggcgtcgtctcctggggcgagaactgcggcaagcccgagttccccggcgtctacaccaaggtcgccaactacttcgactggatctcctaccacgtcggccgccccttcatctcccagtacaacgtctga

SEQ ID NO: 7846 - RNA, 1752 nt, synthetic construct
  misc_feature 1..1752: note = derived and/or modified sequence opt3 fromCFAI__Homo_sapiens__CCDS34049.1
  source 1..1752: mol_type = other RNA
atgaagctgctccacgtgttccttctgtttttgtgcttccatttaagattttgtaaagtcacctacacaagccaggaggacctggttgaaaagaaatgcctagccaagaaatatactcacctctcctgtgataaggtgttctgccaaccctggcagaggtgtatcgagggcacgtgcgtatgtaagctgccttaccagtgcccgaaaaacgggaccgctgtgtgtgcaacaaatcggcgctcttttccaacttattgccagcaaaagtcacttgaatgtctgcatcccggaaccaaattcttgaacaatggtacatgcaccgccgagggcaagtttagtgtcagcctcaaacacgggaacactgactccgaaggaattgtggaggttaagctggtggatcaggacaagacaatgttcatatgcaaatcttcgtggtcaatgcgagaggcgaatgtcgcttgtctggatctcggctttcagcagggtgccgacacccaacgtagattcaagttaagcgatctgagtatcaactccacggaatgccttcatgtgcactgtagggggttggagacttctctggcagaatgcacctttacaaaacggcgcactatgggataccaggacttcgccgatgtagtttgttatacccagaaggctgacagccctatggatgactttttccagtgcgtgaatggcaaatacatttcccaaatgaaggcatgtgatggcatcaacgactgcggggaccagtcagatgagctatgttgcaaagcctgtcagggaaagggtttccactgcaagagtggcgtctgcattccaagccaatatcagtgtaatggggaggtggactgcatcacaggagaagatgaggtgggctgtgctggttttgcctctgtcacccaggaagagacggaaatactcactgcggacatggatgcagagagaaggcggatcaaatccctgcttcccaagctgtcatgcggggttaaaaaccgcatgcatattcgaagaaagaggatcgtgggaggcaaacgggcccagttgggcgacctcccttggcaagtagctattaaggatgccagcgggatcacatgtggaggtatatacattggcgggtgctggatcctgaccgcagctcactgtttacgtgccagtaagactcatcgctaccagatttggacaaccgtggtcgactggatccacccagatctgaaaagaatcgtgattgagtatgttgacaggataatcttccacgaaaattacaacgcgggaacgtatcagaatgatattgccctcatcgagatgaagaaagacggcaacaagaaagactgcgaacttccccggtctatacctgcatgtgtgccatggtccccgtacctgtttcagcccaatgatacctgcattgtcagcggttgggggcgagagaaggacaacgaacgcgtgttctcgttgcaatggggcgaggtaaagctaatctctaactgttccaaattttatggaaatagattctacgagaaggaaatggagtgcgctggcacatatgatgggtcaatcgacgcctgcaaaggagatagtggtggccctctggtttgtatggacgctaacaatgtgacttacgtctggggagtggtcagctggggcgaaaactgcgggaagccagagtttcccggtgtgtacaccaaagttgccaattatttcgattggatttcctaccatgtggggaggccttttatctctcagtataacgtatga

SEQ ID NO: 7847 - RNA, 1752 nt, synthetic construct
  misc_feature 1..1752: note = derived and/or modified sequence opt4 fromCFAI__Homo_sapiens__CCDS34049.1
  source 1..1752: mol_type = other RNA
atgaagctgctgcacgtgttcctgctgttcctgtgcttccacctgagattctgcaaggtgacctacaccagccaggaggacctggtggagaagaagtgcctggccaagaagtacacccacctgagctgcgacaaggtgttctgccagccctggcagagatgcatcgagggcacctgcgtgtgcaagctgccctaccagtgccccaagaacggcaccgccgtgtgcgccaccaacagaagaagcttccccacctactgccagcagaagagcctggagtgcctgcaccccggcaccaagttcctgaacaacggcacctgcaccgccgagggcaagttcagcgtgagcctgaagcacggcaacaccgacagcgagggcatcgtggaggtgaagctggtggaccaggacaagaccatgttcatctgcaagagcagctggagcatgagagaggccaacgtggcctgcctggacctgggcttccagcagggcgccgacacccagagaagattcaagctgagcgacctgagcatcaacagcaccgagtgcctgcacgtgcactgcagaggcctggagaccagcctggccgagtgcaccttcaccaagagaagaaccatgggctaccaggacttcgccgacgtggtgtgctacacccagaaggccgacagccccatggacgacttcttccagtgcgtgaacggcaagtacatcagccagatgaaggcctgcgacggcatcaacgactgcggcgaccagagcgacgagctgtgctgcaaggcctgccagggcaagggcttccactgcaagagcggcgtgtgcatccccagccagtaccagtgcaacggcgaggtggactgcatcaccggcgaggacgaggtgggctgcgccggcttcgccagcgtgacccaggaggagaccgagatcctgaccgccgacatggacgccgagagaagaagaatcaagagcctgctgcccaagctgagctgcggcgtgaagaacagaatgcacatcagaagaaagagaatcgtgggcggcaagagagcccagctgggcgacctgccctggcaggtggccatcaaggacgccagcggcatcacctgcggcggcatctacatcggcggctgctggatcctgaccgccgcccactgcctgagagccagcaagacccacagataccagatctggaccaccgtggtggactggatccaccccgacctgaagagaatcgtgatcgagtacgtggacagaatcatcttccacgagaactacaacgccggcacctaccagaacgacatcgccctgatcgagatgaagaaggacggcaacaagaaggactgcgagctgcccagaagcatccccgcctgcgtgccctggagcccctacctgttccagcccaacgacacctgcatcgtgagcggctggggcagagagaaggacaacgagagagtgttcagcctgcagtggggcgaggtgaagctgatcagcaactgcagcaagttctacggcaacagattctacgagaaggagatggagtgcgccggcacctacgacggcagcatcgacgcctgcaagggcgacagcggcggccccctggtgtgcatggacgccaacaacgtgacctacgtgtggggcgtggtgagctggggcgagaactgcggcaagcccgagttccccggcgtgtacaccaaggtggccaactacttcgactggatcagctaccacgtgggcagacccttcatcagccagtacaacgtgtga

SEQ ID NO: 7848 - RNA, 1752 nt, synthetic construct
  misc_feature 1..1752: note = derived and/or modified sequence opt5 fromCFAI__Homo_sapiens__CCDS34049.1
  source 1..1752: mol_type = other RNA
atgaagctgctccacgtgttcctgctttttctgtgcttccatctcagattttgtaaagtcacctacacaagccaggaggacctggttgaaaagaaatgccttgccaagaaatatacgcacctgtcctgtgataaggtgttctgccaaccctggcagcggtgtatcgaggggacctgcgtgtgtaagctcccttaccagtgcccgaaaaacgggacagctgtctgtgccaccaatcgcagatcttttcccacatattgccagcaaaagagcctggaatgtctgcatcctggaaccaaattcctcaacaatggcacatgcaccgcggaggggaagttttccgtgtctctgaaacacggaaacacggacagcgaaggcattgttgaggtgaaacttgtcgatcaggacaagaccatgttcatctgcaagtcctcttggagcatgcgggaggctaatgtggcctgtctggatctcgggtttcagcagggagccgacacacaacgcagattcaagctgtccgatcttagcattaactctaccgaatgcctgcatgttcactgtcggggcctcgagacatccctggctgaatgcacctttacgaaacgcagaacaatgggctaccaggacttcgccgatgtggtctgttatacccagaaggctgacagccccatggatgactttttccagtgcgtgaatgggaaatacatctctcaaatgaaggcctgtgatggaattaacgactgcggcgaccagtccgatgagctgtgttgcaaagcgtgtcaggggaagggattccactgcaagagcggcgtgtgcatcccttctcaatatcagtgtaatggggaggtcgactgcatcacaggagaagatgaggttggctgtgccggctttgcttccgtgacccaggaagagaccgaaattctcacagccgacatggatgctgagcggcgcagaatcaaaagcctgcttcccaagctgtcctgcggggtgaaaaaccggatgcatattcgcagaaagcggatcgtcggaggcaaacgcgcccagctcggggacctgccttggcaagtggcgattaaggatgcctctggaatcacgtgtggcgggatttacatcggaggctgctggatccttaccgctgcccactgtctgagagctagcaagacacatcggtaccagatttggaccacagttgtggactggatccacccggatctcaaaagaattgtcatcgagtatgtggaccgcattatcttccacgaaaattacaacgccggcacctatcagaatgatatcgccctgattgagatgaagaaagacgggaacaagaaagactgcgaactgccccggtccatccctgcttgtgttccctggagcccttacctctttcagcccaatgatacgtgcattgtgtctggatggggcagagagaaggacaacgaacgcgtcttctccctgcaatggggcgaggtgaaacttatcagcaactgttctaagttttatggaaatcggttctacgagaaggaaatggagtgcgcgggcacatatgatgggagcattgacgcctgcaaaggcgattccggaggcccgctggtctgtatggacgctaacaatgtgacctacgtttggggagtggtctcttggggcgaaaactgcgggaagcctgagtttcccggggtgtacaccaaagttgccaattatttcgattggatcagctaccatgtgggaagaccttttatctcccagtataacgtctga

SEQ ID NO: 7849 - protein, 573 aa, synthetic construct; identical to SEQ ID NO: 7657
  REGION 1..573: note = CH60__Homo_sapiens__NP_002147.2

SEQ ID NO: 7850 - RNA, 1722 nt, synthetic construct; identical to SEQ ID NO: 7658
  misc_feature 1..1722: note = CH60__Homo_sapiens__NM_002156.4
  source 1..1722: mol_type = other RNA

SEQ ID NO: 7851 - RNA, 1722 nt, synthetic construct; identical to SEQ ID NO: 7659
  misc_feature 1..1722: note = derived and/or modified sequence opt1 fromCH60__Homo_sapiens__NM_002156.4
  source 1..1722: mol_type = other RNA

SEQ ID NO: 7852 - RNA, 1722 nt, synthetic construct; identical to SEQ ID NO: 7660
  misc_feature 1..1722: note = derived and/or modified sequence opt2 fromCH60__Homo_sapiens__NM_002156.4
  source 1..1722: mol_type = other RNA

SEQ ID NO: 7853 - RNA, 1722 nt, synthetic construct; identical to SEQ ID NO: 7661
  misc_feature 1..1722: note = derived and/or modified sequence opt3 fromCH60__Homo_sapiens__NM_002156.4
  source 1..1722: mol_type = other RNA

SEQ ID NO: 7854 - RNA, 1722 nt, synthetic construct; identical to SEQ ID NO: 7662
  misc_feature 1..1722: note = derived and/or modified sequence opt4 fromCH60__Homo_sapiens__NM_002156.4
  source 1..1722: mol_type = other RNA

SEQ ID NO: 7855 - RNA, 1722 nt, synthetic construct; identical to SEQ ID NO: 7663
  misc_feature 1..1722: note = derived and/or modified sequence opt5 fromCH60__Homo_sapiens__NM_002156.4
  source 1..1722: mol_type = other RNA

SEQ ID NO: 7856 - protein, 353 aa, synthetic construct
  REGION 1..353: note = CIITA__Homo_sapiens__Q29704
MRCLAPRPAGSYLSEPQGSSQCATMELGPLEGGYLELLNSDADPLCLYHFYDQMDLAGEEEIELYSEPDTDTINCDQFSRLLCDMEGDEETREAYANIAELDQYVFQDSQLEGLSKDIFKHIGPDEVIGESMEMPAEVGQKSQKRPFPEELPADLKHWKPAEPPTVVTGSLLVGPVSDCSTLPCLPLPALFNQEPASGQMRLEKTDQIPMPFSSSSLSCLNLPEGPIQFVPTISTLPHGLWQISEAGTGVSSIFIYHGEVPQASQVPPPSGFTVHGLPTSPDRPGSTSPFAPSATDLPSMPEPALTSRANMTEHKTSPTQCPAAGEVSNKLPKWPGREVPRKTQLGSSLLFGT

SEQ ID NO: 7857 - RNA, 1062 nt, synthetic construct
  misc_feature 1..1062: note = CIITA__Homo_sapiens__AAA92364
  source 1..1062: mol_type = other RNA
atgcgttgcctggctccacgccctgctgggtcctacctgtcagagccccaaggcagctcacagtgtgccaccatggagttggggcccctagaaggtggctacctggagcttcttaacagcgatgctgaccccctgtgcctctaccacttctatgaccagatggacctggctggagaagaagagattgagctctactcagaacccgacacagacaccatcaactgcgaccagttcagcaggctgttgtgtgacatggaaggtgatgaagagaccagggaggcttatgccaatatcgcggaactggaccagtatgtcttccaggactcccagctggagggcctgagcaaggacattttcaagcacataggaccagatgaagtgatcggtgagagtatggagatgccagcagaagttgggcagaaaagtcagaaaagacccttcccagaggagcttccggcagacctgaagcactggaagccagctgagccccccactgtggtgactggcagtctcctagtgggaccagtgagcgactgctccaccctgccctgcctgccactgcctgcgctgttcaaccaggagccagcctccggccagatgcgcctggagaaaaccgaccagattcccatgcctttctccagttcctcgttgagctgcctgaatctccctgagggacccatccagtttgtccccaccatctccactctgccccatgggctctggcaaatctctgaggctggaacaggggtctccagtatattcatctaccatggtgaggtgccccaggccagccaagtaccccctcccagtggattcactgtccacggcctcccaacatctccagaccggccaggctccaccagccccttcgctccatcagccactgacctgcccagcatgcctgaacctgccctgacctcccgagcaaacatgacagagcacaagacgtcccccacccaatgcccggcagctggagaggtctccaacaagcttccaaaatggcctggacgagaagttcctcggaagacacagctggggagctccctgctgttcgggacctaa

SEQ ID NO: 7858 - RNA, 1062 nt, synthetic construct
  misc_feature 1..1062: note = derived and/or modified sequence opt1 fromCIITA__Homo_sapiens__AAA92364
  source 1..1062: mol_type = other RNA
atgcgctgcctggcgccccggccggccggcagctacctctccgagccccaggggagctcccagtgcgccaccatggagctgggccccctggagggcgggtacctcgagctgctgaacagcgacgccgaccccctctgcctgtaccacttctacgaccagatggacctggccggggaggaggagatcgagctctactccgagccggacaccgacacgatcaactgcgaccagttcagccgcctgctgtgcgacatggagggcgacgaggagacccgggaggcctacgccaacatcgcggagctcgaccagtacgtgttccaggactcccagctggagggcctgagcaaggacatcttcaagcacatcgggcccgacgaggtcatcggcgagtccatggagatgcccgccgaggtggggcagaagtcccagaagcgccccttcccggaggagctccccgccgacctgaagcactggaagcccgccgagcccccgaccgtggtcaccggcagcctgctcgtggggcccgtgagcgactgctccacgctgccctgcctgcccctcccggcgctgttcaaccaggagcccgccagcggccagatgcggctggagaagaccgaccagatccccatgcccttctccagctccagcctctcctgcctgaacctgccggagggccccatccagttcgtccccaccatcagcaccctcccccacgggctgtggcagatcagcgaggccggcacgggggtgtccagcatcttcatctaccacggcgaggtgccgcaggcctcccaggtcccgccgcccagcggcttcaccgtgcacgggctgcccacctcccccgaccgccccggcagcacctcccccttcgcccccagcgcgacggacctcccctccatgcccgagccggccctgaccagccgggccaacatgaccgagcacaagacctcccccacgcagtgccccgccgccggggaggtgagcaacaagctgcccaagtggccgggccgcgaggtcccccggaagacccagctcgggtccagcctgctgttcggcacctga

SEQ ID NO: 7859 - RNA, 1062 nt, synthetic construct
  misc_feature 1..1062: note = derived and/or modified sequence opt2 fromCIITA__Homo_sapiens__AAA92364
  source 1..1062: mol_type = other RNA
atgcgctgcctcgccccccgccccgccggctcctacctctccgagccccagggctcctcccagtgcgccaccatggagctcggccccctcgagggcggctacctcgagctcctcaactccgacgccgaccccctctgcctctaccacttctacgaccagatggacctcgccggcgaggaggagatcgagctctactccgagcccgacaccgacaccatcaactgcgaccagttctcccgcctcctctgcgacatggagggcgacgaggagacccgcgaggcctacgccaacatcgccgagctcgaccagtacgtcttccaggactcccagctcgagggcctctccaaggacatcttcaagcacatcggccccgacgaggtcatcggcgagtccatggagatgcccgccgaggtcggccagaagtcccagaagcgccccttccccgaggagctccccgccgacctcaagcactggaagcccgccgagccccccaccgtcgtcaccggctccctcctcgtcggccccgtctccgactgctccaccctcccctgcctccccctccccgccctcttcaaccaggagcccgcctccggccagatgcgcctcgagaagaccgaccagatccccatgcccttctcctcctcctccctctcctgcctcaacctccccgagggccccatccagttcgtccccaccatctccaccctcccccacggcctctggcagatctccgaggccggcaccggcgtctcctccatcttcatctaccacggcgaggtcccccaggcctcccaggtcccccccccctccggcttcaccgtccacggcctccccacctcccccgaccgccccggctccacctcccccttcgccccctccgccaccgacctcccctccatgcccgagcccgccctcacctcccgcgccaacatgaccgagcacaagacctcccccacccagtgccccgccgccggcgaggtctccaacaagctccccaagtggcccggccgcgaggtcccccgcaagacccagctcggctcctccctcctcttcggcacctga

SEQ ID NO: 7860 - RNA, 1062 nt, synthetic construct
  misc_feature 1..1062: note = derived and/or modified sequence opt3 fromCIITA__Homo_sapiens__AAA92364
  source 1..1062: mol_type = other RNA
atgagatgcctggcccccaggcctgctggcagctacctctccgagccacaggggtcttcacaatgtgcaaccatggaacttggaccgctggagggtggctatttggaattactgaacagtgacgccgatcccctatgcctctaccacttctatgaccagatggatctggcgggggaggaagagatcgagctttacagcgaacctgacacagatactattaattgtgaccagttttcccggctgttgtgcgatatggagggagacgaagagacgcgcgaggcttatgccaacatagcagaactcgatcagtacgtgttccaagactctcagctggagggcctgtcgaaggatatctttaaacatattggtccagacgaagtcatcggggagtcaatggaaatgcccgccgaggttggacaaaagagccagaaacgacctttcccagaggaactccccgctgatttaaagcactggaaacctgcagagccaccgaccgtggtaacaggcagtctgcttgtgggccccgtctccgactgttctactttgccttgcctgccactacccgccctctttaatcaggaacctgctagcgggcagatgcgtctggagaagaccgaccagattccaatgcccttctcctcaagtagcctttcttgtctgaacttgccggaaggacctatccagtttgtgcccacaatatccaccctcccacatggtctgtggcaaatctcagaggccggcactggggttagcagtattttcatctatcacggagaggtgcctcaggcgtctcaggtgcccccaccctccggctttacagtccatggtttacctaccagcccagatagaccggggtcgacgtctcccttcgcaccttccgccactgacctgccatcaatgcccgaacctgctctcaccagtagggccaatatgacagagcacaagactagcccaacccaatgccccgcagctggagaagtatccaacaaacttccgaagtggcctggccgggaggttccacgcaaaacacagctgggctctagcttgctatttgggacctga

SEQ ID NO: 7861 - RNA, 1062 nt, synthetic construct
  misc_feature 1..1062: note = derived and/or modified sequence opt4 fromCIITA__Homo_sapiens__AAA92364
  source 1..1062: mol_type = other RNA
atgagatgcctggcccccagacccgccggcagctacctgagcgagccccagggcagcagccagtgcgccaccatggagctgggccccctggagggcggctacctggagctgctgaacagcgacgccgaccccctgtgcctgtaccacttctacgaccagatggacctggccggcgaggaggagatcgagctgtacagcgagcccgacaccgacaccatcaactgcgaccagttcagcagactgctgtgcgacatggagggcgacgaggagaccagagaggcctacgccaacatcgccgagctggaccagtacgtgttccaggacagccagctggagggcctgagcaaggacatcttcaagcacatcggccccgacgaggtgatcggcgagagcatggagatgcccgccgaggtgggccagaagagccagaagagacccttccccgaggagctgcccgccgacctgaagcactggaagcccgccgagccccccaccgtggtgaccggcagcctgctggtgggccccgtgagcgactgcagcaccctgccctgcctgcccctgcccgccctgttcaaccaggagcccgccagcggccagatgagactggagaagaccgaccagatccccatgcccttcagcagcagcagcctgagctgcctgaacctgcccgagggccccatccagttcgtgcccaccatcagcaccctgccccacggcctgtggcagatcagcgaggccggcaccggcgtgagcagcatcttcatctaccacggcgaggtgccccaggccagccaggtgcccccccccagcggcttcaccgtgcacggcctgcccaccagccccgacagacccggcagcaccagccccttcgcccccagcgccaccgacctgcccagcatgcccgagcccgccctgaccagcagagccaacatgaccgagcacaagaccagccccacccagtgccccgccgccggcgaggtgagcaacaagctgcccaagtggcccggcagagaggtgcccagaaagacccagctgggcagcagcctgctgttcggcacctga

SEQ ID NO: 7862 - RNA, 1062 nt, synthetic construct
  misc_feature 1..1062: note = derived and/or modified sequence opt5 fromCIITA__Homo_sapiens__AAA92364
  source 1..1062: mol_type = other RNA
atgagatgcctggctccccggcctgccggcagctacctctccgagccgcaggggtctagccaatgtgccaccatggaactgggaccccttgagggcgggtatctggaactcctgaactccgacgcggatcctctttgcctgtaccacttctatgaccagatggatctcgctggagaggaagagatcgagctgtactctgaacccgacacagatacgattaattgtgaccagtttagccgcctgctctgcgatatggagggcgacgaagagaccagagaggcctatgccaacatcgctgaactggatcagtacgtgttccaagactcccagcttgaggggctgtctaaggatatttttaaacatatcggacctgacgaagtcattggcgagagcatggaaatgcccgccgaggttggccagaagtcccagaaacggcctttcccggaggaactccccgctgatctgaagcactggaaacctgccgagccccctacagtggtgaccgggagccttctggtcggacccgtgtctgactgttccacactcccgtgcctgcctctgcccgcgctctttaatcaagaacctgccagcggccagatgcgcctggagaagaccgaccagatccccatgcccttctcttccagctctctttcctgtctgaacctccctgaagggccgatccagtttgttcccacaattagcaccctgcctcatggactttggcaaatctccgaggctggcacgggggtgtctagcattttcatctatcacggagaggtcccccaggcctcccaggtgcctcccccgagcggctttaccgttcatggcctgcctacatctcccgatagacctgggtccaccagccccttcgctccttctgccacagacctccccagcatgccggaacctgcgctgacctcccgggccaatatgacggagcacaagacatctcccacccaatgccccgctgccggagaagtgagcaacaaactgcctaagtggccgggccgcgaggtccccagaaaaacacagctcgggtccagcctgctttttggaacctga

SEQ ID NO: 7863 - protein, 423 aa, synthetic construct [sequence omitted]

SEQ ID NO: 7864 - RNA, 1272 nt, synthetic construct
  misc_feature 1..1272: note = c-Jun__Homo_sapiens__BAG51230
  source 1..1272: mol_type = other RNA
atgtccgcctcggctgtcttcattctggacgttaagggcaagccattgatcagccgcaactacaagggcgatgtggccatgagcaagattgagcacttcatgcctttgctggtacagcgggaggaggaaggcgccctggccccgctgctgagccacggccaggtccacttcctatggaccaaacacagcaacctctacttggtggccaccacatcgaagaatgccaatgcctccctggtgtactccttcctgtataagacaatagaggtattctgcgaatacttcaaggagctggaggaggagagcatccgggacaactttgtcatcgtctacgagttgctggacgagctcatggactttggcttcccgcagaccaccgacagcaagatcctgcaggagtacatcactcagcagagcaacaagctggagacgggcaagtcacgggtgccacccactgtcaccaacgctgtgtcctggcgctccgagggtatcaagtataagaagaacgaggtcttcattgatgtcatagagtctgtcaacctgctggtcaatgccaacggcagcgtccttctgagcgaaatcgtcggtaccatcaagctcaaggtgtttctgtcgggaatgccagagctgcggctgggcctcaatgaccgcgtgctcttcgagctcactggccgcagcaagaacaaatcagtagagctggaggatgtaaaattccaccagtgcgtgcggctctctcgctttgacaacgaccgcaccatctccttcatcccgcctgatggtgactttgagctcatgtcataccgcctcagcacccaggtcaagccactgatctggattgagtctgtcattgagaagttctcccacagccgcgtggagatcacggtcaaggccaaggggcagtttaagaaacagtcagtggccaacggtgtggagatatctgtgcctgtacccagcgatgccgactcccccagattcaagaccagtgtgggcagcgccaagtatgtgccggagagaaacgtcgtgatttggagtattaagtctttcccggggggcaaggagtacttgatgcgagcccactttggcctccccagtgtggaaaaggaagaggtggagggccggccccccatcggggtcaagtttgagatcccctacttcaccgtctctgggatccaggtccgatacatgaagatcattgagaaaagtggttaccaggccctgccctgggttcgctacatcacccagagtggtgattaccaacttcgtaccagctag

SEQ ID NO: 7865 - RNA, 1272 nt, synthetic construct
  misc_feature 1..1272: note = derived and/or modified sequence opt1 fromc-Jun__Homo_sapiens__BAG51230
  source 1..1272: mol_type = other RNA
atgagcgcctccgccgtgttcatcctggacgtcaagggcaagcccctcatcagccgcaactacaagggggacgtggcgatgtccaagatcgagcacttcatgccgctgctggtgcagcgggaggaggagggcgccctcgcgcccctgctgagccacgggcaggtccacttcctctggaccaagcactccaacctgtacctggtggccaccacgagcaagaacgccaacgcctccctcgtgtacagcttcctgtacaagaccatcgaggtcttctgcgagtacttcaaggagctggaggaggagtccatccgcgacaacttcgtgatcgtgtacgagctcctggacgagctgatggacttcggcttcccccagaccaccgacagcaagatcctccaggagtacatcacgcagcagtccaacaagctggagaccggcaagagccgggtgcccccgaccgtcaccaacgccgtgtcctggcgcagcgaggggatcaagtacaagaagaacgaggtcttcatcgacgtgatcgagtccgtgaacctgctcgtcaacgccaacggcagcgtgctgctgtccgagatcgtggggacgatcaagctcaaggtcttcctgagcggcatgcccgagctgcggctcgggctgaacgaccgcgtgctgttcgagctcaccggccggtccaagaacaagagcgtggagctggaggacgtcaagttccaccagtgcgtgcgcctgagccggttcgacaacgaccgcaccatctccttcatcccgcccgacggggacttcgagctcatgagctaccggctgtccacccaggtgaagcccctgatctggatcgagagcgtcatcgagaagttctcccacagccgcgtggagatcacggtcaaggccaagggccagttcaagaagcagtccgtggcgaacggcgtggagatcagcgtccccgtgccctccgacgccgacagcccccggttcaagacctccgtggggagcgccaagtacgtcccggagcgcaacgtggtgatctggtccatcaagagcttccccggcgggaaggagtacctcatgcgggcccacttcggcctgccctccgtcgagaaggaggaggtggagggccggcccccgatcggggtgaagttcgagatcccctacttcaccgtcagcggcatccaggtgcgctacatgaagatcatcgagaagtccgggtaccaggccctgccctgggtgcgctacatcacccagagcggcgactaccagctccggacgtcctga

SEQ ID NO: 7866 - RNA, 1272 nt, synthetic construct
  misc_feature 1..1272: note = derived and/or modified sequence opt2 fromc-Jun__Homo_sapiens__BAG51230
  source 1..1272: mol_type = other RNA
atgtccgcctccgccgtcttcatcctcgacgtcaagggcaagcccctcatctcccgcaactacaagggcgacgtcgccatgtccaagatcgagcacttcatgcccctcctcgtccagcgcgaggaggagggcgccctcgcccccctcctctcccacggccaggtccacttcctctggaccaagcactccaacctctacctcgtcgccaccacctccaagaacgccaacgcctccctcgtctactccttcctctacaagaccatcgaggtcttctgcgagtacttcaaggagctcgaggaggagtccatccgcgacaacttcgtcatcgtctacgagctcctcgacgagctcatggacttcggcttcccccagaccaccgactccaagatcctccaggagtacatcacccagcagtccaacaagctcgagaccggcaagtcccgcgtcccccccaccgtcaccaacgccgtctcctggcgctccgagggcatcaagtacaagaagaacgaggtcttcatcgacgtcatcgagtccgtcaacctcctcgtcaacgccaacggctccgtcctcctctccgagatcgtcggcaccatcaagctcaaggtcttcctctccggcatgcccgagctccgcctcggcctcaacgaccgcgtcctcttcgagctcaccggccgctccaagaacaagtccgtcgagctcgaggacgtcaagttccaccagtgcgtccgcctctcccgcttcgacaacgaccgcaccatctccttcatcccccccgacggcgacttcgagctcatgtcctaccgcctctccacccaggtcaagcccctcatctggatcgagtccgtcatcgagaagttctcccactcccgcgtcgagatcaccgtcaaggccaagggccagttcaagaagcagtccgtcgccaacggcgtcgagatctccgtccccgtcccctccgacgccgactccccccgcttcaagacctccgtcggctccgccaagtacgtccccgagcgcaacgtcgtcatctggtccatcaagtccttccccggcggcaaggagtacctcatgcgcgcccacttcggcctcccctccgtcgagaaggaggaggtcgagggccgcccccccatcggcgtcaagttcgagatcccctacttcaccgtctccggcatccaggtccgctacatgaagatcatcgagaagtccggctaccaggccctcccctgggtccgctacatcacccagtccggcgactaccagctccgcacctcctga

SEQ ID NO: 7867 - RNA, 1272 nt, synthetic construct
  misc_feature 1..1272: note = derived and/or modified sequence opt3 fromc-Jun__Homo_sapiens__BAG51230
  source 1..1272: mol_type = other RNA
atgagcgcctccgctgtgttcatcctggacgtcaagggcaaacccctcatttctagaaactacaagggggatgttgcaatgtcaaaaatagagcactttatgcctcttctggtgcagagggaagaggaaggagccttggcgccattactgagtcatggtcaagtacacttcctatggaccaagcatagcaatctctatctggtggctacaacttccaaaaacgccaatgcatctcttgtctactcgtttctgtataagacgatcgaggtgttctgcgaatactttaaggagttggaggaagagtcaattcgggacaacttcgttatcgtgtatgaactcctggatgagctgatggactttggcttcccgcagaccacagatagcaaaattctccaggagtacatcactcagcaaagtaataagttagaaaccgggaaatcccgcgtgccccctacagtgaccaacgccgtatcttggcgaagcgagggaataaagtataaaaagaatgaagtttttatcgacgtgattgagtccgtcaacctgcttgtgaatgctaacggctcagtgttgctgagtgaaatcgtcggtactattaagctaaaagttttcctcagcgggatgccagagctgcgtcttggactgaatgatagagtgttgtttgagctcacaggcaggtctaagaacaaatccgtagaactggaggacgtgaagttccaccagtgtgtccggttatcacgctttgataatgacagaaccatcagcttcataccccctgatggcgacttcgaactgatgagttacaggctctctacgcaggtcaaaccacttatttggatcgagtccgttattgaaaagtttagccattcgcgggtggagatcactgtcaaagcaaaggggcagttcaagaaacaatctgtggccaacggagtagagatctccgttcccgtgccttcagatgctgacagtccacgctttaagaccagcgtcggttccgccaaatacgtgccggaacgaaatgtcgtgatttggtctataaagagcttccccggcgggaaagagtatctgatgagagcgcactttggattgccttcagttgaaaaggaggaagtggagggcaggccacccatcggtgtaaagttcgagattccttactttacagtcagtgggatccaggtgcggtatatgaaaataattgaaaagtccggataccaggcactaccatgggttcgttatatcactcagagcggcgactaccaactgcgcacctcttga

SEQ ID NO: 7868 - RNA, 1272 nt, synthetic construct
  misc_feature 1..1272: note = derived and/or modified sequence opt4 fromc-Jun__Homo_sapiens__BAG51230
  source 1..1272: mol_type = other RNA
atgagcgccagcgccgtgttcatcctggacgtgaagggcaagcccctgatcagcagaaactacaagggcgacgtggccatgagcaagatcgagcacttcatgcccctgctggtgcagagagaggaggagggcgccctggcccccctgctgagccacggccaggtgcacttcctgtggaccaagcacagcaacctgtacctggtggccaccaccagcaagaacgccaacgccagcctggtgtacagcttcctgtacaagaccatcgaggtgttctgcgagtacttcaaggagctggaggaggagagcatcagagacaacttcgtgatcgtgtacgagctgctggacgagctgatggacttcggcttcccccagaccaccgacagcaagatcctgcaggagtacatcacccagcagagcaacaagctggagaccggcaagagcagagtgccccccaccgtgaccaacgccgtgagctggagaagcgagggcatcaagtacaagaagaacgaggtgttcatcgacgtgatcgagagcgtgaacctgctggtgaacgccaacggcagcgtgctgctgagcgagatcgtgggcaccatcaagctgaaggtgttcctgagcggcatgcccgagctgagactgggcctgaacgacagagtgctgttcgagctgaccggcagaagcaagaacaagagcgtggagctggaggacgtgaagttccaccagtgcgtgagactgagcagattcgacaacgacagaaccatcagcttcatcccccccgacggcgacttcgagctgatgagctacagactgagcacccaggtgaagcccctgatctggatcgagagcgtgatcgagaagttcagccacagcagagtggagatcaccgtgaaggccaagggccagttcaagaagcagagcgtggccaacggcgtggagatcagcgtgcccgtgcccagcgacgccgacagccccagattcaagaccagcgtgggcagcgccaagtacgtgcccgagagaaacgtggtgatctggagcatcaagagcttccccggcggcaaggagtacctgatgagagcccacttcggcctgcccagcgtggagaaggaggaggtggagggcagaccccccatcggcgtgaagttcgagatcccctacttcaccgtgagcggcatccaggtgagatacatgaagatcatcgagaagagcggctaccaggccctgccctgggtgagatacatcacccagagcggcgactaccagctgagaaccagctga

SEQ ID NO: 7869 - RNA, 1272 nt, synthetic construct
  misc_feature 1..1272: note = derived and/or modified sequence opt5 fromc-Jun__Homo_sapiens__BAG51230
  source 1..1272: mol_type = other RNA
atgagcgcttccgctgtgttcatcctggacgtcaagggcaaacccctcatttctagaaactacaagggggatgttgccatgagcaaaatcgagcactttatgcctctgcttgtgcagcgggaagaggaaggagcgctggctccgctcctgtcccatggccaagtgcacttcctttggaccaagcattctaatctgtatctcgtcgccacaacgagcaaaaacgccaatgcttccctggtgtactcttttctgtataagaccattgaggttttctgcgaatactttaaggagctcgaggaagagagcatccgcgacaacttcgtgattgtctatgaactgcttgatgagctgatggactttgggttcccccagacaaccgattccaaaatcctccaggagtacatcacacagcaaagcaataagctggaaaccggaaaatctagagtgcctcccacagttaccaacgccgtgtcctggcggagcgagggcattaagtataaaaagaatgaagtctttatcgacgtgattgagtctgtgaaccttctggtcaatgctaacgggtccgttctcctgagcgaaatcgtgggaacgattaagctgaaagtgttcctctctggcatgcctgagctgcgccttggcctgaatgatagagtcctctttgagctgaccgggcggtccaagaacaaaagcgtggaacttgaggacgttaagttccaccagtgtgtgcgcctgtccagatttgataatgaccggacaatctctttcattccccctgatggagacttcgaactcatgagctaccgcctgtccacccaggtcaaaccgctgatctggatcgagagcgtgattgaaaagttttctcattccagagttgagatcacagtgaaagccaagggccagttcaagaaacaaagcgtcgcgaacggggtggagatttctgtccccgtgcctagcgatgccgactctccccggtttaagacctccgttggaagcgctaaatacgtgcctgaacgcaatgtcgtgatctggtccattaagagcttccccggcgggaaagagtatctcatgagagcccactttggactgccgtctgttgaaaaggaggaagtggagggccggcctcccatcggcgtcaagttcgagatcccttactttacggtgtccgggattcaggtgcgctatatgaaaatcattgaaaagagcggataccaggcccttccctgggttagatatatcacacagtctggcgactaccaactgcggacctcctga

SEQ ID NO: 7870 - protein, 247 aa, synthetic construct
  REGION 1..247: note = c-Jun__Homo_sapiens__B3KNW1
MRSALLERMPVMEKVTTNGPTEIVQTNGETEPAPLETKPPPSGPQPTSQANDLLDLLGGNDITPVIPTAPTSKPSSAGGELLDLLGDINLTGAPAAAPAPASVPQISQPPFLLDGLSSQPLFNDIAAGIPSITAYSKNGLKIEFTFERSNTNPSVTVITIQASNSTELDMTDFVFQAAVPKTFQLQLLSPSSSIVPAFNTGTITQVIKVLNPQKQQLRMRIKLTYNHKGSAMQDLAEVNNFPPQSWQ

SEQ ID NO: 7871 - RNA, 744 nt, synthetic construct
  misc_feature 1..744: note = c-Jun__Homo_sapiens__BAG51473
  source 1..744: mol_type = other RNA
atgaggtctgccctacttgagagaatgcctgtcatggaaaaagtgaccacaaatggccctactgagattgtgcagacaaatggagagacagaaccagctccactagagaccaaaccgccaccctctgggccacagcccaccagccaggccaatgatttattggatttgttgggaggaaatgacataacacctgttattccaactgcgcctacaagcaaaccatcttctgctggtggagaacttcttgatttgctgggagacatcaaccttacaggtgctccagctgctgctcccgcccctgcctcagtcccacagatatcccagccccccttcttgttggatgggctttcatcacagcctctcttcaatgatattgctgcaggcatcccctccatcacagcatacagtaagaatggcttgaagatagaattcacctttgaacggtcaaataccaaccccagtgtaacagtgataacgatacaggcctccaacagcacagagctagatatgacggactttgttttccaagctgcagtaccaaagacattccagctgcagctcttgtctcctagcagcagcattgtcccagcatttaacacggggaccatcacacaagtcattaaagttctgaaccctcagaagcaacagctgcgaatgcggatcaagcttacatataatcacaagggctcagcaatgcaagatctagcagaggtgaacaactttccccctcagtcctggcaatga

SEQ ID NO: 7872 - RNA, 744 nt, synthetic construct
  misc_feature 1..744: note = derived and/or modified sequence opt1 fromc-Jun__Homo_sapiens__BAG51473
  source 1..744: mol_type = other RNA
atgcgcagcgccctgctcgagcggatgcccgtgatggagaaggtcaccaccaacggccccacggagatcgtgcagaccaacggggagaccgagcccgcgcccctggagaccaagcccccgccctccggcccccagcccacgagccaggccaacgacctgctcgacctgctcgggggcaacgacatcaccccggtgatccccaccgcccccacctccaagcccagctccgccgggggcgagctgctggacctgctcggcgacatcaacctgacgggggccccggccgcggcccccgcccccgccagcgtcccccagatctcccagccgcccttcctgctcgacggcctgagctcccagcccctgttcaacgacatcgcggccgggatccccagcatcaccgcctactccaagaacggcctcaagatcgagttcaccttcgagcgcagcaacaccaacccgtccgtgacggtgatcaccatccaggccagcaactccaccgagctggacatgaccgacttcgtcttccaggccgcggtgcccaagacgttccagctgcagctcctgagcccctccagctccatcgtgcccgccttcaacaccgggaccatcacccaggtcatcaaggtgctgaacccgcagaagcagcagctccggatgcgcatcaagctgacgtacaaccacaagggcagcgccatgcaggacctggccgaggtgaacaacttcccgccccagagctggcagtga

SEQ ID NO: 7873 - RNA, 744 nt, synthetic construct
  misc_feature 1..744: note = derived and/or modified sequence opt2 fromc-Jun__Homo_sapiens__BAG51473
  source 1..744: mol_type = other RNA
atgcgctccgccctcctcgagcgcatgcccgtcatggagaaggtcaccaccaacggccccaccgagatcgtccagaccaacggcgagaccgagcccgcccccctcgagaccaagccccccccctccggcccccagcccacctcccaggccaacgacctcctcgacctcctcggcggcaacgacatcacccccgtcatccccaccgcccccacctccaagccctcctccgccggcggcgagctcctcgacctcctcggcgacatcaacctcaccggcgcccccgccgccgcccccgcccccgcctccgtcccccagatctcccagccccccttcctcctcgacggcctctcctcccagcccctcttcaacgacatcgccgccggcatcccctccatcaccgcctactccaagaacggcctcaagatcgagttcaccttcgagcgctccaacaccaacccctccgtcaccgtcatcaccatccaggcctccaactccaccgagctcgacatgaccgacttcgtcttccaggccgccgtccccaagaccttccagctccagctcctctccccctcctcctccatcgtccccgccttcaacaccggcaccatcacccaggtcatcaaggtcctcaacccccagaagcagcagctccgcatgcgcatcaagctcacctacaaccacaagggctccgccatgcaggacctcgccgaggtcaacaacttccccccccagtcctggcagtga

SEQ ID NO: 7874 - RNA, 744 nt, synthetic construct
  misc_feature 1..744: note = derived and/or modified sequence opt3 fromc-Jun__Homo_sapiens__BAG51473
  source 1..744: mol_type = other RNA
atgagaagcgccctgctcgagaggatgcccgtgatggaaaaggtcaccacaaacggccctactgagatcgttcagacgaatggggaaaccgagccagctccgcttgaaacaaaaccccctccatccggaccccaacctacttctcaggcaaacgacctgttggatttactgggtggcaatgacattaccccagtgatacccacagcccctacctcaaagccaagtagcgcgggaggagagctactcgatctgcttggcgacatcaacctgactggtgctccggccgcagcccccgctcctgcatccgtaccacagatttctcagccccctttcttgctcgatgggctgtcgtcacaaccactgttcaatgacatcgccgctgggattcccagcatcacagcctacagtaaaaacggcctcaagatagagttcacctttgaacggtccaatacgaacccgtctgtgactgtcatcaccattcaggcgagcaattccacagagttagatatgactgacttcgtgtttcaggcagccgttcctaaaaccttccagctgcaacttttgtcacccagtagctctatcgtgccagcttttaacacaggcaccattacgcaggtcatcaaggtgctgaatcctcagaagcagcaactacgcatgcgaataaaactcacttataaccacaaggggtccgccatgcaggatctggcagaagtaaataactttcccccacagtcatggcaatga

SEQ ID NO: 7875 - RNA, 744 nt, synthetic construct
  misc_feature 1..744: note = derived and/or modified sequence opt4 fromc-Jun__Homo_sapiens__BAG51473
  source 1..744: mol_type = other RNA
atgagaagcgccctgctggagagaatgcccgtgatggagaaggtgaccaccaacggccccaccgagatcgtgcagaccaacggcgagaccgagcccgcccccctggagaccaagcccccccccagcggcccccagcccaccagccaggccaacgacctgctggacctgctgggcggcaacgacatcacccccgtgatccccaccgcccccaccagcaagcccagcagcgccggcggcgagctgctggacctgctgggcgacatcaacctgaccggcgcccccgccgccgcccccgcccccgccagcgtgccccagatcagccagccccccttcctgctggacggcctgagcagccagcccctgttcaacgacatcgccgccggcatccccagcatcaccgcctacagcaagaacggcctgaagatcgagttcaccttcgagagaagcaacaccaaccccagcgtgaccgtgatcaccatccaggccagcaacagcaccgagctggacatgaccgacttcgtgttccaggccgccgtgcccaagaccttccagctgcagctgctgagccccagcagcagcatcgtgcccgccttcaacaccggcaccatcacccaggtgatcaaggtgctgaacccccagaagcagcagctgagaatgagaatcaagctgacctacaaccacaagggcagcgccatgcaggacctggccgaggtgaacaacttccccccccagagctggcagtga

SEQ ID NO: 7876 - RNA, 744 nt, synthetic construct
  misc_feature 1..744: note = derived and/or modified sequence opt5 fromc-Jun__Homo_sapiens__BAG51473
  source 1..744: mol_type = other RNA
atgagaagcgccctgctcgagcggatgcccgtgatggaaaaggtcaccacaaacggccctacggagatcgttcagaccaatggggaaacagagccggctcccctggaaaccaaacctcccccttccggaccccaacctacatctcaggccaacgaccttctggatctcctgggcgggaatgacattaccccggtgatccccacagcgcctaccagcaagccctcctctgctggaggcgagcttctggatctcctgggggacattaacctgacgggagcccctgccgctgcccccgctccggccagcgtgcctcagatctcccagccccctttcctcctggatggcctttctagccaacccctgtttaatgacattgcggccggcatcccctccatcaccgcttacagcaaaaacgggctcaagattgagttcacatttgaacgctctaataccaacccttccgtcacagtgatcaccattcaggccagcaattctacggagctggatatgacagacttcgtttttcaggctgccgtgccgaaaaccttccagcttcaactgctctccccctctagctccatcgtccctgcgtttaacacaggaaccattacccaggtgatcaaggttctgaatccccagaagcagcaactgagaatgcggattaaactcacatataaccacaagggcagcgccatgcaggatctggctgaagtgaataacttccctccccagtcctggcaatga

SEQ ID NO: 7877 - protein, 845 aa, synthetic construct
  REGION 1..845: note = c-Jun__Homo_sapiens__B3KXW5
MEKNINLRNCQTLNTYVMLTHLRMPAPIRLRELIRTIRTARTQAEEREMIQKECAAIRSSFREEDNTYRCRNVAKLLYMHMLGYPAHFGQLECLKLIASQKFTDKRIGYLGAMLLLDERQDVHLLMTNCIKNDLNHSTQFVQGLALCTLGCMGSSEMCRDLAGEVEKLLKTSNSYLRKKAALCAVHVIRKVPELMEMFLPATKNLLNEKNHGVLHTSVVLLTEMCERSPDMLAHFRKLVPQLVRILKNLIMSGYSPEHDVSGISDPFLQVRILRLLRILGRNDDDSSEAMNDILAQVATNTETSKNVGNAILYETVLTIMDIKSESGLRVLAINILGRFLLNNDKNIRYVALTSLLKTVQTDHNAVQRHRSTIVDCLKDLDVSIKRRAMELSFALVNGNNIRGMMKELLYFLDSCEPEFKADCASGIFLAAEKYAPSKRWHIDTIMRVLTTAGSYVRDDAVPNLIQLITNSVEMHAYTVQRLYKAILGDYSQQPLVQVAAWCIGEYGDLLVSGQCEEEEPIQVTEDEVLDILESVLISNMSTSVTRGYALTAIMKLSTRFTCTVNRIKKVVSIYGSSIDVELQQRAVEYNALFKKYDHMRSALLERMPVMEKVTTNGPTEIVQTNGETEPAPLETKPPPSGPQPTSQANDLLDLLGGNDITPVIPTAPTSKPSSAGGELLDLLGDINLTGAPAAAPAPASVPQISQPPFLLDGLSSQPLFNDIAAGIPSITAYSKNGLKIEFTFERSNTNPSVTVITIQASNSTELDMTDFVFQAAVPKTFQLQLLSPSSSIVPAFNTGTITQVIKVLNPQKQQLRMRIKLTYNHKGSAMQDLAEVNNFPPQSWQ

SEQ ID NO: 7878 - RNA, 2538 nt, synthetic construct
  misc_feature 1..2538: note = c-Jun__Homo_sapiens__BAG54627
  source 1..2538: mol_type = other RNA
atggagaaaaatattaatctgaggaactgtcaaacactgaacacctatgtaatgctcactcatttaaggatgccagcccccatcagattgcgggagctgatccggaccatccggacagcccgaacccaagctgaagaacgagaaatgatccagaaagaatgtgctgcaatccggtcatcttttagagaagaagacaatacataccgatgtcggaatgtggcaaaattactgtatatgcacatgctgggctaccctgctcactttggacagttggagtgcctcaagcttattgcctctcaaaaatttacagacaaacgcattggctatttaggggcaatgctgctgttagatgaaagacaagatgtccatcttctcatgaccaactgtatcaagaatgatcttaatcatagcacgcaattcgtacaggggttagcactttgtaccctcggctgcatgggctcctcagagatgtgcagagatcttgcaggagaggtagagaagctcctgaaaacctccaactcttacttaagaaaaaaggcagcactgtgtgctgttcatgtcatcaggaaagttcctgaacttatggagatgtttttaccagcaacaaaaaatttattgaatgagaagaaccatggtgtcctccacacatctgtagtcctcctcacagaaatgtgtgagcgaagcccagacatgcttgcgcatttcagaaagcttgtgccccaattagttcgtattttaaagaacctcatcatgtccggatattcaccagaacatgatgtttctggtatcagtgacccctttttgcaggtacgaattttgcggttattaagaattttaggacgaaatgatgatgattcaagtgaagctatgaatgatatattagcacaggttgccactaatactgagactagtaaaaatgtaggaaatgctattctttatgaaacggttttgactatcatggatattaagtcagagagtggattgcgagtcctagccataaatatcctgggtcgtttcttattgaacaatgacaagaatattagatatgtggctctgacatctttgttgaagactgtacagacagatcataatgcagtacagaggcacagaagcacaattgtggactgtcttaaagatttggatgtctcaataaaacggcgtgcaatggaattgagttttgccctggtaaatgggaataatatccgaggcatgatgaaagaattactttattttctggattcgtgtgagccagaatttaaagcagactgtgcatctggaatctttcttgctgcagaaaagtatgcaccttccaaacgatggcatatagacacaattatgcgtgttttgacaacggcaggaagttatgttcgtgatgatgcagtccccaatttaatccagttaataactaatagtgtggagatgcatgcctatactgtccagcgcctgtacaaagcaattcttggtgattattctcaacaacctttggtacaagtggctgcatggtgtataggtgaatatggtgatcttcttgtatctggccagtgtgaagaggaagagcctattcaggtaacagaggatgaagtgttggatattttagaaagtgtcctaatctctaatatgtccacctctgtgacacgaggttatgccctcactgccattatgaagctttccactcgattcacttgtactgtaaaccgaattaagaaagtggtttccatctacggaagcagcattgatgtggaactccagcagagggcagtagaatataatgcacttttcaagaaatatgaccacatgaggtctgccctacttgagagaatgcctgtcatggaaaaagtgaccacaaatggccctactgagattgtgcagacaaatggagagacagaaccagctccactagagaccaaaccgccaccctctgggccacagcccaccagccaggccaatgatttattggatttgttgggaggaaatgacataacacctgttattccaactgcgcctacaagcaaaccatcttctgctggtggagaacttcttgatttgctgggagacatcaaccttacaggtgctccagctgctgctcctgcccctgcctcagtcccacagatatcccagccccccttcttgttggatgggctttcatcacagcctctcttcaatgatattgctgcaggcatcccctccatcacagcatacagtaagaatggcttgaagatagaattcacctttgaacggtcaaataccaaccccagtgtaacagtgataacgatacaggcctccaacagcacagagctagatatgacggactttgttttccaagctgcagtaccaaagacattccagctgcagctcttgtctcctagcagcagcattgtcccagcatttaacacggggaccatcacacaagtcattaaagttctgaaccctcagaagcaacagctgcgaatgcggatcaagcttacatataatcacaagggctcagcaatgcaagatctagcagaggtgaacaactttccccctcagtcctggcaatga

SEQ ID NO: 7879 - RNA, 2538 nt, synthetic construct
  misc_feature 1..2538: note = derived and/or modified sequence opt1 fromc-Jun__Homo_sapiens__BAG54627
  source 1..2538: mol_type = other RNA
atggagaagaacatcaacctgcgcaactgccagaccctcaacacctacgtgatgctgacgcacctccggatgcccgccccgatccgcctgcgggagctgatccgcaccatccggaccgcccgcacccaggcggaggagcgggagatgatccagaaggagtgcgccgccatccgcagctccttccgggaggaggacaacacgtaccgctgccggaacgtcgccaagctgctctacatgcacatgctgggctaccccgcccacttcgggcagctggagtgcctcaagctgatcgcgagccagaagttcaccgacaagcgcatcggctacctgggggccatgctcctgctggacgagcggcaggacgtgcacctcctgatgaccaactgcatcaagaacgacctgaaccactccacccagttcgtgcagggcctcgccctgtgcacgctggggtgcatgggcagctccgagatgtgccgcgacctcgccggcgaggtcgagaagctgctgaagaccagcaactcctacctccggaagaaggcggccctgtgcgccgtgcacgtgatccgcaaggtccccgagctgatggagatgttcctccccgccaccaagaacctgctgaacgagaagaaccacggggtgctccacaccagcgtggtcctgctgacggagatgtgcgagcggtccccggacatgctcgcccacttccgcaagctggtgccccagctggtgcggatcctcaagaacctgatcatgagcggctactcccccgagcacgacgtcagcgggatctccgaccccttcctccaggtgcgcatcctgcggctgctgcgcatcctcggccgcaacgacgacgacagctccgaggcgatgaacgacatcctggcccaggtggccaccaacaccgagaccagcaagaacgtcgggaacgccatcctgtacgagacggtgctcaccatcatggacatcaagtccgagagcggcctgcgggtgctggccatcaacatcctcggccgcttcctgctgaacaacgacaagaacatccggtacgtcgcgctgacctccctcctgaagaccgtgcagacggaccacaacgccgtgcagcgccaccggagcaccatcgtcgactgcctgaaggacctcgacgtgagcatcaagcgccgggccatggagctgtccttcgccctggtgaacgggaacaacatccgcggcatgatgaaggagctcctgtacttcctggacagctgcgagccggagttcaaggccgactgcgcgtccgggatcttcctcgccgccgagaagtacgcccccagcaagcggtggcacatcgacaccatcatgcgcgtcctgaccacggccggctcctacgtgcgggacgacgcggtccccaacctgatccagctcatcaccaacagcgtggagatgcacgcctacaccgtgcagcgcctgtacaaggccatcctgggcgactactcccagcagcccctcgtccaggtggccgcgtggtgcatcggggagtacggcgacctgctggtgagcgggcagtgcgaggaggaggagccgatccaggtcaccgaggacgaggtgctcgacatcctggagtccgtgctgatcagcaacatgtccacgagcgtcacccggggctacgccctcaccgccatcatgaagctgtccacccgcttcacgtgcaccgtgaaccggatcaagaaggtggtcagcatctacgggtccagcatcgacgtggagctgcagcagcgcgccgtggagtacaacgccctcttcaagaagtacgaccacatgcggtccgcgctgctggagcgcatgcccgtcatggagaaggtgaccaccaacggccccacggagatcgtgcagaccaacggcgagaccgagcccgccccgctcgagaccaagcccccgcccagcgggccccagcccacctcccaggccaacgacctgctggacctcctgggcgggaacgacatcacgcccgtcatccccaccgccccgaccagcaagcccagctccgccggcggggagctgctcgacctgctgggcgacatcaacctcaccggcgcgcccgccgccgcccccgccccggcgagcgtgccccagatctcccagcccccgttcctgctggacgggctcagctcccagcccctgttcaacgacatcgccgccggcatccccagcatcacggcctactccaagaacgggctgaagatcgagttcaccttcgagcggagcaacaccaacccctccgtgaccgtcatcacgatccaggcgagcaactccaccgagctcgacatgaccgacttcgtgttccaggccgccgtgccgaagaccttccagctgcagctgctcagcccctccagctccatcgtccccgccttcaacacgggcaccatcacccaggtgatcaaggtgctgaacccccagaagcagcagctgcgcatgcgcatcaagctcacctacaaccacaaggggagcgccatgcaggacctggcggaggtcaacaacttcccgccccagtcctggcagtga

SEQ ID NO: 7880 - RNA, 2538 nt, synthetic construct
  misc_feature 1..2538: note = derived and/or modified sequence opt2 fromc-Jun__Homo_sapiens__BAG54627
  source 1..2538: mol_type = other RNA
atggagaagaacatcaacctccgcaactgccagaccctcaacacctacgtcatgctcacccacctccgcatgcccgcccccatccgcctccgcgagctcatccgcaccatccgcaccgcccgcacccaggccgaggagcgcgagatgatccagaaggagtgcgccgccatccgctcctccttccgcgaggaggacaacacctaccgctgccgcaacgtcgccaagctcctctacatgcacatgctcggctaccccgcccacttcggccagctcgagtgcctcaagctcatcgcctcccagaagttcaccgacaagcgcatcggctacctcggcgccatgctcctcctcgacgagcgccaggacgtccacctcctcatgaccaactgcatcaagaacgacctcaaccactccacccagttcgtccagggcctcgccctctgcaccctcggctgcatgggctcctccgagatgtgccgcgacctcgccggcgaggtcgagaagctcctcaagacctccaactcctacctccgcaagaaggccgccctctgcgccgtccacgtcatccgcaaggtccccgagctcatggagatgttcctccccgccaccaagaacctcctcaacgagaagaaccacggcgtcctccacacctccgtcgtcctcctcaccgagatgtgcgagcgctcccccgacatgctcgcccacttccgcaagctcgtcccccagctcgtccgcatcctcaagaacctcatcatgtccggctactcccccgagcacgacgtctccggcatctccgaccccttcctccaggtccgcatcctccgcctcctccgcatcctcggccgcaacgacgacgactcctccgaggccatgaacgacatcctcgcccaggtcgccaccaacaccgagacctccaagaacgtcggcaacgccatcctctacgagaccgtcctcaccatcatggacatcaagtccgagtccggcctccgcgtcctcgccatcaacatcctcggccgcttcctcctcaacaacgacaagaacatccgctacgtcgccctcacctccctcctcaagaccgtccagaccgaccacaacgccgtccagcgccaccgctccaccatcgtcgactgcctcaaggacctcgacgtctccatcaagcgccgcgccatggagctctccttcgccctcgtcaacggcaacaacatccgcggcatgatgaaggagctcctctacttcctcgactcctgcgagcccgagttcaaggccgactgcgcctccggcatcttcctcgccgccgagaagtacgccccctccaagcgctggcacatcgacaccatcatgcgcgtcctcaccaccgccggctcctacgtccgcgacgacgccgtccccaacctcatccagctcatcaccaactccgtcgagatgcacgcctacaccgtccagcgcctctacaaggccatcctcggcgactactcccagcagcccctcgtccaggtcgccgcctggtgcatcggcgagtacggcgacctcctcgtctccggccagtgcgaggaggaggagcccatccaggtcaccgaggacgaggtcctcgacatcctcgagtccgtcctcatctccaacatgtccacctccgtcacccgcggctacgccctcaccgccatcatgaagctctccacccgcttcacctgcaccgtcaaccgcatcaagaaggtcgtctccatctacggctcctccatcgacgtcgagctccagcagcgcgccgtcgagtacaacgccctcttcaagaagtacgaccacatgcgctccgccctcctcgagcgcatgcccgtcatggagaaggtcaccaccaacggccccaccgagatcgtccagaccaacggcgagaccgagcccgcccccctcgagaccaagccccccccctccggcccccagcccacctcccaggccaacgacctcctcgacctcctcggcggcaacgacatcacccccgtcatccccaccgcccccacctccaagccctcctccgccggcggcgagctcctcgacctcctcggcgacatcaacctcaccggcgcccccgccgccgcccccgcccccgcctccgtcccccagatctcccagccccccttcctcctcgacggcctctcctcccagcccctcttcaacgacatcgccgccggcatcccctccatcaccgcctactccaagaacggcctcaagatcgagttcaccttcgagcgctccaacaccaacccctccgtcaccgtcatcaccatccaggcctccaactccaccgagctcgacatgaccgacttcgtcttccaggccgccgtccccaagaccttccagctccagctcctctccccctcctcctccatcgtccccgccttcaacaccggcaccatcacccaggtcatcaaggtcctcaacccccagaagcagcagctccgcatgcgcatcaagctcacctacaaccacaagggctccgccatgcaggacctcgccgaggtcaacaacttccccccccagtcctggcagtga

SEQ ID NO: 7881 - RNA, 2538 nt, synthetic construct
  misc_feature 1..2538: note = derived and/or modified sequence opt3 fromc-Jun__Homo_sapiens__BAG54627
  source 1..2538: mol_type = other RNA
atggagaagaacatcaatctgagaaactgccagaccctcaatacatacgtgatgcttactcacctgaggatgcccgcccctattcggttgcgcgaattaatacgaacgatccgtaccgctagaacacaagcagaggaaagggagatgattcagaaagaatgtgccgcgatccggagctccttccgcgaggaggacaacacttatagatgcaggaatgtcgctaagctgctatacatgcatatgctcggctatccagcccactttgggcagctggaatgtcttaaactgattgcatctcagaagttcaccgataaacggatcggatacttgggtgccatgctcctgctggacgagcgccaagatgttcatctcttaatgacaaactgcataaagaatgacctgaaccactcaacccagtttgtgcagggccttgctttgtgtactctggggtgcatgggaagtagcgaaatgtgtcgagatctagcaggcgaggtagagaagctcctgaaaacatccaattcttatcttagaaagaaagccgctctgtgcgccgtgcatgtcatcaggaaggtgccggaattgatggagatgttcctccccgcgaccaaaaacctgttaaatgaaaagaaccacggtgttctgcacacgtcggtggtcctccttactgagatgtgtgaacggtcacctgacatgctggcacattttcgtaagttggtgccacagctagtacgcattctgaaaaatctcatcatgagcgggtacagtcccgagcacgatgtttccggaatttctgaccctttcctgcaagtgagaatccttaggctgttgcggatactcggccgaaacgatgacgatagctccgaggccatgaatgacattctggctcaggtcgccaccaacacagaaacttcaaagaacgtgggcaatgcaatcttatatgagaccgtgctgacaattatggatatcaaaagtgaaagcgggctacgcgtcctcgctatcaacattctgggaagatttcttttgaataacgacaagaatataaggtacgttgccctgacctctctcctgaaaacggtgcagactgaccataacgcggtacagcggcaccgctccacaatcgtggattgccttaaggacctggatgtctcaattaaaagaagggccatggagttgagcttcgcactcgtgaatggtaacaatatccgtggcatgatgaaggaactgttatactttctggacagttgtgagccagagttcaaggctgattgcgcctctgggatatttctagctgccgaaaaatatgcaccctccaagcggtggcacattgacaccatcatgcgagttctcactacagccggaagctacgtgagagatgacgctgtccctaacctgatccaacttattaccaattcggtggagatgcatgcgtatacggtacagaggttgtacaaagcaatcctgggcgattattctcagcaaccactcgttcaggtggccgcttggtgcattggtgaatacggggacctgttagtctccggacagtgtgaggaagaggagccgatacaggtgaccgaagatgaggtcctggacatccttgaatcagtgttgattagtaacatgagcacatccgttactcgcggctatgccctcaccgcaatcatgaagctgtctacacggttcacttgcaccgtgaatagaatcaaaaaggtagtcagcatttacggctcaagtatagacgtggagctacaacagagggccgttgagtacaacgctctgtttaagaaatatgatcacatgcgctccgccctcctggaacgaatgcccgtgatggagaaggtcacaaccaatgggcctactgaaatcgtgcagacgaacggagagacagaaccagcaccccttgagaccaaacctccacccagcggtccgcagcctacttctcaagcgaacgacttgctggatttactcggcgggaatgacattacccccgtaatcccaacagctcctacctcaaagcccagtagcgccggaggcgagctgcttgatctgttgggtgacattaacctcactggggcaccagccgctgcccccgctcctgcatccgtgccacagatctctcagccgcccttcctgctagatggcctgtcgagccagcctctcttcaatgacatagccgcgggaatcccatccattacagcctacagcaaaaacggcctgaagatcgaatttacgttcgagcggagtaataccaacccctctgttactgtcattacaatccaagctagcaattccaccgaacttgatatgacagactttgtgttccaggcagccgtgcctaagacttttcagttgcagctgttatcaccatcatcttccatagtccccgctttcaacaccgggacgattacccaagttatcaaagtgctcaatccgcagaagcagcaactgcgtatgagaattaaacttacatataaccataagggaagtgccatgcaggatctggcagaggtgaataactttcctccacagagctggcagtga

SEQ ID NO: 7882 - RNA, 2538 nt, synthetic construct
  misc_feature 1..2538: note = derived and/or modified sequence opt4 fromc-Jun__Homo_sapiens__BAG54627
  source 1..2538: mol_type = other RNA
atggagaagaacatcaacctgagaaactgccagaccctgaacacctacgtgatgctgacccacctgagaatgcccgcccccatcagactgagagagctgatcagaaccatcagaaccgccagaacccaggccgaggagagagagatgatccagaaggagtgcgccgccatcagaagcagcttcagagaggaggacaacacctacagatgcagaaacgtggccaagctgctgtacatgcacatgctgggctaccccgcccacttcggccagctggagtgcctgaagctgatcgccagccagaagttcaccgacaagagaatcggctacctgggcgccatgctgctgctggacgagagacaggacgtgcacctgctgatgaccaactgcatcaagaacgacctgaaccacagcacccagttcgtgcagggcctggccctgtgcaccctgggctgcatgggcagcagcgagatgtgcagagacctggccggcgaggtggagaagctgctgaagaccagcaacagctacctgagaaagaaggccgccctgtgcgccgtgcacgtgatcagaaaggtgcccgagctgatggagatgttcctgcccgccaccaagaacctgctgaacgagaagaaccacggcgtgctgcacaccagcgtggtgctgctgaccgagatgtgcgagagaagccccgacatgctggcccacttcagaaagctggtgccccagctggtgagaatcctgaagaacctgatcatgagcggctacagccccgagcacgacgtgagcggcatcagcgaccccttcctgcaggtgagaatcctgagactgctgagaatcctgggcagaaacgacgacgacagcagcgaggccatgaacgacatcctggcccaggtggccaccaacaccgagaccagcaagaacgtgggcaacgccatcctgtacgagaccgtgctgaccatcatggacatcaagagcgagagcggcctgagagtgctggccatcaacatcctgggcagattcctgctgaacaacgacaagaacatcagatacgtggccctgaccagcctgctgaagaccgtgcagaccgaccacaacgccgtgcagagacacagaagcaccatcgtggactgcctgaaggacctggacgtgagcatcaagagaagagccatggagctgagcttcgccctggtgaacggcaacaacatcagaggcatgatgaaggagctgctgtacttcctggacagctgcgagcccgagttcaaggccgactgcgccagcggcatcttcctggccgccgagaagtacgcccccagcaagagatggcacatcgacaccatcatgagagtgctgaccaccgccggcagctacgtgagagacgacgccgtgcccaacctgatccagctgatcaccaacagcgtggagatgcacgcctacaccgtgcagagactgtacaaggccatcctgggcgactacagccagcagcccctggtgcaggtggccgcctggtgcatcggcgagtacggcgacctgctggtgagcggccagtgcgaggaggaggagcccatccaggtgaccgaggacgaggtgctggacatcctggagagcgtgctgatcagcaacatgagcaccagcgtgaccagaggctacgccctgaccgccatcatgaagctgagcaccagattcacctgcaccgtgaacagaatcaagaaggtggtgagcatctacggcagcagcatcgacgtggagctgcagcagagagccgtggagtacaacgccctgttcaagaagtacgaccacatgagaagcgccctgctggagagaatgcccgtgatggagaaggtgaccaccaacggccccaccgagatcgtgcagaccaacggcgagaccgagcccgcccccctggagaccaagcccccccccagcggcccccagcccaccagccaggccaacgacctgctggacctgctgggcggcaacgacatcacccccgtgatccccaccgcccccaccagcaagcccagcagcgccggcggcgagctgctggacctgctgggcgacatcaacctgaccggcgcccccgccgccgcccccgcccccgccagcgtgccccagatcagccagccccccttcctgctggacggcctgagcagccagcccctgttcaacgacatcgccgccggcatccccagcatcaccgcctacagcaagaacggcctgaagatcgagttcaccttcgagagaagcaacaccaaccccagcgtgaccgtgatcaccatccaggccagcaacagcaccgagctggacatgaccgacttcgtgttccaggccgccgtgcccaagaccttccagctgcagctgctgagccccagcagcagcatcgtgcccgccttcaacaccggcaccatcacccaggtgatcaaggtgctgaacccccagaagcagcagctgagaatgagaatcaagctgacctacaaccacaagggcagcgccatgcaggacctggccgaggtgaacaacttccccccccagagctggcagtga

SEQ ID NO: 7883 - RNA, 2538 nt, synthetic construct
  misc_feature 1..2538: note = derived and/or modified sequence opt5 fromc-Jun__Homo_sapiens__BAG54627
  source 1..2538: mol_type = other RNA
atggagaagaacatcaatctgagaaactgccagaccctcaatacatacgtgatgctgacgcaccttcggatgcccgcccctattcgcctgagagaactcatccggaccattcgcacagctagaacccaagccgaggaacgggagatgatccagaaagaatgtgcggctattcgcagctccttcagagaggaggacaacacatatcggtgccgcaatgtcgccaagctgctttacatgcatatgctgggctatccggcccactttgggcagctcgaatgtctgaaactgatcgcttctcagaagttcaccgataaaagaatcggatacctcggcgccatgctgcttctggacgagcggcaagatgttcatctcctgatgacaaactgcattaagaatgaccttaaccacagcacccagtttgtgcaggggctggctctctgtacgctgggatgcatgggctcctctgaaatgtgtcgcgatctggccggggaggtggagaagctcctgaaaaccagcaattcctatcttagaaagaaagcggccctgtgcgctgtccatgtgatccggaaggttcccgaactcatggagatgttcctgcctgccaccaaaaaccttctgaatgaaaagaaccacggagtgctccacacctctgtcgtgctgctgacagagatgtgtgaacgcagccccgacatgctcgctcattttagaaagctggttcctcagcttgtgcggattctgaaaaatctcatcatgtccggctacagccccgagcacgatgtctctggcatttccgaccctttcctgcaagtgagaatccttcgcctgctccggattctggggagaaacgatgacgatagctctgaggccatgaatgacatcctggcccaggtggccaccaacacggaaacatccaagaacgtcggaaatgctatcctctatgagaccgttctgacaattatggatatcaaaagcgaatctggccttcgcgtgctggccattaacatcctcgggcggtttctgctgaataacgacaagaatattagatacgtggctcttacctccctcctgaaaaccgtccagacagaccataacgccgtgcagcgccaccggagcacgatcgttgattgcctgaaggacctcgatgtgtccatcaaaagacgcgccatggagctgtctttcgctcttgtcaatggaaacaatattcggggcatgatgaaggaactgctctactttctggacagctgtgagccggagttcaaggcggattgcgcctccgggatctttctggctgccgaaaaatatgcccccagcaagagatggcacattgacaccatcatgcgcgtgcttacaaccgctggatcttacgttcgggatgacgccgtgcctaacctcattcaactgatcacaaattccgtcgagatgcatgcgtataccgtgcagagactgtacaaagctatcctcggcgattatagccagcaacccctggtccaggtggccgcctggtgcattggcgaatacggggaccttctggtttctggacagtgtgaggaagaggagcctatccaggtgacggaagatgaggtcctcgacattctggaaagcgtgctgatctccaacatgtctacaagcgttacccggggctatgctcttaccgccattatgaagctctccacacgcttcacatgcacagtgaatagaatcaaaaaggtcgtgagcatttacgggtcttccatcgacgtggagctgcaacagcgggctgttgagtacaacgccctgtttaagaaatatgatcacatgagaagcgcgctcctggaacgcatgcccgtcatggagaaggtgacgaccaatggaccgacagaaatcgtgcagaccaacggcgagacagaacctgcgccccttgagaccaaacctcctccctctgggccccagccgacgtcccaagctaacgacctgctcgatctgctgggaggcaatgacattacccccgtcatccctacagcccccaccagcaagccttcctctgctggcggggagcttctcgatctgctgggagacattaacctcacaggcgcccccgcggccgctccggcccctgctagcgtgccccagatctcccagcctcccttcctgcttgatgggctgtctagccagcctctcttcaatgacattgccgccggaatcccctccatcaccgcttacagcaaaaacggcctgaagattgaatttacgttcgagcggtctaatacaaacccgtccgttaccgtgatcacaattcaagcgagcaattctaccgaactggatatgaccgactttgtcttccaggccgctgtgcctaagacatttcagcttcagctgctctcccccagctctagcatcgttcccgccttcaacacggggaccattacacaagtgatcaaagtcctgaatcctcagaagcagcaactcagaatgcgcatcaaactgacctataaccataagggctccgccatgcaggatcttgctgaggtgaataactttccgccccagagctggcagtga

SEQ ID NO: 7884 - protein, 310 aa, synthetic construct
  REGION 1..310: note = c-Jun__Homo_sapiens__B4DED9
MADRAEMFSLSTFHSLSPPGCRPPQDISLEEFDDEDLSEITDDCGLGLSYDSDHCEKDSLSLGRSEQPHPICSFQDDFQEFEMIDVNGEEREQTHRAVFRFIPRHPDELELDVDDPVLVEAEEDDFWFRGFNMRTGERGVFPAFYAHAVPGPAKDLLGSKRSPCWVERFDVQFLGSVEVPCHQGNGILCAAMQKIATARKLTVHLRPPASCDLEISLRGVKLSLSGGGPEFQRCSHFFQMKNISFCGCHPRNSCYFGFITKHPLLSRFACHVFVSQESMRPVAQSVGRAFLEYYQEHLAYACPTEDIYLE

SEQ ID NO: 7885 - RNA, 933 nt, synthetic construct
  misc_feature 1..933: note = c-Jun__Homo_sapiens__BAG57050
  source 1..933: mol_type = other RNA
atggcggatcgcgcggagatgttttctctctccaccttccactcgctgtcgccgccgggctgcaggcctccccaggacataagcctggaagaatttgacgacgaagatctgtctgagatcactgatgactgtggcctgggcctcagctacgactcagaccactgtgagaaggacagcctctccctggggcgctcggagcagccgcaccccatctgctccttccaggatgacttccaggagtttgagatgatcgatgtcaacggcgaggagcgagagcagactcaccgggctgtgttcaggttcatcccgcggcatccagacgagctggagctggatgtggatgaccctgtgttggtggaggccgaggaggacgacttctggttccgtggcttcaacatgcgcacgggggagcgcggtgtgtttcctgccttctacgcccatgcggtgcccggccctgccaaggacctgctggggagtaagcggagcccctgctgggtggagcgctttgacgtgcagttcctgggctccgtggaggtgccctgccaccagggcaacggcatcctgtgtgcagccatgcagaagattgccactgcccggaaactgaccgtccacctgcgccctcctgcctcctgtgacctcgagatctctcttcggggggtcaagctgagtctgagcggaggagggcctgagttccagcgctgcagccatttcttccagatgaagaacatctccttctgcggctgccatccccgcaacagctgctatttcggcttcatcaccaaacaccccctgctgagccgcttcgcctgccacgtctttgtctcccaggagtccatgaggccagtggcgcagagtgtgggccgcgccttcctggagtactaccaagagcacctggcgtacgcctgccccacggaggacatctacctggagtag

SEQ ID NO: 7886 - RNA, 933 nt, synthetic construct
  misc_feature 1..933: note = derived and/or modified sequence opt1 fromc-Jun__Homo_sapiens__BAG57050
  source 1..933: mol_type = other RNA
atggccgaccgcgccgagatgttcagcctgtccaccttccacagcctctccccgcccggctgccggccgccccaggacatcagcctggaggagttcgacgacgaggacctgtccgagatcaccgacgactgcgggctcggcctgagctacgactccgaccactgcgagaaggacagcctgtccctcgggcgcagcgagcagccccaccccatctgctccttccaggacgacttccaggagttcgagatgatcgacgtgaacggcgaggagcgggagcagacgcaccgcgcggtcttccggttcatcccccgccaccccgacgagctggagctggacgtggacgaccccgtgctcgtcgaggccgaggaggacgacttctggttccgggggttcaacatgcgcaccggcgagcggggcgtgttcccggccttctacgcccacgccgtgcccgggcccgcgaaggacctgctgggcagcaagcgctccccctgctgggtcgagcggttcgacgtgcagttcctcgggagcgtggaggtcccgtgccaccagggcaacgggatcctgtgcgccgccatgcagaagatcgccaccgcgcgcaagctgaccgtgcacctccggccgcccgcctcctgcgacctggagatcagcctgcgcggcgtgaagctctccctgagcggcgggggccccgagttccagcggtgctcccacttcttccagatgaagaacatcagcttctgcgggtgccacccccgcaacagctgctacttcggcttcatcacgaagcaccccctgctctcccggttcgcctgccacgtcttcgtgagccaggagtccatgcgccccgtggcccagagcgtcggccgggccttcctggagtactaccaggagcacctggcgtacgcctgccccaccgaggacatctacctcgagtga

SEQ ID NO: 7887 - RNA, 933 nt, synthetic construct
  misc_feature 1..933: note = derived and/or modified sequence opt2 fromc-Jun__Homo_sapiens__BAG57050
  source 1..933: mol_type = other RNA
atggccgaccgcgccgagatgttctccctctccaccttccactccctctccccccccggctgccgccccccccaggacatctccctcgaggagttcgacgacgaggacctctccgagatcaccgacgactgcggcctcggcctctcctacgactccgaccactgcgagaaggactccctctccctcggccgctccgagcagccccaccccatctgctccttccaggacgacttccaggagttcgagatgatcgacgtcaacggcgaggagcgcgagcagacccaccgcgccgtcttccgcttcatcccccgccaccccgacgagctcgagctcgacgtcgacgaccccgtcctcgtcgaggccgaggaggacgacttctggttccgcggcttcaacatgcgcaccggcgagcgcggcgtcttccccgccttctacgcccacgccgtccccggccccgccaaggacctcctcggctccaagcgctccccctgctgggtcgagcgcttcgacgtccagttcctcggctccgtcgaggtcccctgccaccagggcaacggcatcctctgcgccgccatgcagaagatcgccaccgcccgcaagctcaccgtccacctccgcccccccgcctcctgcgacctcgagatctccctccgcggcgtcaagctctccctctccggcggcggccccgagttccagcgctgctcccacttcttccagatgaagaacatctccttctgcggctgccacccccgcaactcctgctacttcggcttcatcaccaagcaccccctcctctcccgcttcgcctgccacgtcttcgtctcccaggagtccatgcgccccgtcgcccagtccgtcggccgcgccttcctcgagtactaccaggagcacctcgcctacgcctgccccaccgaggacatctacctcgagtga

SEQ ID NO: 7888 - RNA, 933 nt, synthetic construct
  misc_feature 1..933: note = derived and/or modified sequence opt3 fromc-Jun__Homo_sapiens__BAG57050
  source 1..933: mol_type = other RNA
atggccgacagagctgagatgttcagcctgtccacctttcactctctctcaccccctggctgcaggccaccgcaggatatcagtcttgaagagttcgacgatgaagacctgagcgagattacagatgactgtgggttgggattatcctacgattctgaccattgcgaaaaggattcgctgtcactaggtcggagcgagcaaccccaccctatatgtagttttcaggacgatttccaggagtttgaaatgatcgacgtgaacggcgaggaacgcgagcagactcatcgagcagtcttccgttttattccaagacaccccgatgagctcgaactggacgttgacgatcctgtgcttgtagaggccgaagaggacgatttctggtttagggggttcaatatgcggacgggagaacgcggcgtgtttccagcgttctatgctcatgccgtccccggtcctgcaaaagacctgttggggtccaagagatctccatgctgggtggagaggtttgatgttcaattcctcggaagcgtggaggtcccgtgtcaccagggcaacggcatcctgtgcgccgctatgcagaaaattgcaaccgcccggaagctgacagtgcacctccgaccccctgcttcctgtgacttagaaatctcactgcgcggggtaaaacttagtttgagcggaggtggcccagagttccagagatgctctcactttttccaaatgaagaatatatccttttgtgggtgccatcccaggaactcatgttacttcggatttatcactaagcatcctctgctaagccggttcgcctgccacgtttttgtgagtcaggaatctatgcgtccagtcgcgcagtccgtgggccgcgcattcctcgagtattaccaggaacacctggcctatgcttgccccaccgaggatatttaccttgagtga

SEQ ID NO: 7889 - RNA, 933 nt, synthetic construct
  misc_feature 1..933: note = derived and/or modified sequence opt4 fromc-Jun__Homo_sapiens__BAG57050
  source 1..933: mol_type = other RNA
atggccgacagagccgagatgttcagcctgagcaccttccacagcctgagcccccccggctgcagacccccccaggacatcagcctggaggagttcgacgacgaggacctgagcgagatcaccgacgactgcggcctgggcctgagctacgacagcgaccactgcgagaaggacagcctgagcctgggcagaagcgagcagccccaccccatctgcagcttccaggacgacttccaggagttcgagatgatcgacgtgaacggcgaggagagagagcagacccacagagccgtgttcagattcatccccagacaccccgacgagctggagctggacgtggacgaccccgtgctggtggaggccgaggaggacgacttctggttcagaggcttcaacatgagaaccggcgagagaggcgtgttccccgccttctacgcccacgccgtgcccggccccgccaaggacctgctgggcagcaagagaagcccctgctgggtggagagattcgacgtgcagttcctgggcagcgtggaggtgccctgccaccagggcaacggcatcctgtgcgccgccatgcagaagatcgccaccgccagaaagctgaccgtgcacctgagaccccccgccagctgcgacctggagatcagcctgagaggcgtgaagctgagcctgagcggcggcggccccgagttccagagatgcagccacttcttccagatgaagaacatcagcttctgcggctgccaccccagaaacagctgctacttcggcttcatcaccaagcaccccctgctgagcagattcgcctgccacgtgttcgtgagccaggagagcatgagacccgtggcccagagcgtgggcagagccttcctggagtactaccaggagcacctggcctacgcctgccccaccgaggacatctacctggagtga

SEQ ID NO: 7890 - RNA, 933 nt, synthetic construct
  misc_feature 1..933: note = derived and/or modified sequence opt5 fromc-Jun__Homo_sapiens__BAG57050
  source 1..933: mol_type = other RNA
atggccgacagagctgagatgttcagcctgtccacctttcactctctcagccctcccggctgccggccgccccaggatatctccctggaagagttcgacgatgaagacctttctgagattacagatgactgtgggctgggactcagctacgattccgaccattgcgaaaaggattctctgagccttggccgctccgagcaacctcaccccatctgtagctttcaggacgatttccaggagtttgaaatgattgacgtgaacggggaggaaagagagcagacgcatcgggccgtcttccgctttatccctagacaccccgatgagctggaactcgacgttgacgatcctgtgctggtggaggcggaagaggacgatttctggtttcggggattcaatatgcgcaccggcgaaagaggggtctttccggctttctatgcccatgccgtgcccggacctgctaaagacctgctcggctctaagcggtccccctgctgggttgagcgctttgatgtgcaattcctgggcagcgtcgaggtgccttgtcaccaggggaacggcattctttgcgccgctatgcagaaaatcgccacagcgagaaagctgaccgttcacctccggcccccggcctcttgtgacctggaaatctcccttcgcggagtgaaactgagcctctctgggggaggccctgagttccagagatgctcccactttttccaaatgaagaatattagcttttgtgggtgccatccccggaactcctgttacttcggatttatcacaaagcatcctctgctgtctcgcttcgcttgccacgtctttgtgagccaggaatccatgagacccgtggcccagagcgtcggccgggctttcctcgagtattaccaggaacacctggcctatgcgtgccccaccgaggatatttaccttgagtga

SEQ ID NO: 7891 - protein, 547 aa, synthetic construct
  REGION 1..547: note = c-Jun__Homo_sapiens__B4DFU7
MADRAEMFSLSTFHSLSPPGCRPPQDISLEEFDDEDLSEITDDCGLGLSYDSDHCEKDSLSLGRSEQPHPICSFQDDFQEFEMIDDNEEEDDEDEEEEEEEEEGDGEGQEGGDPGSEAPAPGPLIPSPSVEEPHKHRPTTLRLTTLGAQDSLNNNGGFDLVRPASWQETALCSPAPEALRELPGPLPATDTGPGGAQSPVRPGCDCEGNRPAEPPAPGGTSPSSDPGIEADLRSRSSGGRGGRRSSQELSSPGSDSEDAGGARLGRMISSISETELELSSDGGSSSSGRSSHLTFSKKFLNVFVNSTSRSSSTESFGLFSCLVNGEEREQTHRAVFRFIPRHPDELELDVDDPVLVEAEEDDFWFRGFNMRTGERGVFPAFYAHAVPGPAKDLLGSKRSPCWVERFDVQFLGSVEVPCHQGNGILCAAMQKIATARKLTVHLRPPASCDLEISLRGVKLSLSGGGPEFQRCSHFFQMKNISFCGCHPRNSCYFGFITKHPLLSRFACHVFVSQESMRPVAQSVGRAFLEYYQEHLAYACPTEDIYLE

SEQ ID NO: 7892 - RNA, 1644 nt, synthetic construct
  misc_feature 1..1644: note = c-Jun__Homo_sapiens__BAG57558
  source 1..1644: mol_type = other RNA
atggcggatcgcgcggagatgttttctctctccaccttccactcgctgtcgccgccgggctgcaggcctccccaggacataagcctggaagaatttgacgacgaagatctgtctgagatcactgatgactgtggcctgggcctcagctacgactcagaccactgtgagaaggacagcctctccctggggcgctcggagcagccgcaccccatctgctccttccaggatgacttccaggagtttgagatgatcgatgacaatgaagaggaggacgatgaggacgaggaagaggaggaggaggaggaggagggagatggggaaggccaggagggaggagaccctggctcagaggcacctgcccccgggccccttatcccctccccttccgtggaggagccccacaagcaccggcccaccaccctccgtctgaccacactgggggcccaggactccctaaacaacaacggaggctttgacctggtgcgtccggcctcctggcaggagacagcgctatgctcacccgccccggaggccctcagagagctcccgggccccctccctgccacggacaccgggcccggcggggcgcagtcgccagtgcgcccgggttgcgactgcgaagggaaccggcctgcggaaccccccgcgccaggggggacttcgccctcctcagatcccggcatcgaggctgacctgagaagccgctcgagcggcggccgcgggggacgtcgcagcagccaggagctgtcctcgcccggctccgactcggaggacgcgggcggcgcgcgcctggggcgcatgatctcgtccatctcggagacggagctggagctgagcagcgatggcggaagcagcagcagcggccgctcctcgcacctcactttctccaagaagttcctcaatgtcttcgtcaacagcacatctcggtcctccagcaccgagtcctttggccttttctcctgtctggtcaacggcgaggagcgagagcagactcaccgggctgtgttcaggttcatcccgcggcatccagacgagctggagctggatgtggatgaccctgtgttggtggaggccgaggaggacgacttctggttccgtggcttcaacatgcgcacgggggagcgcggtgtgtttcctgccttctacgcccatgcggtgcccggccctgccaaggacctgctggggagtaagcggagcccctgctgggtggagcgctttgacgtgcagttcctgggctccgtggaggtgccctgccaccagggcaacggcatcctgtgtgcagccatgcagaagattgccactgcccggaaactgaccgtccacctgcgccctcctgcctcctgtgacctcgagatctctcttcggggggtcaagctgagtctgagcggaggagggcctgagttccagcgctgcagccatttcttccagatgaagaacatctccttctgcggctgccatccccgcaacagctgctatttcggcttcatcaccaaacaccccctgctgagccgcttcgcctgccacgtctttgtctcccaggagtccatgaggccggtggcgcagagtgtgggccgcgccttcctggagtactaccaagagcacctggcgtacgcctgccccacggaggacatctacctggagtag

SEQ ID NO: 7893 - RNA, 1644 nt, synthetic construct
  misc_feature 1..1644: note = derived and/or modified sequence opt1 fromc-Jun__Homo_sapiens__BAG57558
  source 1..1644: mol_type = other RNA
atggccgaccgcgccgagatgttcagcctgtccaccttccacagcctctccccgcccggctgccggccgccccaggacatcagcctggaggagttcgacgacgaggacctgtccgagatcaccgacgactgcgggctcggcctgagctacgactccgaccactgcgagaaggacagcctgtccctcgggcgcagcgagcagccccaccccatctgctccttccaggacgacttccaggagttcgagatgatcgacgacaacgaggaggaggacgacgaggacgaggaggaggaggaggaggaggaggagggcgacggggagggccaggagggcggggaccccggcagcgaggcgcccgcccccgggccgctgatcccctcccccagcgtggaggagccccacaagcaccggccgacgaccctgcgcctcaccaccctgggcgcccaggactccctgaacaacaacgggggcttcgacctcgtccggcccgccagctggcaggagacggccctgtgctcccccgcgcccgaggccctgcgcgagctcccgggccccctgcccgccaccgacaccgggcccggcggggcccagagcccggtgcggcccggctgcgactgcgagggcaaccgccccgcggagcccccggcccccgggggcacctcccccagcagcgaccccgggatcgaggccgacctgcggtcccgcagctccggcgggcggggcggccgccggagctcccaggagctcagctccccggggagcgactccgaggacgccggcggggcccgcctgggccggatgatcagctccatcagcgagacggagctggagctctccagcgacgggggctccagctccagcggccgctccagccacctgaccttcagcaagaagttcctgaacgtgttcgtcaactccaccagccggtccagctccaccgagagcttcgggctgttctcctgcctggtgaacggcgaggagcgcgagcagacgcaccgggcggtgttccgcttcatcccccggcaccccgacgagctggagctcgacgtcgacgacccggtgctggtggaggccgaggaggacgacttctggttccgcgggttcaacatgcgcaccggcgagcgcggggtcttccccgccttctacgcccacgccgtgcccggccccgcgaaggacctgctcggcagcaagcggtccccgtgctgggtggagcggttcgacgtccagttcctggggagcgtggaggtgccctgccaccagggcaacgggatcctgtgcgccgccatgcagaagatcgccaccgcccgcaagctcaccgtccacctccggccgcccgcgtcctgcgacctggagatcagcctccgcggcgtgaagctgtccctgagcggcgggggccccgagttccagcggtgctcccacttcttccagatgaagaacatcagcttctgcgggtgccacccccgcaactcctgctacttcggcttcatcacgaagcaccccctcctgagccggttcgcctgccacgtgttcgtcagccaggagtccatgcgccccgtggcccagagcgtggggcgggccttcctggagtactaccaggagcacctcgcctacgcgtgcccgaccgaggacatctacctggagtga

SEQ ID NO: 7894 - RNA, 1644 nt, synthetic construct
  misc_feature 1..1644: note = derived and/or modified sequence opt2 fromc-Jun__Homo_sapiens__BAG57558
  source 1..1644: mol_type = other RNA
atggccgaccgcgccgagatgttctccctctccaccttccactccctctccccccccggctgccgccccccccaggacatctccctcgaggagttcgacgacgaggacctctccgagatcaccgacgactgcggcctcggcctctcctacgactccgaccactgcgagaaggactccctctccctcggccgctccgagcagccccaccccatctgctccttccaggacgacttccaggagttcgagatgatcgacgacaacgaggaggaggacgacgaggacgaggaggaggaggaggaggaggaggagggcgacggcgagggccaggagggcggcgaccccggctccgaggcccccgcccccggccccctcatcccctccccctccgtcgaggagccccacaagcaccgccccaccaccctccgcctcaccaccctcggcgcccaggactccctcaacaacaacggcggcttcgacctcgtccgccccgcctcctggcaggagaccgccctctgctcccccgcccccgaggccctccgcgagctccccggccccctccccgccaccgacaccggccccggcggcgcccagtcccccgtccgccccggctgcgactgcgagggcaaccgccccgccgagccccccgcccccggcggcacctccccctcctccgaccccggcatcgaggccgacctccgctcccgctcctccggcggccgcggcggccgccgctcctcccaggagctctcctcccccggctccgactccgaggacgccggcggcgcccgcctcggccgcatgatctcctccatctccgagaccgagctcgagctctcctccgacggcggctcctcctcctccggccgctcctcccacctcaccttctccaagaagttcctcaacgtcttcgtcaactccacctcccgctcctcctccaccgagtccttcggcctcttctcctgcctcgtcaacggcgaggagcgcgagcagacccaccgcgccgtcttccgcttcatcccccgccaccccgacgagctcgagctcgacgtcgacgaccccgtcctcgtcgaggccgaggaggacgacttctggttccgcggcttcaacatgcgcaccggcgagcgcggcgtcttccccgccttctacgcccacgccgtccccggccccgccaaggacctcctcggctccaagcgctccccctgctgggtcgagcgcttcgacgtccagttcctcggctccgtcgaggtcccctgccaccagggcaacggcatcctctgcgccgccatgcagaagatcgccaccgcccgcaagctcaccgtccacctccgcccccccgcctcctgcgacctcgagatctccctccgcggcgtcaagctctccctctccggcggcggccccgagttccagcgctgctcccacttcttccagatgaagaacatctccttctgcggctgccacccccgcaactcctgctacttcggcttcatcaccaagcaccccctcctctcccgcttcgcctgccacgtcttcgtctcccaggagtccatgcgccccgtcgcccagtccgtcggccgcgccttcctcgagtactaccaggagcacctcgcctacgcctgccccaccgaggacatctacctcgagtga

SEQ ID NO: 7895 - RNA, 1644 nt, synthetic construct
  misc_feature 1..1644: note = derived and/or modified sequence opt3 fromc-Jun__Homo_sapiens__BAG57558
  source 1..1644: mol_type = other RNA
atggccgacagagctgagatgttcagcctgtccacctttcactctctctcaccccctggctgcaggccaccgcaggatatcagtcttgaagagttcgacgatgaagacctgagcgagattacagatgactgtgggttgggattatcctacgattctgaccattgcgaaaaggattcgctgtcactaggtcggagcgagcaaccccaccctatatgtagttttcaggacgatttccaggagtttgaaatgatcgacgataacgaggaagaggacgacgaggatgaagaggaagaggaagaggaggaagagggcgacggggaaggacaggagggcggtgatccagggtccgaagcacccgcccctggaccactcattccctctcctagcgtggaggagccacataaacaccgcccgactacgctgcgacttaccacactgggcgcgcaagactccttgaataacaatggcgggttcgatctcgtccgtcccgcttcatggcaggaaactgccctgtgcagtcctgcaccagaggccctgagagaactccccggacctttaccagctaccgacacaggtcccggcggggcacagagcccggttaggcctggatgtgattgcgagggcaaccggcccgccgaaccccctgctcccggtgggacctctccatcctcagaccccggaatcgaggccgatctgcgcagcagaagttctggcggcaggggaggacggcgctccagccaggagctttcgtctcctggttccgactcagaagatgcgggcggggcacgattgggaagaatgattagtagcatctccgagactgaactggagctatctagcgacggcggttcaagttccagcgggaggtcttcacatctcacatttagtaagaaattcctgaatgtgtttgtaaacagcacctcccggtcttcgagcacggagtccttcggcctgttttcatgtcttgtgaatggagaggaacgtgaacaaactcaccgcgccgtcttcagatttataccaaggcacccggacgagttggaactcgatgtggacgatcccgttctggtggaggctgaggaagacgatttctggttccggggctttaacatgcgaaccggggagcgcggagtcttccctgccttttatgcacatgctgtgccaggtcccgccaaggacttactgggcagtaaaagatctccttgctgggtagaaaggttcgatgttcagtttctcgggagcgtggaggtcccatgtcaccagggaaatggcatcctttgcgcggccatgcagaagattgcaacagctcggaagctgactgtgcatttgcgcccaccggcctcctgtgacctagaaatctcactgagaggtgtgaaactcagcctgtctgggggcggacctgagttccaaaggtgctcccactttttccagatgaagaacattagtttttgcggctgtcacccacgtaatagctgctacttcgggtttatcaccaaacatccccttctgtctcggttcgcttgtcacgtctttgtttcccaggagtcaatgcgacctgtggcccaaagtgtagggagagcattcttggaatattaccaggagcatctcgcctatgcttgccccacagaagatatatacctggagtga

SEQ ID NO: 7896 - RNA, 1644 nt, synthetic construct
  misc_feature 1..1644: note = derived and/or modified sequence opt4 fromc-Jun__Homo_sapiens__BAG57558
  source 1..1644: mol_type = other RNA
atggccgacagagccgagatgttcagcctgagcaccttccacagcctgagcccccccggctgcagacccccccaggacatcagcctggaggagttcgacgacgaggacctgagcgagatcaccgacgactgcggcctgggcctgagctacgacagcgaccactgcgagaaggacagcctgagcctgggcagaagcgagcagccccaccccatctgcagcttccaggacgacttccaggagttcgagatgatcgacgacaacgaggaggaggacgacgaggacgaggaggaggaggaggaggaggaggagggcgacggcgagggccaggagggcggcgaccccggcagcgaggcccccgcccccggccccctgatccccagccccagcgtggaggagccccacaagcacagacccaccaccctgagactgaccaccctgggcgcccaggacagcctgaacaacaacggcggcttcgacctggtgagacccgccagctggcaggagaccgccctgtgcagccccgcccccgaggccctgagagagctgcccggccccctgcccgccaccgacaccggccccggcggcgcccagagccccgtgagacccggctgcgactgcgagggcaacagacccgccgagccccccgcccccggcggcaccagccccagcagcgaccccggcatcgaggccgacctgagaagcagaagcagcggcggcagaggcggcagaagaagcagccaggagctgagcagccccggcagcgacagcgaggacgccggcggcgccagactgggcagaatgatcagcagcatcagcgagaccgagctggagctgagcagcgacggcggcagcagcagcagcggcagaagcagccacctgaccttcagcaagaagttcctgaacgtgttcgtgaacagcaccagcagaagcagcagcaccgagagcttcggcctgttcagctgcctggtgaacggcgaggagagagagcagacccacagagccgtgttcagattcatccccagacaccccgacgagctggagctggacgtggacgaccccgtgctggtggaggccgaggaggacgacttctggttcagaggcttcaacatgagaaccggcgagagaggcgtgttccccgccttctacgcccacgccgtgcccggccccgccaaggacctgctgggcagcaagagaagcccctgctgggtggagagattcgacgtgcagttcctgggcagcgtggaggtgccctgccaccagggcaacggcatcctgtgcgccgccatgcagaagatcgccaccgccagaaagctgaccgtgcacctgagaccccccgccagctgcgacctggagatcagcctgagaggcgtgaagctgagcctgagcggcggcggccccgagttccagagatgcagccacttcttccagatgaagaacatcagcttctgcggctgccaccccagaaacagctgctacttcggcttcatcaccaagcaccccctgctgagcagattcgcctgccacgtgttcgtgagccaggagagcatgagacccgtggcccagagcgtgggcagagccttcctggagtactaccaggagcacctggcctacgcctgccccaccgaggacatctacctggagtga

SEQ ID NO: 7897 - RNA, 1644 nt, synthetic construct
  misc_feature 1..1644: note = derived and/or modified sequence opt5 fromc-Jun__Homo_sapiens__BAG57558
  source 1..1644: mol_type = other RNA
atggccgacagagctgagatgttcagcctgtccacctttcactctctcagccctcccggctgccggccgccccaggatatctccctggaagagttcgacgatgaagacctttctgagattacagatgactgtgggctgggactcagctacgattccgaccattgcgaaaaggattctctgagccttggccgctccgagcaacctcaccccatctgtagctttcaggacgatttccaggagtttgaaatgattgacgataacgaggaagaggacgacgaggatgaagaggaagaggaagaggaggaagagggggacggagaaggccaggaagggggagatcctggctctgaggcccccgcgcctggcccgctgatcccctcccctagcgtggaggagccccataaacacagacctacgaccctccggctgacaaccctgggggctcaagactctctcaataacaatggaggcttcgatctggtccgccccgcctcctggcaggaaacagccctttgcagcccggctcctgaggccctgagagaactccccgggcctctgcccgctaccgacacaggacccggcggggcccagtctcctgttcggccgggatgtgattgcgagggcaaccgccccgcggaacctcccgcccctggcgggacctcccccagctccgacccgggaattgaggctgatcttagatctcggagctccggcgggcgcggaggcagacggagctctcaggagctgtccagccctgggtctgacagcgaagatgccggaggcgctcgcctcggcagaatgatctcctctatcagcgagacggaactggagctgtccagcgacgggggatcttccagctctggccggtccagccatctcaccttttccaagaaattcctgaatgtgtttgtgaactctacaagccgctcctctagcaccgagtccttcgggctttttagctgtctggtcaatggagaagagagagaacaaacacaccgggccgtgttcagatttattccccgccaccctgacgagctcgaactggatgttgacgatcccgtgcttgtcgaggcggaggaagacgatttctggttccggggctttaacatgagaaccggggagcgcggcgtgttccctgccttttatgctcatgccgttcccggaccggctaaggacctgctcggctctaaacggtccccttgctgggtggaaagattcgatgtccagtttctggggagcgtggaggtgccctgtcaccagggaaatggcatcctgtgcgccgccatgcagaagattgctacggcgcgcaagctcacagtccatctgcggccccctgcctcttgtgaccttgaaatctccctgagaggggttaaactcagcctgtctggaggcgggccggagttccaacgctgcagccactttttccagatgaagaacatttccttttgcggctgtcacccccggaatagctgctacttcggatttatcaccaaacatcctcttctgtctagattcgcttgtcacgtgtttgtgtcccaggagagcatgcgccccgtcgcccaatccgtgggccgggccttcctcgaatattaccaggagcatctggcttatgcctgccctacagaagatatttacctggagtga

SEQ ID NO: 7898 - protein, 176 aa, synthetic construct
  REGION 1..176: note = c-Jun__Homo_sapiens__B4DGE1
MPAPIRLRELIRTIRTARTQAEEREMIQKECAAIRSSFREEDNTYRCRNVAKLLYMHMLGYPAHFGQLECLKLIASQKFTDKRIGYLGAMLLLDERQDVHLLMTNCIKNDLNHSTQFVQGLALCTLGCMGSSEMCRDLAGEVEKLLKTSNSYLRKKEMIYKQTNVTGYILGGIPNS

SEQ ID NO: 7899 - RNA, 531 nt, synthetic construct
  misc_feature 1..531: note = c-Jun__Homo_sapiens__BAG57752
  source 1..531: mol_type = other RNA
atgccagcccccatcagattgcgggagctgatccggaccatccggacagcccgaacccaagctgaagaacgagaaatgatccagaaagaatgtgctgcaatccggtcatcttttagagaagaagacaatacataccgatgtcggaatgtggcaaaattactgtatatgcacatgctgggctaccctgctcactttggacagttggagtgcctcaagcttattgcctctcaaaaatttacagacaaacgcattggctatttaggggcaatgctgctgttagatgaaagacaagatgtccatcttctcatgaccaactgtatcaagaatgatcttaatcatagcacgcaattcgtacaggggttagcactttgtaccctcggctgcatgggctcctcagagatgtgcagagatcttgcaggagaggtagagaagctcctgaaaacctccaactcttacttaagaaaaaaggaaatgatttataaacaaacaaatgttactggatatatcctaggtggcataccaaattcctaa

SEQ ID NO: 7900 - RNA, 531 nt, synthetic construct
  misc_feature 1..531: note = derived and/or modified sequence opt1 fromc-Jun__Homo_sapiens__BAG57752
  source 1..531: mol_type = other RNA
atgcccgccccgatccgcctgcgggagctcatccgcaccatccggaccgcccgcacgcaggcggaggagcgggagatgatccagaaggagtgcgccgccatccgcagctccttccgggaggaggacaacacctaccgctgccggaacgtggccaagctgctgtacatgcacatgctcggctaccccgcccacttcgggcagctggagtgcctgaagctcatcgcgagccagaagttcaccgacaagcgcatcggctacctgggggccatgctgctcctggacgagcggcaggacgtccacctcctgatgaccaactgcatcaagaacgacctgaaccactccacgcagttcgtgcagggcctggccctctgcaccctggggtgcatgggcagctccgagatgtgccgcgacctggccggcgaggtggagaagctcctgaagaccagcaactcctacctgcggaagaaggagatgatctacaagcagaccaacgtcacggggtacatcctcggcgggatccccaacagctga

SEQ ID NO: 7901 - RNA, 531 nt, synthetic construct
  misc_feature 1..531: note = derived and/or modified sequence opt2 fromc-Jun__Homo_sapiens__BAG57752
  source 1..531: mol_type = other RNA
atgcccgcccccatccgcctccgcgagctcatccgcaccatccgcaccgcccgcacccaggccgaggagcgcgagatgatccagaaggagtgcgccgccatccgctcctccttccgcgaggaggacaacacctaccgctgccgcaacgtcgccaagctcctctacatgcacatgctcggctaccccgcccacttcggccagctcgagtgcctcaagctcatcgcctcccagaagttcaccgacaagcgcatcggctacctcggcgccatgctcctcctcgacgagcgccaggacgtccacctcctcatgaccaactgcatcaagaacgacctcaaccactccacccagttcgtccagggcctcgccctctgcaccctcggctgcatgggctcctccgagatgtgccgcgacctcgccggcgaggtcgagaagctcctcaagacctccaactcctacctccgcaagaaggagatgatctacaagcagaccaacgtcaccggctacatcctcggcggcatccccaactcctga

SEQ ID NO: 7902 - RNA, 531 nt, synthetic construct
  misc_feature 1..531: note = derived and/or modified sequence opt3 fromc-Jun__Homo_sapiens__BAG57752
  source 1..531: mol_type = other RNA
atgccggcccctatcagactgagggagctcattcggaccatacgcacagctcgaactcaggcagaggaacgtgaaatgatccaaaaggagtgcgccgcgattagaagctccttcagggaagaggacaacacgtaccggtgtcgcaatgtggctaaacttctgtatatgcacatgttgggatacccagcccattttgggcagttagagtgcctgaagctaatcgcatctcagaaattcaccgataagagaattggatatctcggtgccatgctgcttctggacgaaaggcaggatgtccacttgctcatgacaaactgtatcaaaaatgacctgaaccattcaactcaatttgttcagggcctggctctctgcaccttagggtgtatgggaagtagcgagatgtgccgggatctggcaggcgaagtggagaaacttttgaagacatccaattcttacctgcgcaagaaggagatgatatataaacagaccaacgtaactggttacatcctagggggcattcccaattcgtga

SEQ ID NO: 7903 - RNA, 531 nt, synthetic construct
  misc_feature 1..531: note = derived and/or modified sequence opt4 fromc-Jun__Homo_sapiens__BAG57752
  source 1..531: mol_type = other RNA
atgcccgcccccatcagactgagagagctgatcagaaccatcagaaccgccagaacccaggccgaggagagagagatgatccagaaggagtgcgccgccatcagaagcagcttcagagaggaggacaacacctacagatgcagaaacgtggccaagctgctgtacatgcacatgctgggctaccccgcccacttcggccagctggagtgcctgaagctgatcgccagccagaagttcaccgacaagagaatcggctacctgggcgccatgctgctgctggacgagagacaggacgtgcacctgctgatgaccaactgcatcaagaacgacctgaaccacagcacccagttcgtgcagggcctggccctgtgcaccctgggctgcatgggcagcagcgagatgtgcagagacctggccggcgaggtggagaagctgctgaagaccagcaacagctacctgagaaagaaggagatgatctacaagcagaccaacgtgaccggctacatcctgggcggcatccccaacagctga

SEQ ID NO: 7904 - RNA, 531 nt, synthetic construct
  misc_feature 1..531: note = derived and/or modified sequence opt5 fromc-Jun__Homo_sapiens__BAG57752
  source 1..531: mol_type = other RNA
atgcccgcccctatcagactgcgggagctcattcgcaccatcagaacagctcggacgcaggccgaggaacgcgaaatgattcaaaaggagtgcgcggctatcagaagctccttccgggaagaggacaacacctaccgctgtagaaatgtggccaaactgctttatatgcacatgctgggctacccggcccattttgggcagctcgagtgcctgaaacttattgcttctcagaagttcacagataagcggatcggatatctgggcgccatgctcctgctggacgaacgccaggatgtccacctcctgatgaccaactgtatcaaaaatgaccttaaccatagcacacaatttgttcaggggctggctctctgcaccctgggatgtatgggctcctctgagatgtgcagagatcttgccggggaagtggagaagctgctcaagacaagcaattcctacctgcggaaaaaggagatgatttataaacagaccaacgtgacgggatacatcctgggcggcattcccaattcttga

SEQ ID NO: 7905 - protein, 467 aa, synthetic construct
  REGION 1..467: note = c-Jun__Homo_sapiens__B4DJ64
MAPPGGPPAAPPGGRGHSHRDRIHYQADVRLEATEEIYLTPVQRPPDAAEPTSAFLPPTESRMSVSSDPDPAAYPSTAGRPHPSISEEEEGFDCLSSPERAEPPGGGWRGSLGEPPPPPRASLSSDTSALSYDSVKYTLVVDEHAQLELVSLRPCFGDYSDESDSATVYDNCASVSSPYESAIGEEYEEAPRPQPPACLSEDSTPDEPDVHFSKKFLNVFMSGRSRSSSAESFGLFSCIINGEEQEQTHRAIFRFVPRHEDELELEVDDPLLVELQAEDYWYEAYNMRTGARGVFPAYYAIEVTKEPEHMAALAKNSDWVDQFRVKFLGSVQVPYHKGNDVLCAAMQKIATTRRLTVHFNPPSSCVLEISVRGVKIGVKADDSQEAKGNKCSHFFQLKNISFCGYHPKNNKYFGFITKHPADHRFACHVFVSEDSTKALAESVGRAFQQFYKQFVEYTCPTEDIYLE

SEQ ID NO: 7906 - RNA, 1404 nt, synthetic construct
  misc_feature 1..1404: note = c-Jun__Homo_sapiens__BAG58726
  source 1..1404: mol_type = other RNA
atggcacctccgggtggtccccctgctgccccgcctgggggtcggggccactcgcatcgagaccgaatccactaccaggccgatgtgcgactagaggccactgaggagatctacctgaccccagtgcagaggcccccagacgctgcagagcccacctccgccttcctgccgcccactgagagccggatgtcagtcagctccgatccagaccctgccgcctacccctccacggcagggcggccgcacccctccatcagtgaagaggaagagggcttcgactgcctgtcgtccccagagcgggctgagcccccaggcggagggtggcgggggagcctgggggagccgccgccacctccacgggcctctctgagctcggacaccagcgccctgtcctatgactctgtcaagtacacgctggtggtagatgagcatgcacagctggagctggtgagcctgcggccgtgcttcggagactacagtgacgagagtgactctgccaccgtctatgacaactgtgcctccgtctcctcgccctatgagtcggccatcggagaggaatatgaggaggccccgcggccccagccccctgcctgcctctccgaggactccacgcctgatgaacccgacgtccatttctccaagaaattcctgaacgtcttcatgagtggccgctcccgctcctccagtgctgagtccttcgggctgttctcctgcatcatcaacggggaggagcaggagcagacccaccgggccatattcaggtttgtgcctcgacacgaagacgaacttgagctggaagtggatgaccctctgctagtggagctccaggctgaagactactggtacgaggcctacaacatgcgcactggtgcccggggtgtctttcctgcctattacgccatcgaggtcaccaaggagcccgagcacatggcagccctggccaaaaacagtgactgggtggaccagttccgggtgaagttcctgggctcagtccaggttccctatcacaagggcaatgacgtcctctgtgctgctatgcaaaagattgccaccacccgccggctcaccgtgcactttaacccgccctccagctgtgtcctggagatcagcgtgcggggtgtgaagataggcgtcaaggccgatgactcccaggaggccaaggggaataaatgtagccactttttccagttaaaaaacatctctttctgcggatatcatccaaagaacaacaagtactttgggttcatcaccaagcaccccgccgaccaccggtttgcctgccacgtctttgtgtctgaagactccaccaaagccctggcagagtccgtggggagagcattccagcagttctacaagcagtttgtggagtacacctgccccacagaagatatctacctggagtag

SEQ ID NO: 7907 - RNA, 1404 nt, synthetic construct
  misc_feature 1..1404: note = derived and/or modified sequence opt1 fromc-Jun__Homo_sapiens__BAG58726
  source 1..1404: mol_type = other RNA
atggccccgcccggcgggccgcccgccgcgccgcccggcgggcgcggccacagccaccgggaccgcatccactaccaggccgacgtgcggctggaggccaccgaggagatctacctcacccccgtccagcgcccgcccgacgccgccgagcccacgtccgcgttcctgccgcccaccgagagccggatgtccgtgagctccgaccccgaccccgccgcctaccccagcaccgccgggcgcccccacccctccatcagcgaggaggaggagggcttcgactgcctgtccagccccgagcgggcggagccgcccggcgggggctggcgcgggtccctcggcgagcccccgcccccgccccgggccagcctgtccagcgacacctccgccctgagctacgactccgtgaagtacacgctcgtcgtggacgagcacgcccagctggagctggtgagcctccgcccctgcttcggggactactccgacgagagcgacagcgccaccgtctacgacaactgcgcgtccgtgagctccccctacgagagcgccatcggcgaggagtacgaggaggcgccccggccccagccgcccgcctgcctgtccgaggacagcacccccgacgagcccgacgtgcacttctccaagaagttcctgaacgtcttcatgagcggccgctcccggagctccagcgccgagtccttcggcctcttcagctgcatcatcaacggggaggagcaggagcagacccaccgcgccatcttccggttcgtgccccgccacgaggacgagctggagctggaggtggacgaccccctcctggtcgagctgcaggccgaggactactggtacgaggcctacaacatgcggacgggggcccgcggcgtgttccccgcctactacgcgatcgaggtgaccaaggagccggagcacatggccgccctcgccaagaactccgactgggtcgaccagttccgggtgaagttcctgggcagcgtgcaggtcccctaccacaaggggaacgacgtgctgtgcgccgcgatgcagaagatcgccaccacccgccggctcacggtgcacttcaacccgccctccagctgcgtcctggagatctccgtgcgcggcgtgaagatcggggtcaaggccgacgacagccaggaggccaagggcaacaagtgcagccacttcttccagctgaagaacatctccttctgcgggtaccaccccaagaacaacaagtacttcggcttcatcaccaagcaccccgcggaccaccgcttcgcctgccacgtgttcgtcagcgaggactccaccaaggccctcgccgagagcgtgggccgggccttccagcagttctacaagcagttcgtggagtacacgtgccccaccgaggacatctacctggagtga

SEQ ID NO: 7908 - RNA, 1404 nt, synthetic construct
  misc_feature 1..1404: note = derived and/or modified sequence opt2 fromc-Jun__Homo_sapiens__BAG58726
  source 1..1404: mol_type = other RNA
atggccccccccggcggcccccccgccgccccccccggcggccgcggccactcccaccgcgaccgcatccactaccaggccgacgtccgcctcgaggccaccgaggagatctacctcacccccgtccagcgcccccccgacgccgccgagcccacctccgccttcctcccccccaccgagtcccgcatgtccgtctcctccgaccccgaccccgccgcctacccctccaccgccggccgcccccacccctccatctccgaggaggaggagggcttcgactgcctctcctcccccgagcgcgccgagccccccggcggcggctggcgcggctccctcggcgagccccccccccccccccgcgcctccctctcctccgacacctccgccctctcctacgactccgtcaagtacaccctcgtcgtcgacgagcacgcccagctcgagctcgtctccctccgcccctgcttcggcgactactccgacgagtccgactccgccaccgtctacgacaactgcgcctccgtctcctccccctacgagtccgccatcggcgaggagtacgaggaggccccccgcccccagccccccgcctgcctctccgaggactccacccccgacgagcccgacgtccacttctccaagaagttcctcaacgtcttcatgtccggccgctcccgctcctcctccgccgagtccttcggcctcttctcctgcatcatcaacggcgaggagcaggagcagacccaccgcgccatcttccgcttcgtcccccgccacgaggacgagctcgagctcgaggtcgacgaccccctcctcgtcgagctccaggccgaggactactggtacgaggcctacaacatgcgcaccggcgcccgcggcgtcttccccgcctactacgccatcgaggtcaccaaggagcccgagcacatggccgccctcgccaagaactccgactgggtcgaccagttccgcgtcaagttcctcggctccgtccaggtcccctaccacaagggcaacgacgtcctctgcgccgccatgcagaagatcgccaccacccgccgcctcaccgtccacttcaaccccccctcctcctgcgtcctcgagatctccgtccgcggcgtcaagatcggcgtcaaggccgacgactcccaggaggccaagggcaacaagtgctcccacttcttccagctcaagaacatctccttctgcggctaccaccccaagaacaacaagtacttcggcttcatcaccaagcaccccgccgaccaccgcttcgcctgccacgtcttcgtctccgaggactccaccaaggccctcgccgagtccgtcggccgcgccttccagcagttctacaagcagttcgtcgagtacacctgccccaccgaggacatctacctcgagtga

SEQ ID NO: 7909 - RNA, 1404 nt, synthetic construct
  misc_feature 1..1404: note = derived and/or modified sequence opt3 fromc-Jun__Homo_sapiens__BAG58726
  source 1..1404: mol_type = other RNA
atggctccccctggcgggccaccggccgcaccccctggaggtagaggccacagccatagggaccggatccactaccaggccgatgtgcgcctggaggcgaccgaagagatttatctcacaccagtccaacgaccccctgacgctgccgaaccaacttccgcattccttccccctacggagtctcgtatgtcagttagtagcgatccagacccggccgcttacccctccaccgcagggagacctcatccatctatatcggaagaggaggaaggatttgattgcctgtcaagccccgagagggccgaacctccaggcggtgggtggcggggaagtttgggcgagcccccgcctcccccacgcgcttccttatctagcgacacatccgccctgtcatatgatagtgtgaagtacactctagtagtggacgagcacgcgcagctcgaactggtcagccttagaccttgtttcggcgattattctgacgagtccgattcagcaaccgtgtacgacaactgcgccagcgttagttctccctatgaatccgctatcggggaggaatacgaggaggccccaaggccccagcctccagcatgtctgagcgaagattcgacaccggacgagcccgacgtgcatttttctaaaaagttcttgaatgtctttatgtccggacggtcacgcagtagctccgctgaatctttcggtctctttagctgcattatcaacggcgaggaacaggagcaaacccaccgagccattttcagatttgtgcctaggcacgaggatgaactggagctggaagtagacgatccactcttagttgagctgcaggcggaagactactggtatgaggcctacaatatgcggactggggcacgtggagtgttccccgcttattacgccatcgaggtcacaaaagaacctgagcatatggctgcccttgcaaagaactcagattgggtggaccagtttcgcgtgaaattcttgggcagtgtccaggttccatatcacaagggtaatgatgtgctgtgtgccgctatgcaaaagatagcgaccacgagaaggctaactgtacattttaatcccccgtccagctgcgtgctcgaaatctctgtccgaggggtgaaaattggagttaaggcagacgattcacaggaggccaaaggcaacaagtgtagtcacttcttccagctgaaaaacatcagcttttgcggctaccaccctaagaataacaagtatttcgggtttattaccaaacatccagctgaccaccggttcgcctgtcatgtgtttgtctccgaggattctacaaaggcacttgccgaatcggtgggacgcgctttccagcaattttacaaacagttcgtagagtacacttgccccaccgaagacatctatctggagtga

SEQ ID NO: 7910 - RNA, 1404 nt, synthetic construct
  misc_feature 1..1404: note = derived and/or modified sequence opt4 fromc-Jun__Homo_sapiens__BAG58726
  source 1..1404: mol_type = other RNA
atggccccccccggcggcccccccgccgccccccccggcggcagaggccacagccacagagacagaatccactaccaggccgacgtgagactggaggccaccgaggagatctacctgacccccgtgcagagaccccccgacgccgccgagcccaccagcgccttcctgccccccaccgagagcagaatgagcgtgagcagcgaccccgaccccgccgcctaccccagcaccgccggcagaccccaccccagcatcagcgaggaggaggagggcttcgactgcctgagcagccccgagagagccgagccccccggcggcggctggagaggcagcctgggcgagcccccccccccccccagagccagcctgagcagcgacaccagcgccctgagctacgacagcgtgaagtacaccctggtggtggacgagcacgcccagctggagctggtgagcctgagaccctgcttcggcgactacagcgacgagagcgacagcgccaccgtgtacgacaactgcgccagcgtgagcagcccctacgagagcgccatcggcgaggagtacgaggaggcccccagaccccagccccccgcctgcctgagcgaggacagcacccccgacgagcccgacgtgcacttcagcaagaagttcctgaacgtgttcatgagcggcagaagcagaagcagcagcgccgagagcttcggcctgttcagctgcatcatcaacggcgaggagcaggagcagacccacagagccatcttcagattcgtgcccagacacgaggacgagctggagctggaggtggacgaccccctgctggtggagctgcaggccgaggactactggtacgaggcctacaacatgagaaccggcgccagaggcgtgttccccgcctactacgccatcgaggtgaccaaggagcccgagcacatggccgccctggccaagaacagcgactgggtggaccagttcagagtgaagttcctgggcagcgtgcaggtgccctaccacaagggcaacgacgtgctgtgcgccgccatgcagaagatcgccaccaccagaagactgaccgtgcacttcaacccccccagcagctgcgtgctggagatcagcgtgagaggcgtgaagatcggcgtgaaggccgacgacagccaggaggccaagggcaacaagtgcagccacttcttccagctgaagaacatcagcttctgcggctaccaccccaagaacaacaagtacttcggcttcatcaccaagcaccccgccgaccacagattcgcctgccacgtgttcgtgagcgaggacagcaccaaggccctggccgagagcgtgggcagagccttccagcagttctacaagcagttcgtggagtacacctgccccaccgaggacatctacctggagtga

SEQ ID NO: 7911 - RNA, 1404 nt, synthetic construct
  misc_feature 1..1404: note = derived and/or modified sequence opt5 fromc-Jun__Homo_sapiens__BAG58726
  source 1..1404: mol_type = other RNA
atggctccccctggcgggccgcccgccgcccctcccggaggcagagggcacagccatcgggaccgcatccactaccaggcggatgtgagactggaggctaccgaagagatttatctcacacctgtccaacggccccctgacgccgccgaaccgacgtccgctttcctgccccctaccgagtctcgcatgagcgtttcctctgatcccgaccctgccgcttaccccagcacagccggaagaccgcatccttccatctctgaagaggaggaaggctttgattgccttagctcccccgagcgggcggaacctcccgggggaggctggcgcggcagcctgggggagccccctccgccccctagagcctctctctccagcgacacctctgctctgtcctatgatagcgtgaagtacacacttgtggtcgacgagcacgcccagctggaactcgtgtctctgcggccctgtttcggagattattccgacgagagcgattccgctaccgtttacgacaactgcgcctctgtgagctccccttatgaaagcgcgattggcgaggaatacgaggaggctccccgcccgcagcctcccgcctgtctgtctgaagattccacacctgacgagcccgacgtccattttagcaaaaagttcctcaatgtgtttatgtctgggagaagccggtcctctagcgccgaatccttcggactgtttagctgcatcattaacggcgaggaacaggagcaaacccaccgcgctatcttcagatttgttcctcggcacgaggatgaacttgagctggaagtggacgatcccctcctggtcgagcttcaggccgaagactactggtatgaggcctacaatatgcgcacgggggctagaggagtgttcccggcgtattacgccatcgaggtgaccaaagaacctgagcatatggctgccctggccaagaactctgattgggtcgaccagtttcgggttaaattcctcggctccgtccaggtgccctatcacaagggcaatgatgtgctgtgtgctgccatgcaaaagattgcgacaaccagacgcctgacagtgcattttaatccccctagctcttgcgttctcgaaatctccgtgagaggggtcaaaattggagtgaaggctgacgatagccaggaggccaaaggcaacaagtgttcccacttcttccagctgaaaaacatctctttttgcgggtaccacccgaagaataacaagtatttcggatttattaccaaacatcccgccgaccaccggttcgcttgtcatgtttttgtgagcgaggattccacgaaggcccttgctgaatctgtcggccgcgccttccagcaattttacaaacagttcgtggagtacacatgccctaccgaagacatctatctggagtga

SEQ ID NO: 7912 - protein, 921 aa, synthetic construct [sequence omitted]

SEQ ID NO: 7913 - RNA, 2766 nt, synthetic construct
  misc_feature 1..2766: note = c-Jun__Homo_sapiens__BAG61498
  source 1..2766: mol_type = other RNA
atggttatgaggtggggagaacggaatgacgtcatcgcttgggagctgctgcaggatggagtggaaaccaaaaatgctttgaacatagtgaagaatgatttgatagcaaaagtggatgaactgacctgtgagaaagatgtgctgcaaggggaattggaggctgtgaagcaagccaaactgaaactagaggaaaagaacagagaattggaggaagagcttaggaaagctcgggcagaaactgaagatgcaaggcaaaaagcaaaagatgacgatgatagtgatattcccacagcccagaggaagcggtttactagagtagaaatggcccgtgttctcatggagcgaaaccagtataaagagagattgatggagcttcaggaagctgttcgatggacagagatgattcgggcatcacgagaaaatccagccatgcaggaaaaaaaaaggtcaagcatttggcagtttttcagccgacttttcagctcctcaagtaacacgactaagaagcctgaaccacctgttaatctgaagtacaatgcacccacgtctcatgttactccgtccgtcaagaaaagaagcagcaccttatctcagctccctggggataagtccaaagcctttgatttccttagtgaagaaactgaagctagtttagcctcacgcagagaacaaaagagagagcagtatcgtcaggtaaaagcacatgttcagaaggaagacggtagagtgcaggcttttggctggagtctgcctcagaagtacaaacaggtaaccaatggtcaaggcgaaaataagatgaaaaatttacctgtgcctgtctatctcagacctctggatgaaaaagatacatcaatgaagctgtggtgtgctgttggagtcaatttatctggtgggaagaccagagatggtggttctgttgttggagcaagtgtattttacaaggatgttgctggtttggatacagaaggcagtaaacagcgaagtgcctctcagagtagtttagataagttagatcaggaacttaaggaacagcagaaggagttaaaaaatcaagaagaattatccagtctagtttggatctgtaccagcactcattcggctacaaaagttcttattattgatgctgttcaacctggcaacatcctagacagtttcactgtttgcaactctcatgttctgtgcattgcaagtgtgccaggtgcacgagaaacagactaccctgcaggagaagatctttcagaatctggtcaggtagacaaagcatctttatgtggaagtatgacaagcaacagctcagcagagacagacagcctgttaggaggcatcacagtggttggttgttctgcagaaggtgtgacgggagctgccacttcccctagtacaaatggtgcttctccagtgatggataaaccaccagaaatggaagcagaaaatagtgaggttgatgaaaatgttccaacagcagaagaagcaactgaagctacagaagggaatgcggggtcagctgaagacacagtggacatctcccaaactggcgtctacacagagcatgtctttacagatcctttgggagttcagatcccagaagacctctccccagtgtatcagtcgagcaatgactcagatgcatataaagatcaaatatcagtactgccaaatgaacaagacttggtgagagaagaagcccagaaaatgagtagtcttttaccaactatgtggcttggagctcaaaatggctgtttgtatgtccattcatctgtagcccagtggaggaaatgtctccattccattaaacttaaagattcgattctcagtattgtacacgtgaagggaatcgtgttagtagccctggctgacggcacccttgcaatctttcacagaggagtggatgggcagtgggatttgtcaaactatcacctcttagaccttggacggcctcatcattccatccgttgcatgactgtggtacatgacaaagtctggtgtggctataggaacaaaatctatgtggtgcagccaaaggccatgaaaatagagaaatcttttgatgcacatcccaggaaggagagccaagtgcgacagcttgcgtgggtgggggatggcgtgtgggtctccattcgcttggattctacgctccgtctctatcatgcacacacttatcaacatctacaggatgtggacattgagccttatgtaagcaaaatgttaggtactggaaaactgggcttctcttttgtgagaattacagctcttatggtgtcttgtaatcgtttgtgggtggggacaggaaatggtgtcattatctccatcccattgacagaaacaaataaaacctcaggtgtaccaggaaatcgtcctggaagtgtaatccgtgtatatggtgatgaaaacagtgataaagtgactccagggacatttataccctattgttcaatggcacatgcacagctttgcttccatgggcaccgggatgctgtgaaattctttgtggcagtcccaggtcaagtcatcagcccacaaagtagcagtagtggcacggatctgacgggtgacaaagcagggccatctgcacaggagcctggtagtcagacgcccttgaagtctatgcttgtcatcagtggaggagagggctacatcgacttccgaatgggtgatgaaggtggagaatcagaacttcttggagaggatcttcctcttgaaccttctatcaccaaagcagaaaggagtcacttgatagtgtggcaagtgatgtatggcaatgagtga

SEQ ID NO: 7914 - RNA, 2766 nt, synthetic construct
  misc_feature 1..2766: note = derived and/or modified sequence opt1 fromc-Jun__Homo_sapiens__BAG61498
  source 1..2766: mol_type = other RNA
atggtgatgcgctggggcgagcggaacgacgtgatcgcctgggagctgctccaggacggggtggagaccaagaacgccctgaacatcgtgaagaacgacctgatcgcgaaggtcgacgagctgacctgcgagaaggacgtgctgcagggcgagctggaggccgtgaagcaggccaagctcaagctggaggagaagaaccgcgagctggaggaggagctccggaaggcccgcgccgagaccgaggacgcgcggcagaaggccaaggacgacgacgacagcgacatccccaccgcccagcgcaagcggttcacccgcgtcgagatggcccgggtgctgatggagcgcaaccagtacaaggagcggctgatggagctccaggaggcggtgcgctggaccgagatgatccgggcctcccgcgagaacccggccatgcaggagaagaagcggagctccatctggcagttcttcagccgcctgttctccagctccagcaacacgaccaagaagcccgagccgcccgtcaacctgaagtacaacgcccccacctcccacgtgacccccagcgtgaagaagcggtccagcacgctctcccagctgcccggggacaagagcaaggccttcgacttcctgtccgaggagaccgaggcgagcctcgcctcccgccgggagcagaagcgcgagcagtaccggcaggtcaaggcccacgtgcagaaggaggacggccgcgtgcaggccttcgggtggagcctgccccagaagtacaagcaggtcaccaacggccagggcgagaacaagatgaagaacctgccggtgcccgtgtacctccgccccctggacgagaaggacacctccatgaagctgtggtgcgccgtcggggtgaacctcagcggcgggaagacgcgggacggcgggagcgtggtcggcgcgtccgtgttctacaaggacgtggccggcctggacaccgaggggagcaagcagcgctccgccagccagtccagcctggacaagctcgaccaggagctgaaggagcagcagaaggagctgaagaaccaggaggagctctccagcctggtctggatctgcacctccacccacagcgccacgaaggtgctgatcatcgacgccgtccagcccggcaacatcctcgactccttcaccgtgtgcaacagccacgtgctgtgcatcgcgtccgtcccgggggcccgggagaccgactaccccgccggcgaggacctgagcgagtccggccaggtggacaaggccagcctctgcgggtccatgaccagcaactccagcgccgagacggacagcctgctgggcgggatcaccgtggtcggctgctccgcggagggggtgaccggcgccgccaccagcccctccacgaacggcgccagccccgtgatggacaagccgcccgagatggaggcggagaactccgaggtcgacgagaacgtgcccaccgccgaggaggccaccgaggccaccgaggggaacgccggcagcgcggaggacacggtggacatctcccagaccggggtctacaccgagcacgtgttcaccgaccccctcggcgtgcagatcccggaggacctgagccccgtctaccagtccagcaacgactccgacgcctacaaggaccagatcagcgtgctgcccaacgagcaggacctcgtgcgcgaggaggcccagaagatgtccagcctgctgcccacgatgtggctcggggcccagaacggctgcctgtacgtccactccagcgtggcccagtggcggaagtgcctgcactccatcaagctcaaggacagcatcctgagcatcgtgcacgtcaagggcatcgtgctggtggcgctggccgacgggaccctcgccatcttccaccgcggcgtcgacgggcagtgggacctgtccaactaccacctcctcgacctgggccggccgcaccacagcatccgctgcatgaccgtggtgcacgacaaggtctggtgcgggtaccggaacaagatctacgtggtgcagcccaaggccatgaagatcgagaagtccttcgacgcccacccccgcaaggagagccaggtccggcagctggcgtgggtgggcgacggcgtgtgggtctccatccgcctcgacagcaccctgcggctgtaccacgcccacacgtaccagcacctccaggacgtggacatcgagccctacgtgtccaagatgctggggaccggcaagctggggttcagcttcgtccgcatcaccgccctcatggtgtcctgcaaccggctgtgggtgggcaccggcaacggggtcatcatcagcatcccgctgaccgagacgaacaagacctccggcgtgcccgggaaccgccccggcagcgtgatccgggtctacggggacgagaactccgacaaggtgaccccgggcaccttcatcccctactgcagcatggcccacgcgcagctctgcttccacggccaccgcgacgccgtgaagttcttcgtcgccgtgcccggccaggtgatcagcccccagtcctccagctccgggacggacctgaccggggacaaggccggcccgagcgcccaggagcccgggagccagacgcccctgaagtccatgctcgtcatcagcggcggcgaggggtacatcgacttccggatgggcgacgagggcggggagtccgagctgctgggggaggacctccccctggagccgagcatcaccaaggcggagcgctcccacctgatcgtgtggcaggtcatgtacggcaacgagtga

SEQ ID NO: 7915 - RNA, 2766 nt, synthetic construct
  misc_feature 1..2766: note = derived and/or modified sequence opt2 fromc-Jun__Homo_sapiens__BAG61498
  source 1..2766: mol_type = other RNA
atggtcatgcgctggggcgagcgcaacgacgtcatcgcctgggagctcctccaggacggcgtcgagaccaagaacgccctcaacatcgtcaagaacgacctcatcgccaaggtcgacgagctcacctgcgagaaggacgtcctccagggcgagctcgaggccgtcaagcaggccaagctcaagctcgaggagaagaaccgcgagctcgaggaggagctccgcaaggcccgcgccgagaccgaggacgcccgccagaaggccaaggacgacgacgactccgacatccccaccgcccagcgcaagcgcttcacccgcgtcgagatggcccgcgtcctcatggagcgcaaccagtacaaggagcgcctcatggagctccaggaggccgtccgctggaccgagatgatccgcgcctcccgcgagaaccccgccatgcaggagaagaagcgctcctccatctggcagttcttctcccgcctcttctcctcctcctccaacaccaccaagaagcccgagccccccgtcaacctcaagtacaacgcccccacctcccacgtcaccccctccgtcaagaagcgctcctccaccctctcccagctccccggcgacaagtccaaggccttcgacttcctctccgaggagaccgaggcctccctcgcctcccgccgcgagcagaagcgcgagcagtaccgccaggtcaaggcccacgtccagaaggaggacggccgcgtccaggccttcggctggtccctcccccagaagtacaagcaggtcaccaacggccagggcgagaacaagatgaagaacctccccgtccccgtctacctccgccccctcgacgagaaggacacctccatgaagctctggtgcgccgtcggcgtcaacctctccggcggcaagacccgcgacggcggctccgtcgtcggcgcctccgtcttctacaaggacgtcgccggcctcgacaccgagggctccaagcagcgctccgcctcccagtcctccctcgacaagctcgaccaggagctcaaggagcagcagaaggagctcaagaaccaggaggagctctcctccctcgtctggatctgcacctccacccactccgccaccaaggtcctcatcatcgacgccgtccagcccggcaacatcctcgactccttcaccgtctgcaactcccacgtcctctgcatcgcctccgtccccggcgcccgcgagaccgactaccccgccggcgaggacctctccgagtccggccaggtcgacaaggcctccctctgcggctccatgacctccaactcctccgccgagaccgactccctcctcggcggcatcaccgtcgtcggctgctccgccgagggcgtcaccggcgccgccacctccccctccaccaacggcgcctcccccgtcatggacaagccccccgagatggaggccgagaactccgaggtcgacgagaacgtccccaccgccgaggaggccaccgaggccaccgagggcaacgccggctccgccgaggacaccgtcgacatctcccagaccggcgtctacaccgagcacgtcttcaccgaccccctcggcgtccagatccccgaggacctctcccccgtctaccagtcctccaacgactccgacgcctacaaggaccagatctccgtcctccccaacgagcaggacctcgtccgcgaggaggcccagaagatgtcctccctcctccccaccatgtggctcggcgcccagaacggctgcctctacgtccactcctccgtcgcccagtggcgcaagtgcctccactccatcaagctcaaggactccatcctctccatcgtccacgtcaagggcatcgtcctcgtcgccctcgccgacggcaccctcgccatcttccaccgcggcgtcgacggccagtgggacctctccaactaccacctcctcgacctcggccgcccccaccactccatccgctgcatgaccgtcgtccacgacaaggtctggtgcggctaccgcaacaagatctacgtcgtccagcccaaggccatgaagatcgagaagtccttcgacgcccacccccgcaaggagtcccaggtccgccagctcgcctgggtcggcgacggcgtctgggtctccatccgcctcgactccaccctccgcctctaccacgcccacacctaccagcacctccaggacgtcgacatcgagccctacgtctccaagatgctcggcaccggcaagctcggcttctccttcgtccgcatcaccgccctcatggtctcctgcaaccgcctctgggtcggcaccggcaacggcgtcatcatctccatccccctcaccgagaccaacaagacctccggcgtccccggcaaccgccccggctccgtcatccgcgtctacggcgacgagaactccgacaaggtcacccccggcaccttcatcccctactgctccatggcccacgcccagctctgcttccacggccaccgcgacgccgtcaagttcttcgtcgccgtccccggccaggtcatctccccccagtcctcctcctccggcaccgacctcaccggcgacaaggccggcccctccgcccaggagcccggctcccagacccccctcaagtccatgctcgtcatctccggcggcgagggctacatcgacttccgcatgggcgacgagggcggcgagtccgagctcctcggcgaggacctccccctcgagccctccatcaccaaggccgagcgctcccacctcatcgtctggcaggtcatgtacggcaacgagtga

SEQ ID NO: 7916 - RNA, 2766 nt, synthetic construct
  misc_feature 1..2766: note = derived and/or modified sequence opt3 fromc-Jun__Homo_sapiens__BAG61498
  source 1..2766: mol_type = other RNA
atggtgatgagatggggcgagaggaacgacgtcatcgcctgggaactgctccaggatggggttgagaccaagaatgctcttaacattgtgaaaaatgacctgatagcaaaggtagatgaattgacatgcgagaaagacgtgttacaaggagaactggaggccgtcaagcaggcgaaactaaagctcgaggaaaagaaccgggagctggaagaggagcttcgcaaagctcgagccgaaactgaggatgcacgtcagaaggccaaagacgatgacgatagcgacatccccacggctcagagaaagaggttcacccgggtggaaatggcacgcgttctgatggagagaaatcaatacaaagaaaggttgatggagctccaggaggccgtgcggtggacagaaatgattcgcgcttcccgagagaaccctgccatgcaggaaaagaagagatcttcaatctggcagtttttcagtaggctgtttagctcctcttcgaatactaccaaaaagccagagccgcccgtcaacctgaaatataatgcgcctacatcacacgtgaccccaagcgtaaagaaacggagttccactctctctcaattacccggtgataagagcaaagcattcgactttctgtccgaagagacagaggcctcacttgctagtcgtcgcgaacagaagagagagcagtacaggcaggttaaggcccatgtgcaaaaagaagatggccgggtccaggcattcgggtggagcttgcctcagaagtataaacaagtgaccaacggacagggcgagaataagatgaaaaacctgccagtgcccgtctacctacgacctctcgacgaaaaggacacgtctatgaagctgtggtgtgctgttggtgtgaatctttccgggggaaaaactcgcgatggcggctcagtagtgggggccagcgtcttttataaggacgtggcgggactggataccgagggtagtaaacagagatctgcctcccagagctcgttggacaagctcgatcaagagctgaaagaacagcagaaggagttaaagaaccaggaggaactgtcttccctcgtttggatttgcacatcaactcacagtgcaaccaaagtgcttatcatagacgctgtccaaccaggcaatatcctggatagcttcacagtgtgtaactcccatgtattgtgcattgcctctgttccgggggctagggagaccgactaccccgccggagaagatctaagcgagtcaggccaggtggacaaggcaagtctgtgtggttccatgacgagcaactcttcagccgaaactgatagtctccttgggggaatcacagtcgtgggctgcagcgctgagggcgtcaccggggcggcaacttccccttctacaaatggagcctcgccagtgatggacaaaccccctgaaatggaggctgagaacagcgaagttgacgagaatgtgccaaccgccgaagaggcaacggaagccaccgagggtaacgctggctccgccgaggatacagtagacatttcacagactggggtctataccgaacacgtgtttacagatcccctgggagttcagatcccggaggacctgagtcctgtgtaccaatctagcaatgattccgacgcatacaaggatcagatatcagtcttgcccaacgaacaggacctcgtgcgggaggaagcgcagaaaatgagctctctgttaccaactatgtggctgggcgctcaaaatggttgtctatatgtacattccagtgtggcccagtggcgcaagtgcctccacagcattaagctgaaagattctatcctttccattgttcacgtcaaggggatcgtgttggtggcactggccgacggcaccctcgctatcttccatagaggagtcgatggccagtgggacctgtcaaactaccaccttctggatttggggaggcctcatcacagtattcgttgtatgacagttgtgcacgacaaagtgtggtgcggatatcggaataagatatacgtagtccaacccaaagccatgaagatcgagaaatcgtttgacgcacatccacgaaaggagagccaggtgagacagctcgcttgggttggtgatggcgtgtgggtctccattaggctggactctaccttacgcctgtatcacgcccatacttaccagcacctacaagatgtggacatcgaaccctatgttagcaagatgctcgggacgggaaaactgggcttctcatttgtgcggataacagcgcttatggtaagttgtaacagattgtgggtcggtaccgggaatggcgtgattatctccatccctctgactgagaccaacaagacatctggagtgccaggcaataggccggggagcgtcattcgcgtttacggagatgaaaactccgacaaagtgacccccggtactttcatcccttactgctcaatggcccatgctcagctctgcttccacggccaccgagatgcagtaaagtttttcgtggccgtcccaggacaggtgattagcccccagagttcttccagcgggacagacctgacgggcgataaagctggtccttcggcccaagagccagggtcacagacccccttaaagtctatgctggttataagtggcggagagggctatatcgactttcggatgggggatgaaggaggcgagtccgaacttttgggtgaggacctcccgctggaacctagcattactaaggcagagcgttctcatctaatcgtgtggcaggtcatgtacgggaatgagtga

SEQ ID NO: 7917 - RNA, 2766 nt, synthetic construct
  misc_feature 1..2766: note = derived and/or modified sequence opt4 fromc-Jun__Homo_sapiens__BAG61498
  source 1..2766: mol_type = other RNA
atggtgatgagatggggcgagagaaacgacgtgatcgcctgggagctgctgcaggacggcgtggagaccaagaacgccctgaacatcgtgaagaacgacctgatcgccaaggtggacgagctgacctgcgagaaggacgtgctgcagggcgagctggaggccgtgaagcaggccaagctgaagctggaggagaagaacagagagctggaggaggagctgagaaaggccagagccgagaccgaggacgccagacagaaggccaaggacgacgacgacagcgacatccccaccgcccagagaaagagattcaccagagtggagatggccagagtgctgatggagagaaaccagtacaaggagagactgatggagctgcaggaggccgtgagatggaccgagatgatcagagccagcagagagaaccccgccatgcaggagaagaagagaagcagcatctggcagttcttcagcagactgttcagcagcagcagcaacaccaccaagaagcccgagccccccgtgaacctgaagtacaacgcccccaccagccacgtgacccccagcgtgaagaagagaagcagcaccctgagccagctgcccggcgacaagagcaaggccttcgacttcctgagcgaggagaccgaggccagcctggccagcagaagagagcagaagagagagcagtacagacaggtgaaggcccacgtgcagaaggaggacggcagagtgcaggccttcggctggagcctgccccagaagtacaagcaggtgaccaacggccagggcgagaacaagatgaagaacctgcccgtgcccgtgtacctgagacccctggacgagaaggacaccagcatgaagctgtggtgcgccgtgggcgtgaacctgagcggcggcaagaccagagacggcggcagcgtggtgggcgccagcgtgttctacaaggacgtggccggcctggacaccgagggcagcaagcagagaagcgccagccagagcagcctggacaagctggaccaggagctgaaggagcagcagaaggagctgaagaaccaggaggagctgagcagcctggtgtggatctgcaccagcacccacagcgccaccaaggtgctgatcatcgacgccgtgcagcccggcaacatcctggacagcttcaccgtgtgcaacagccacgtgctgtgcatcgccagcgtgcccggcgccagagagaccgactaccccgccggcgaggacctgagcgagagcggccaggtggacaaggccagcctgtgcggcagcatgaccagcaacagcagcgccgagaccgacagcctgctgggcggcatcaccgtggtgggctgcagcgccgagggcgtgaccggcgccgccaccagccccagcaccaacggcgccagccccgtgatggacaagccccccgagatggaggccgagaacagcgaggtggacgagaacgtgcccaccgccgaggaggccaccgaggccaccgagggcaacgccggcagcgccgaggacaccgtggacatcagccagaccggcgtgtacaccgagcacgtgttcaccgaccccctgggcgtgcagatccccgaggacctgagccccgtgtaccagagcagcaacgacagcgacgcctacaaggaccagatcagcgtgctgcccaacgagcaggacctggtgagagaggaggcccagaagatgagcagcctgctgcccaccatgtggctgggcgcccagaacggctgcctgtacgtgcacagcagcgtggcccagtggagaaagtgcctgcacagcatcaagctgaaggacagcatcctgagcatcgtgcacgtgaagggcatcgtgctggtggccctggccgacggcaccctggccatcttccacagaggcgtggacggccagtgggacctgagcaactaccacctgctggacctgggcagaccccaccacagcatcagatgcatgaccgtggtgcacgacaaggtgtggtgcggctacagaaacaagatctacgtggtgcagcccaaggccatgaagatcgagaagagcttcgacgcccaccccagaaaggagagccaggtgagacagctggcctgggtgggcgacggcgtgtgggtgagcatcagactggacagcaccctgagactgtaccacgcccacacctaccagcacctgcaggacgtggacatcgagccctacgtgagcaagatgctgggcaccggcaagctgggcttcagcttcgtgagaatcaccgccctgatggtgagctgcaacagactgtgggtgggcaccggcaacggcgtgatcatcagcatccccctgaccgagaccaacaagaccagcggcgtgcccggcaacagacccggcagcgtgatcagagtgtacggcgacgagaacagcgacaaggtgacccccggcaccttcatcccctactgcagcatggcccacgcccagctgtgcttccacggccacagagacgccgtgaagttcttcgtggccgtgcccggccaggtgatcagcccccagagcagcagcagcggcaccgacctgaccggcgacaaggccggccccagcgcccaggagcccggcagccagacccccctgaagagcatgctggtgatcagcggcggcgagggctacatcgacttcagaatgggcgacgagggcggcgagagcgagctgctgggcgaggacctgcccctggagcccagcatcaccaaggccgagagaagccacctgatcgtgtggcaggtgatgtacggcaacgagtga

SEQ ID NO: 7918 - RNA, 2766 nt, synthetic construct
  misc_feature 1..2766: note = derived and/or modified sequence opt5 fromc-Jun__Homo_sapiens__BAG61498
  source 1..2766: mol_type = other RNA
atggtgatgagatggggcgagcggaacgacgtcatcgcctgggaactgctccaggatggggttgagaccaagaatgctctgaacattgtgaaaaatgaccttatcgccaaggtggatgaactgacatgcgagaaagacgtcctccagggagaactggaggcggtgaagcaggctaaacttaagctggaggaaaagaaccgcgagctcgaagaggagctgagaaaagcccgggccgaaacggaggatgctcgccagaaggccaaagacgatgacgatagcgacattcccaccgctcagagaaagcggttcacacgcgttgaaatggccagagtgctgatggagcggaatcaatacaaagaacgcctcatggagctgcaggaggcggtcagatggaccgaaatgatccgggcctcccgcgagaaccctgctatgcaggaaaagaagagatctagcatttggcagtttttctcccggctgttttctagctcctctaatacaaccaaaaagccggagccccctgtgaacctgaaatataatgcccccacaagccacgttaccccttccgtgaagaaacgcagctctacgctctcccaactgcccggcgataagagcaaggctttcgactttctttctgaagagaccgaggcctccctggcgagcagacgggaacagaaaagagagcagtaccgccaggtcaaggcccatgtgcaaaaagaagatgggcgggtgcaggctttcggatggtctctccctcagaagtataaacaagtcacaaacggccagggggagaataagatgaaaaacctgccggttcccgtgtacctgagacctctcgacgaaaaggacacctccatgaagctgtggtgtgccgtgggagtcaatcttagcggcggcaaaacacgcgatgggggatccgtggttggcgcttctgtgttttataaggacgtcgccgggctggataccgagggaagcaaacagcggtccgccagccagtcttccctcgacaagctggatcaagagcttaaagaacagcagaaggagctgaagaaccaggaggaactcagctctctggtgtggatctgcacgagcacacactccgctaccaaagttctgatcattgacgcggtgcaacccggcaatatcctcgattctttcacagtctgtaacagccatgtgctgtgcattgcctccgtccctggggctagagagaccgactaccccgccggagaagatcttagcgagtctggccaggtggacaaggcctccctgtgtggcagcatgacctctaactccagcgctgaaacagattccctccttgggggaatcacggttgtgggctgctctgccgagggggtcaccggagcggctacaagcccgtccaccaatggcgcctctcctgtgatggacaaaccccctgaaatggaggccgagaacagcgaagttgacgagaatgtgcccacagctgaagaggccaccgaagctacggaggggaacgccggatccgcggaggatacagtcgacattagccagaccggcgtgtataccgaacacgtgtttacagatccccttggcgttcagatccctgaggacctgtctccggtctaccaatccagcaatgattctgacgcctacaaggatcagatttccgtgctccccaacgaacaggacctggtgcgcgaggaagctcagaaaatgagctctctgctccctaccatgtggctgggggcccaaaatggatgtctttatgtccatagctccgtggctcagtggcggaagtgcctgcacagcatcaagctcaaagattctatcctgtccattgttcacgtgaagggcatcgtcctggtggcccttgcggacgggacactcgccattttccatagaggagttgatggccagtgggacctgagcaactaccatctgctcgatctggggcgcccccaccactccatccggtgtatgacggtggtccacgacaaagtgtggtgcggctatagaaataagatttacgttgtgcaacctaaagctatgaagatcgagaaatcttttgacgcccatccccgcaaggagagccaggtccggcagcttgcttgggtgggagatggcgtgtgggtctccatcagactggactctaccctccggctgtatcacgcccatacataccagcatctgcaagatgttgacattgaaccgtatgtgagcaagatgcttgggaccggaaaactcggcttctcctttgtgcgcatcacagccctgatggtctcttgtaacagactgtgggtggggaccggaaatggcgttattatcagcattcctctcacggagaccaacaagacatccggggtgcccggcaatcggcctggaagcgtcatcagagtgtacggcgatgaaaactctgacaaagttacccccgggacattcatcccttactgctccatggctcacgcgcagctgtgcttccacggacaccgcgatgccgtgaagtttttcgtcgctgtgcccggccaggttattagcccgcagtcttccagctctgggaccgaccttacgggagataaagccggcccttccgcccaagagcccgggagccagacacccctgaagtccatgctcgtgatcagcggcggagagggctatattgactttcggatgggggatgaaggaggcgagtctgaactgctgggggaggaccttcctctcgaaccgagcatcaccaaggctgagagatcccatctgattgtctggcaagtgatgtacggaaatgagtga

SEQ ID NO: 7919 - protein, 357 aa, synthetic construct [sequence omitted]

SEQ ID NO: 7920 - RNA, 1074 nt, synthetic construct
  misc_feature 1..1074: note = c-Jun__Homo_sapiens__BAH11553
  source 1..1074: mol_type = other RNA
atgcagctggtgctgaagatggattcgagcccagacaatgacagctggttggaggatcaatgggagcgctggctcacccatgacatcagcctggaggagtttgaggatgaagacctctcggagatcactgatgagtgtggcatcagcttacagtgcaaagacaccctgtccttacggcccccgcgcgccgggctgctctctgcgggcggcggcggcgcggggagccggttgcaggccgagatgctgcagatggacctgatcgacgcgacggaggactccacgcctgatgaacccgacgtccatttctccaagaaattcctgaacgtcttcatgagtggccgctcccgctcctccagtgctgagtccttcgggctgttctcctgcatcatcaacggggaggagcaggagcagacccaccgggccatattcaggtttgtgcctcgacacgaagacgaacttgagctggaagtggatgaccctctgctagtggagctccaggctgaagactactggtacgagacctacaacatgcgcactggtgcccggggtgtctttcctgcctattacgccatcgaggtcaccaaggagcccgagcacatggcagccctggccaaaaacagtgactgggtggaccagttccgggtgaagttcctgggctcagtccaggttccctatcacaagggcaatgacgtcctctgtgctgctatgcaaaagattgccaccacccgccggctcaccgtgcactttaacccgccctccagctgtgtcctggagatcagcgtgcggggtgtgaagataggcgtcaaggccgatgactcccaggaggccaaggggaataaatgtagccactttttccagttaaaaaacatctctttctgcggatatcatccaaagaacaacaagtactttgggttcatcaccaagcaccccgccgaccaccggtttgcctgccacgcctttgtgtctgaagactccaccaaagccctggcagagtccgtggggagagcattccagcagttctacaagcagtttgtggagtacacctgccccacagaagatatctacctggagtag

SEQ ID NO: 7921 - RNA, 1074 nt, synthetic construct
  misc_feature 1..1074: note = derived and/or modified sequence opt1 fromc-Jun__Homo_sapiens__BAH11553
  source 1..1074: mol_type = other RNA
atgcagctggtgctcaagatggacagctcccccgacaacgacagctggctggaggaccagtgggagcgctggctgacccacgacatctccctcgaggagttcgaggacgaggacctgagcgagatcaccgacgagtgcggcatctccctgcagtgcaaggacacgctcagcctgcggccgccccgcgccgggctgctctccgccggcgggggcggggcgggcagccggctgcaggccgagatgctgcagatggacctcatcgacgccaccgaggactccacccccgacgagcccgacgtccacttcagcaagaagttcctgaacgtgttcatgtccggccgcagccggtccagctccgccgagagcttcgggctgttctcctgcatcatcaacggcgaggagcaggagcagacccaccgcgccatcttccggttcgtgccgcgccacgaggacgagctcgagctggaggtcgacgaccccctgctcgtggagctgcaggcggaggactactggtacgagacgtacaacatgcggaccggggcccgcggcgtgttccccgcctactacgccatcgaggtcaccaaggagcccgagcacatggcggccctggccaagaacagcgactgggtggaccagttccgggtgaagttcctcgggtccgtccaggtgccgtaccacaagggcaacgacgtgctgtgcgccgccatgcagaagatcgcgaccacgcgccggctgaccgtccacttcaacccgcccagcagctgcgtgctcgagatctccgtgcgcggcgtcaagatcggggtgaaggccgacgacagccaggaggccaagggcaacaagtgctcccacttcttccagctgaagaacatcagcttctgcgggtaccaccccaagaacaacaagtacttcggcttcatcaccaagcaccccgccgaccaccggttcgcctgccacgcgttcgtgtccgaggacagcaccaaggccctggccgagtccgtcggccgcgccttccagcagttctacaagcagttcgtggagtacacgtgccccaccgaggacatctacctcgagtga

SEQ ID NO: 7922 - RNA, 1074 nt, synthetic construct
  misc_feature 1..1074: note = derived and/or modified sequence opt2 fromc-Jun__Homo_sapiens__BAH11553
  source 1..1074: mol_type = other RNA
atgcagctcgtcctcaagatggactcctcccccgacaacgactcctggctcgaggaccagtgggagcgctggctcacccacgacatctccctcgaggagttcgaggacgaggacctctccgagatcaccgacgagtgcggcatctccctccagtgcaaggacaccctctccctccgccccccccgcgccggcctcctctccgccggcggcggcggcgccggctcccgcctccaggccgagatgctccagatggacctcatcgacgccaccgaggactccacccccgacgagcccgacgtccacttctccaagaagttcctcaacgtcttcatgtccggccgctcccgctcctcctccgccgagtccttcggcctcttctcctgcatcatcaacggcgaggagcaggagcagacccaccgcgccatcttccgcttcgtcccccgccacgaggacgagctcgagctcgaggtcgacgaccccctcctcgtcgagctccaggccgaggactactggtacgagacctacaacatgcgcaccggcgcccgcggcgtcttccccgcctactacgccatcgaggtcaccaaggagcccgagcacatggccgccctcgccaagaactccgactgggtcgaccagttccgcgtcaagttcctcggctccgtccaggtcccctaccacaagggcaacgacgtcctctgcgccgccatgcagaagatcgccaccacccgccgcctcaccgtccacttcaaccccccctcctcctgcgtcctcgagatctccgtccgcggcgtcaagatcggcgtcaaggccgacgactcccaggaggccaagggcaacaagtgctcccacttcttccagctcaagaacatctccttctgcggctaccaccccaagaacaacaagtacttcggcttcatcaccaagcaccccgccgaccaccgcttcgcctgccacgccttcgtctccgaggactccaccaaggccctcgccgagtccgtcggccgcgccttccagcagttctacaagcagttcgtcgagtacacctgccccaccgaggacatctacctcgagtga

SEQ ID NO: 7923 - RNA, 1074 nt, synthetic construct
  misc_feature 1..1074: note = derived and/or modified sequence opt3 fromc-Jun__Homo_sapiens__BAH11553
  source 1..1074: mol_type = other RNA
atgcagctggtgctcaagatggacagctcccccgataacgactcttggcttgaggatcaatgggaaagatggctgacccacgacatctcattggaggagttcgaagatgaagacttaagtgagattacagatgagtgcggcataagcctgcagtgtaaagacactctatccctcaggcctccacgggccgggctgctttctgctggaggtggcggggcaggatcgcgcctgcaggccgaaatgttgcagatggatctcatcgacgcgacggaggattcaaccccggacgaacccgatgtccattttagcaagaaattcctgaatgtttttatgagtggccgatcccgttctagctccgctgagtcattcggtctgtttagttgcattatcaacggggaggaacaagagcagacacacagagccattttcaggtttgtgcctcggcatgaagacgagctcgaattagaggtagacgatccactgcttgtggagttgcaggcagaagactactggtatgagacttacaatatgcgcaccggagccagaggcgtcttccccgcttattacgcaatcgaagtgacaaaggagcctgaacacatggccgctctggccaaaaacagcgattgggttgaccagtttagggtgaagttcctaggctctgtccaagtgccatatcataaggggaatgatgtactctgtgcggcaatgcagaaaatagccaccactcggcgcctgacagttcactttaatcccccttcctcatgcgtgcttgagatcagcgtccgaggagtgaagattggtgtgaaagctgacgatagtcaggaggccaagggcaacaaatgttctcacttctttcagctgaagaacatctccttctgcgggtaccatccaaagaataacaaatatttcggatttattaccaagcacccggcagaccatagattcgcttgtcacgcctttgtcagcgaagattcgacgaaagcgttggccgagtctgttggcagggcattccaacagttttacaagcagttcgtggaatacacttgccccaccgaggacatctatctcgaatga

SEQ ID NO: 7924 - RNA, 1074 nt, synthetic construct
  misc_feature 1..1074: note = derived and/or modified sequence opt4 fromc-Jun__Homo_sapiens__BAH11553
  source 1..1074: mol_type = other RNA
atgcagctggtgctgaagatggacagcagccccgacaacgacagctggctggaggaccagtgggagagatggctgacccacgacatcagcctggaggagttcgaggacgaggacctgagcgagatcaccgacgagtgcggcatcagcctgcagtgcaaggacaccctgagcctgagaccccccagagccggcctgctgagcgccggcggcggcggcgccggcagcagactgcaggccgagatgctgcagatggacctgatcgacgccaccgaggacagcacccccgacgagcccgacgtgcacttcagcaagaagttcctgaacgtgttcatgagcggcagaagcagaagcagcagcgccgagagcttcggcctgttcagctgcatcatcaacggcgaggagcaggagcagacccacagagccatcttcagattcgtgcccagacacgaggacgagctggagctggaggtggacgaccccctgctggtggagctgcaggccgaggactactggtacgagacctacaacatgagaaccggcgccagaggcgtgttccccgcctactacgccatcgaggtgaccaaggagcccgagcacatggccgccctggccaagaacagcgactgggtggaccagttcagagtgaagttcctgggcagcgtgcaggtgccctaccacaagggcaacgacgtgctgtgcgccgccatgcagaagatcgccaccaccagaagactgaccgtgcacttcaacccccccagcagctgcgtgctggagatcagcgtgagaggcgtgaagatcggcgtgaaggccgacgacagccaggaggccaagggcaacaagtgcagccacttcttccagctgaagaacatcagcttctgcggctaccaccccaagaacaacaagtacttcggcttcatcaccaagcaccccgccgaccacagattcgcctgccacgccttcgtgagcgaggacagcaccaaggccctggccgagagcgtgggcagagccttccagcagttctacaagcagttcgtggagtacacctgccccaccgaggacatctacctggagtga

SEQ ID NO: 7925 - RNA, 1074 nt, synthetic construct
  misc_feature 1..1074: note = derived and/or modified sequence opt5 fromc-Jun__Homo_sapiens__BAH11553
  source 1..1074: mol_type = other RNA
atgcagctggtgctcaagatggacagctcccccgataacgactcttggctggaggatcaatgggaaagatggcttacccacgacatcagcctggaggagttcgaagatgaagacctctccgagattacagatgagtgcggcatctctctgcagtgtaaagacacgcttagcctgcggcctccgcgcgccgggctcctgtccgctggaggcgggggagccggctctagactgcaggcggaaatgctccagatggatctgattgacgctaccgaggatagcacacccgacgaacctgatgtccatttttccaagaaattccttaatgtttttatgagcgggcggtctcgctccagctctgccgagtccttcggactgtttagctgcatcattaacggcgaggaacaagagcagacccacagagccatcttccggtttgtgccccgccatgaagacgagctcgaactggaggtggacgatcctcttctggtcgagctccaggctgaagactactggtatgagacatacaatatgagaaccggcgcccgcggggtgttccccgcttattacgccatcgaagttacaaaggagcctgaacacatggcggccctggctaaaaactctgattgggtggaccagtttcgggtcaagttcctgggatccgtgcaagttccgtatcataagggcaatgatgtgctctgtgccgctatgcagaaaattgccaccacgagacggctgaccgtccactttaatccccctagctcctgcgtgcttgagatctctgtgcgcggggtcaagattggagttaaagcggacgatagccaggaggccaagggcaacaaatgttcccacttctttcagctgaagaacatcagcttctgcgggtaccatcccaagaataacaaatatttcggatttattacaaagcaccctgctgaccatagattcgcctgtcacgcttttgtgtctgaagattccaccaaagccctcgccgagagcgtgggccgggctttccaacagttttacaagcagttcgtcgaatacacatgccccaccgaggacatctatctggaatga

SEQ ID NO: 7926 - protein, 251 aa, synthetic construct [sequence omitted]

SEQ ID NO: 7927 - RNA, 756 nt, synthetic construct
  misc_feature 1..756: note = c-Jun__Homo_sapiens__BAK64147
  source 1..756: mol_type = other RNA
atgatggagatccagatggacgagggcggcggcgtggtggtgtaccaggacgactactgctccggctcggtgatgtcggagcgggtgtcgggcctggcgggctccatctaccgcgagttcgagcgcctcatccactgctacgacgaggaggtggtcaaggagctcatgccgctggtggtgaacgtgctggagaacctagactcggtgctcagcgagaaccaggagcacgaggtggagctggagctgctgcgcgaggacaacgagcagctgctcacccagtacgagcgtgagaaggcgctgcgcaggcaggcggaggagaaattcattgagtttgaagatgctctggaacaagagaagaaagagctgcaaatccaggtggagcactacgagttccagacgcgccagctggagctgaaggccaagaactatgccgatcagatttcccggttggaggagcgggagtcggagatgaagaaggagtacaatgccctgcaccagcggcacacagagatgatacagacctacgtggagcacattgagaggtccaagatgcagcaggtcggaggaaacagccagaccgagagcagcctgccggggcggagcaggaaggagcgccccacctccctgaacgtgttccccctggctgacggcacggtacgtgcacagatcgggggcaagctcgtgcctgcgggggaccactggcacctgagtgacctcggccagctgcagtccagctccagctaccaggttttgtag

SEQ ID NO: 7928 - RNA, 756 nt, synthetic construct
  misc_feature 1..756: note = derived and/or modified sequence opt1 fromc-Jun__Homo_sapiens__BAK64147
  source 1..756: mol_type = other RNA
atgatggagatccagatggacgagggcgggggcgtggtcgtgtaccaggacgactactgcagcgggtccgtgatgagcgagcgcgtctccggcctggccgggagcatctaccgggagttcgagcgcctcatccactgctacgacgaggaggtggtgaaggagctgatgcccctggtcgtgaacgtgctcgagaacctggactccgtcctgagcgagaaccaggagcacgaggtggagctcgagctgctgcgggaggacaacgagcagctcctgacccagtacgagcgcgagaaggccctgcggcgccaggcggaggagaagttcatcgagttcgaggacgccctcgagcaggagaagaaggagctgcagatccaggtggagcactacgagttccagacccggcagctggagctcaaggccaagaactacgccgaccagatctcccgcctggaggagcgggagagcgagatgaagaaggagtacaacgccctgcaccagcgccacacggagatgatccagacctacgtcgagcacatcgagcggtccaagatgcagcaggtcggcggcaacagccagaccgagtccagcctcccggggcgctcccggaaggagcgccccaccagcctgaacgtgttccccctggcggacggcacggtgcgggcccagatcgggggcaagctcgtgcccgccggggaccactggcacctgtccgacctgggccagctccagagctccagctcctaccaggtgctgtga

SEQ ID NO: 7929 - RNA, 756 nt, synthetic construct
  misc_feature 1..756: note = derived and/or modified sequence opt2 fromc-Jun__Homo_sapiens__BAK64147
  source 1..756: mol_type = other RNA
atgatggagatccagatggacgagggcggcggcgtcgtcgtctaccaggacgactactgctccggctccgtcatgtccgagcgcgtctccggcctcgccggctccatctaccgcgagttcgagcgcctcatccactgctacgacgaggaggtcgtcaaggagctcatgcccctcgtcgtcaacgtcctcgagaacctcgactccgtcctctccgagaaccaggagcacgaggtcgagctcgagctcctccgcgaggacaacgagcagctcctcacccagtacgagcgcgagaaggccctccgccgccaggccgaggagaagttcatcgagttcgaggacgccctcgagcaggagaagaaggagctccagatccaggtcgagcactacgagttccagacccgccagctcgagctcaaggccaagaactacgccgaccagatctcccgcctcgaggagcgcgagtccgagatgaagaaggagtacaacgccctccaccagcgccacaccgagatgatccagacctacgtcgagcacatcgagcgctccaagatgcagcaggtcggcggcaactcccagaccgagtcctccctccccggccgctcccgcaaggagcgccccacctccctcaacgtcttccccctcgccgacggcaccgtccgcgcccagatcggcggcaagctcgtccccgccggcgaccactggcacctctccgacctcggccagctccagtcctcctcctcctaccaggtcctctga

SEQ ID NO: 7930 - RNA, 756 nt, synthetic construct
  misc_feature 1..756: note = derived and/or modified sequence opt3 fromc-Jun__Homo_sapiens__BAK64147
  source 1..756: mol_type = other RNA
atgatggagatccagatggacgaaggcgggggagtggtcgtttaccaagatgactattgcagcggttccgtgatgtctgagagagtatcaggcctggccgggagtatttacagggagttcgaacggctcatacactgttatgatgaagaggtggtcaaggagcttatgcccctggtggttaacgtgttggaaaatttagacagcgtcctgtccgagaaccaggaacatgaggtggagctagaactcctgcgcgaggataatgaacagcttctgacccagtacgagcgagaaaaggctttgcgtagacaagcagaggagaaatttatcgagttcgaagacgccctcgaacaggagaaaaaggaactgcagattcaggtagagcactatgagtttcaaacaaggcagctggaactcaaagcgaagaactacgctgatcagatctctcggttagaggaacgcgagtcggaaatgaagaaagagtataatgccctgcatcagagacacactgagatgattcaaacgtacgttgaacatatcgagaggtcaaagatgcaacaggtgggaggcaacagccagaccgaaagttcccttcctggtcggtctcgcaaagagcgaccaactagcttgaatgtcttcccgctggcagacgggacagtgagagcccagataggaggcaagctagtgcccgctggcgatcactggcacctctccgacctggggcagcttcagtcaagtagctcttaccaagtcctgtga

SEQ ID NO: 7931 - RNA, 756 nt, synthetic construct
  misc_feature 1..756: note = derived and/or modified sequence opt4 fromc-Jun__Homo_sapiens__BAK64147
  source 1..756: mol_type = other RNA
atgatggagatccagatggacgagggcggcggcgtggtggtgtaccaggacgactactgcagcggcagcgtgatgagcgagagagtgagcggcctggccggcagcatctacagagagttcgagagactgatccactgctacgacgaggaggtggtgaaggagctgatgcccctggtggtgaacgtgctggagaacctggacagcgtgctgagcgagaaccaggagcacgaggtggagctggagctgctgagagaggacaacgagcagctgctgacccagtacgagagagagaaggccctgagaagacaggccgaggagaagttcatcgagttcgaggacgccctggagcaggagaagaaggagctgcagatccaggtggagcactacgagttccagaccagacagctggagctgaaggccaagaactacgccgaccagatcagcagactggaggagagagagagcgagatgaagaaggagtacaacgccctgcaccagagacacaccgagatgatccagacctacgtggagcacatcgagagaagcaagatgcagcaggtgggcggcaacagccagaccgagagcagcctgcccggcagaagcagaaaggagagacccaccagcctgaacgtgttccccctggccgacggcaccgtgagagcccagatcggcggcaagctggtgcccgccggcgaccactggcacctgagcgacctgggccagctgcagagcagcagcagctaccaggtgctgtga

SEQ ID NO: 7932 - RNA, 756 nt, synthetic construct
  misc_feature 1..756: note = derived and/or modified sequence opt5 fromc-Jun__Homo_sapiens__BAK64147
  source 1..756: mol_type = other RNA
atgatggagatccagatggacgaaggcgggggagtggtcgtttaccaagatgactattgcagcggctccgtgatgtctgagagagtgagcgggctggccggatccatttaccgggagttcgaacgcctcatccactgttatgatgaagaggtcgtgaaggagctgatgccccttgttgtgaacgtcctggaaaatctcgactctgtgctgagcgagaaccaggaacatgaggttgagcttgaactgctcagagaggataatgaacagctgctgacccagtacgagcgggaaaaagctctccgcagacaagccgaggagaagtttattgagttcgaagacgcgctggaacaggagaaaaaggaacttcagatccaggtggagcactatgagtttcaaacacggcagctggaactcaaagctaagaactacgccgatcagatttcccgcctggaggaaagagagtctgaaatgaagaaagagtataatgcccttcatcagcggcacacggagatgatccaaacctacgtcgaacatatcgagcgcagcaagatgcaacaggtgggcgggaactcccagacagaaagctctctgcctggaagatcccggaaagagcgcccgaccagcctcaatgtgttccccctggctgacggcacagtcagagcccagattggcgggaagctggttcctgctggagatcactggcacctctctgacctgggccagcttcagtcctctagctcctaccaagtgctgtga

SEQ ID NO: 7933 - protein, 81 aa, synthetic construct
  REGION 1..81: note = c-Jun__Homo_sapiens__G5E966
MIHFILLFSRQGKLRLQKWYITLPDKERKKITREIVQIILSRGHRTSSFVDWKELKLVYKRSVSWILSLILKRLISSWTSL

SEQ ID NO: 7934 - RNA, 246 nt, synthetic construct
  misc_feature 1..246: note = c-Jun__Homo_sapiens__EAW70814
  source 1..246: mol_type = other RNA
atgatacatttcatattgctcttcagtcgacaagggaaattacggctacagaaatggtacatcactctccctgataaagagaggaagaagatcacccgggaaattgttcagattattctctcccgtggtcacaggacaagcagttttgttgactggaaggagctaaaacttgtttataaaaggtctgtgagctggatattatctttaattttgaaaaggcttatttcatcctggacgagtttataa

SEQ ID NO: 7935 - RNA, 246 nt, synthetic construct
  misc_feature 1..246: note = derived and/or modified sequence opt1 fromc-Jun__Homo_sapiens__EAW70814
  source 1..246: mol_type = other RNA
atgatccacttcatcctcctgttcagccgccagggcaagctgcggctgcagaagtggtacatcaccctccccgacaaggagcgcaagaagatcacccgggagatcgtgcagatcatcctgtcccgcgggcaccggacgagctccttcgtcgactggaaggagctgaagctcgtgtacaagcgcagcgtgtcctggatcctgagcctgatcctcaagcggctgatctccagctggacctccctgtga

SEQ ID NO: 7936 - RNA, 246 nt, synthetic construct
  misc_feature 1..246: note = derived and/or modified sequence opt2 fromc-Jun__Homo_sapiens__EAW70814
  source 1..246: mol_type = other RNA
atgatccacttcatcctcctcttctcccgccagggcaagctccgcctccagaagtggtacatcaccctccccgacaaggagcgcaagaagatcacccgcgagatcgtccagatcatcctctcccgcggccaccgcacctcctccttcgtcgactggaaggagctcaagctcgtctacaagcgctccgtctcctggatcctctccctcatcctcaagcgcctcatctcctcctggacctccctctga

SEQ ID NO: 7937 - RNA, 246 nt, synthetic construct
  misc_feature 1..246: note = derived and/or modified sequence opt3 fromc-Jun__Homo_sapiens__EAW70814
  source 1..246: mol_type = other RNA
atgatccacttcattctgctctttagcagacagggcaaacttaggctgcaaaagtggtacataaccttgcccgacaaggagcggaaaaagatcacacgcgaaattgtgcagatcattttatcccgagggcatcgtacttcttcattcgtcgattggaaagagctgaagctagtttataagagaagtgtgagctggatcctctccctgatacttaaaaggctgatctcttcgtggacgtcattgtga

SEQ ID NO: 7938 - RNA, 246 nt, synthetic construct
  misc_feature 1..246: note = derived and/or modified sequence opt4 fromc-Jun__Homo_sapiens__EAW70814
  source 1..246: mol_type = other RNA
atgatccacttcatcctgctgttcagcagacagggcaagctgagactgcagaagtggtacatcaccctgcccgacaaggagagaaagaagatcaccagagagatcgtgcagatcatcctgagcagaggccacagaaccagcagcttcgtggactggaaggagctgaagctggtgtacaagagaagcgtgagctggatcctgagcctgatcctgaagagactgatcagcagctggaccagcctgtga

SEQ ID NO: 7939 - RNA, 246 nt, synthetic construct
  misc_feature 1..246: note = derived and/or modified sequence opt5 fromc-Jun__Homo_sapiens__EAW70814
  source 1..246: mol_type = other RNA
atgatccacttcattctgctctttagcagacagggcaagctgcggcttcaaaaatggtacatcaccctgcccgacaaggagcgcaaaaagattacaagagaaatcgtgcagattatcctctcccgggggcatcgcacgtctagcttcgtcgattggaaagagctgaaacttgtttataagagatccgtgtcttggatcctgagcctcattctgaagcggctgatctcctcttggaccagcctctga

SEQ ID NO: 7940 - protein, 785 aa, synthetic construct
  REGION 1..785: note = c-Jun__Homo_sapiens__O75843
MVVPSLKLQDLIEEIRGAKTQAQEREVIQKECAHIRASFRDGDPVHRHRQLAKLLYVHMLGYPAHFGQMECLKLIASSRFTDKRVGYLGAMLLLDERHDAHLLITNSIKNDLSQGIQPVQGLALCTLSTMGSAEMCRDLAPEVEKLLLQPSPYVRKKAILTAVHMIRKVPELSSVFLPPCAQLLHERHHGILLGTITLITELCERSPAALRHFRKVVPQLVHILRTLVTMGYSTEHSISGVSDPFLQVQILRLLRILGRNHEESSETMNDLLAQVATNTDTSRNAGNAVLFETVLTIMDIRSAAGLRVLAVNILGRFLLNSDRNIRYVALTSLLRLVQSDHSAVQRHRPTVVECLRETDASLSRRALELSLALVNSSNVRAMMQELQAFLESCPPDLRADCASGILLAAERFAPTKRWHIDTILHVLTTAGTHVRDDAVANLTQLIGGAQELHAYSVRRLYNALAEDISQQPLVQVAAWCIGEYGDLLLAGNCEEIEPLQVDEEEVLALLEKVLQSHMSLPATRGYALTALMKLSTRLCGDNNRIRQVVSIYGSCLDVELQQRAVEYDTLFRKYDHMRAAILEKMPLVERDGPQADEEAKESKEAAQLSEAAPVPTEPQASQLLDLLDLLDGASGDVQHPPHLDPSPGGALVHLLDLPCVPPPPAPIPDLKVFEREGVQLNLSFIRPPENPALLLITITATNFSEGDVTHFICQAAVPKSLQLQLQAPSGNTVPARGGLPITQLFRILNPNKAPLRLKLRLTYDHFHQSVQEIFEVNNLPVESWQ

SEQ ID NO: 7941 - RNA, 2358 nt, synthetic construct
  misc_feature 1..2358: note = c-Jun__Homo_sapiens__BAA33390
  source 1..2358: mol_type = other RNA
atggtggtgccttcgctgaagcttcaggacctcatcgaagagattcgcggggccaagactcaggcccaggagcgggaggtgatccaaaaggagtgtgcccacatccgggcctccttccgcgacggggacccagtgcacaggcaccggcagctggccaaactgctctacgtccacatgttgggctaccccgcccactttggacagatggagtgcctgaaactgatcgcctcctccagattcacagacaagagggtgggctacctgggggccatgcttctattggatgagaggcacgatgcccacctgctcattaccaacagcatcaagaatgacctgagccaggggattcagccagtacaaggcctggccttgtgcactttgagcaccatgggctctgctgagatgtgccgagacctggccccagaggtggagaaactgctcctgcagcccagtccctacgtgcgcaagaaggctattctgactgcagtgcacatgatccggaaggtccctgaactctccagtgtcttcctcccaccctgtgcccaactgcttcatgagcgtcaccatggcatcctgctgggcaccatcacgctgatcacggagctctgcgaacgaagccctgcagccctcaggcacttccgaaaggtggtaccccagctggtacacatcctccggactctggtgacaatgggatactccacagaacacagcatatctggagtcagcgaccccttcctgcaggtccagatacttcgtctgcttcggatcctgggccggaaccacgaggagagcagtgagaccatgaatgacttgctggcccaggtggccactaacacggacaccagccgaaatgccggaaatgcggtcctgtttgagacagtactcaccatcatggatatccgctctgcagctggcctacgggttctagctgtcaacattcttggtcgcttcctactcaacagtgacaggaacattaggtatgtagccctgacatcactgcttcgactggtgcagtctgatcacagtgctgtgcagcggcatcggcccactgtggtggaatgtctacgggaaactgatgcctccctcagccggagagccctggaactaagcctggctctggtaaatagctccaatgtgcgagccatgatgcaagagctgcaggcctttctggagtcctgccctcctgacctacgggctgactgtgcctcaggcatcctgctggctgcagagaggtttgctccaaccaaacgctggcacatagacaccatcctgcatgtgctgacaacggcgggcacccatgtgcgggatgatgcagtggccaacctgacccagctgattgggggggcccaggagctacatgcctactctgtgcgccgcctctacaatgccctggcagaagacatttcccagcaaccactggtgcaggtggcagcctggtgcattggggagtatggggacctcctgctggcagggaactgcgaggagattgagccccttcaggtggacgaagaggaagtgctggcattgctggaaaaggtgctgcagtcccacatgtccctgccagccactcgaggatatgccctcacagccctcatgaagctcagcactcgcctctgtggggacaacaaccgcatccgccaggtggtgtccatctacgggagctgcttggacgtggagctgcagcagcgggctgtggagtatgacacactcttccggaaatacgaccacatgagggctgccatcctggaaaaaatgcctcttgtggagcgagatggccctcaggctgatgaggaagcaaaggaaagcaaagaagcagcccagctttcagaagcagccccagtgcccacagagccccaggcctcacagctcctggatctgctagatctcctggatggggcttctggggatgtccagcatcctccccatctggacccctccccaggaggtgccctggtacacctgcttgaccttccctgtgtacctccacccccagctcccatcccagatctcaaagtgtttgagcgtgagggagtacagctgaatctgtctttcattcgaccccctgaaaaccctgctttgctgttaatcaccatcactgccaccaacttctcagagggtgatgtcacccatttcatctgccaggctgctgtgcccaagagtctccagctgcagctgcaggcccccagtgggaacacagttccagctcggggtggccttcctatcacccagctcttcagaatcctcaatcctaacaaggcccccctgcggctaaagctgcgcctcacctacgaccactttcaccagtcggtgcaggagatctttgaggtgaacaacttgcctgtggaatcgtggcagtaa

SEQ ID NO: 7942 - RNA, 2358 nt, synthetic construct
  misc_feature 1..2358: note = derived and/or modified sequence opt1 fromc-Jun__Homo_sapiens__BAA33390
  source 1..2358: mol_type = other RNA
atggtggtccccagcctgaagctccaggacctgatcgaggagatccgcggcgccaagacccaggcccaggagcgggaggtgatccagaaggagtgcgcgcacatccgcgcctccttccgggacggggacccggtgcaccgccaccggcagctggccaagctcctgtacgtccacatgctgggctaccccgcccacttcgggcagatggagtgcctcaagctgatcgccagctcccgcttcaccgacaagcgggtgggctacctgggggcgatgctcctgctggacgagcgccacgacgcccacctcctgatcacgaacagcatcaagaacgacctgtcccagggcatccagcccgtgcagggcctcgccctgtgcaccctgagcaccatggggtccgccgagatgtgccgggacctcgcgcccgaggtcgagaagctgctgctccagccgagcccctacgtgcgcaagaaggccatcctgaccgccgtgcacatgatccggaaggtccccgagctgtccagcgtgttcctgcccccgtgcgcccagctgctgcacgagcgccaccacggcatcctcctggggacgatcaccctgatcaccgagctctgcgagcggtcccccgccgcgctgcgccacttccggaaggtggtcccccagctggtgcacatcctccgcaccctggtgacgatgggctacagcaccgagcactccatcagcggggtctccgaccccttcctccaggtgcagatcctccggctgctgcgcatcctcggccggaaccacgaggagagctccgagaccatgaacgacctgctggcccaggtggccaccaacacggacaccagccgcaacgccggcaacgccgtcctcttcgagaccgtgctgaccatcatggacatccggtccgcggccgggctgcgcgtgctcgccgtcaacatcctgggccgcttcctgctcaacagcgaccggaacatccgctacgtggccctgacgagcctgctgcggctcgtgcagtccgaccacagcgccgtccagcgccaccggccgaccgtggtcgagtgcctgcgcgagaccgacgcgtccctgagccggcgcgccctcgagctgtccctggccctcgtgaacagctccaacgtgcgggccatgatgcaggagctgcaggccttcctggagagctgcccgcccgacctccgcgcggactgcgcctccgggatcctgctggccgccgagcggttcgcgcccaccaagcgctggcacatcgacacgatcctccacgtcctgaccaccgccggcacccacgtgcgggacgacgccgtggccaacctgacgcagctcatcggcggggcccaggagctgcacgcgtacagcgtccgccggctgtacaacgccctcgccgaggacatctcccagcagcccctggtccaggtggccgcctggtgcatcggcgagtacggggacctgctcctggcgggcaactgcgaggagatcgagcccctccaggtggacgaggaggaggtgctggccctgctggagaaggtgctccagagccacatgtccctgcccgccacccgcgggtacgccctgaccgccctcatgaagctgagcacccggctgtgcggcgacaacaaccgcatccggcaggtcgtgtccatctacggcagctgcctcgacgtggagctgcagcagcgcgcggtcgagtacgacacgctgttccgcaagtacgaccacatgcgggccgccatcctcgagaagatgcccctggtggagcgcgacgggccgcaggccgacgaggaggcgaaggagtccaaggaggccgcccagctgagcgaggccgcccccgtgcccaccgagccccaggcgtcccagctcctggacctgctcgacctgctggacggcgccagcggggacgtccagcacccgccccacctcgaccccagccccggcggggccctggtgcacctcctcgacctgccgtgcgtgcccccgccgcccgcccccatccccgacctgaaggtcttcgagcgggagggcgtgcagctcaacctgtccttcatccgcccgcccgagaaccccgccctgctcctgatcaccatcaccgcgacgaacttcagcgagggcgacgtgacccacttcatctgccaggccgccgtccccaagtccctgcagctccagctgcaggcccccagcgggaacaccgtgcccgcccggggcgggctgcccatcacccagctgttccgcatcctgaaccccaacaaggcgccgctgcggctcaagctgcgcctgacgtacgaccacttccaccagtccgtgcaggagatcttcgaggtcaacaacctccccgtggagagctggcagtga

SEQ ID NO: 7943 - RNA, 2358 nt, synthetic construct
  misc_feature 1..2358: note = derived and/or modified sequence opt2 fromc-Jun__Homo_sapiens__BAA33390
  source 1..2358: mol_type = other RNA
atggtcgtcccctccctcaagctccaggacctcatcgaggagatccgcggcgccaagacccaggcccaggagcgcgaggtcatccagaaggagtgcgcccacatccgcgcctccttccgcgacggcgaccccgtccaccgccaccgccagctcgccaagctcctctacgtccacatgctcggctaccccgcccacttcggccagatggagtgcctcaagctcatcgcctcctcccgcttcaccgacaagcgcgtcggctacctcggcgccatgctcctcctcgacgagcgccacgacgcccacctcctcatcaccaactccatcaagaacgacctctcccagggcatccagcccgtccagggcctcgccctctgcaccctctccaccatgggctccgccgagatgtgccgcgacctcgcccccgaggtcgagaagctcctcctccagccctccccctacgtccgcaagaaggccatcctcaccgccgtccacatgatccgcaaggtccccgagctctcctccgtcttcctccccccctgcgcccagctcctccacgagcgccaccacggcatcctcctcggcaccatcaccctcatcaccgagctctgcgagcgctcccccgccgccctccgccacttccgcaaggtcgtcccccagctcgtccacatcctccgcaccctcgtcaccatgggctactccaccgagcactccatctccggcgtctccgaccccttcctccaggtccagatcctccgcctcctccgcatcctcggccgcaaccacgaggagtcctccgagaccatgaacgacctcctcgcccaggtcgccaccaacaccgacacctcccgcaacgccggcaacgccgtcctcttcgagaccgtcctcaccatcatggacatccgctccgccgccggcctccgcgtcctcgccgtcaacatcctcggccgcttcctcctcaactccgaccgcaacatccgctacgtcgccctcacctccctcctccgcctcgtccagtccgaccactccgccgtccagcgccaccgccccaccgtcgtcgagtgcctccgcgagaccgacgcctccctctcccgccgcgccctcgagctctccctcgccctcgtcaactcctccaacgtccgcgccatgatgcaggagctccaggccttcctcgagtcctgcccccccgacctccgcgccgactgcgcctccggcatcctcctcgccgccgagcgcttcgcccccaccaagcgctggcacatcgacaccatcctccacgtcctcaccaccgccggcacccacgtccgcgacgacgccgtcgccaacctcacccagctcatcggcggcgcccaggagctccacgcctactccgtccgccgcctctacaacgccctcgccgaggacatctcccagcagcccctcgtccaggtcgccgcctggtgcatcggcgagtacggcgacctcctcctcgccggcaactgcgaggagatcgagcccctccaggtcgacgaggaggaggtcctcgccctcctcgagaaggtcctccagtcccacatgtccctccccgccacccgcggctacgccctcaccgccctcatgaagctctccacccgcctctgcggcgacaacaaccgcatccgccaggtcgtctccatctacggctcctgcctcgacgtcgagctccagcagcgcgccgtcgagtacgacaccctcttccgcaagtacgaccacatgcgcgccgccatcctcgagaagatgcccctcgtcgagcgcgacggcccccaggccgacgaggaggccaaggagtccaaggaggccgcccagctctccgaggccgcccccgtccccaccgagccccaggcctcccagctcctcgacctcctcgacctcctcgacggcgcctccggcgacgtccagcaccccccccacctcgacccctcccccggcggcgccctcgtccacctcctcgacctcccctgcgtcccccccccccccgcccccatccccgacctcaaggtcttcgagcgcgagggcgtccagctcaacctctccttcatccgcccccccgagaaccccgccctcctcctcatcaccatcaccgccaccaacttctccgagggcgacgtcacccacttcatctgccaggccgccgtccccaagtccctccagctccagctccaggccccctccggcaacaccgtccccgcccgcggcggcctccccatcacccagctcttccgcatcctcaaccccaacaaggcccccctccgcctcaagctccgcctcacctacgaccacttccaccagtccgtccaggagatcttcgaggtcaacaacctccccgtcgagtcctggcagtga

SEQ ID NO: 7944 - RNA, 2358 nt, synthetic construct
  misc_feature 1..2358: note = derived and/or modified sequence opt3 fromc-Jun__Homo_sapiens__BAA33390
  source 1..2358: mol_type = other RNA
atggtggtccccagcctgaagctccaggaccttatcgaggaaattagaggcgccaaaacccaagctcaggagagggaagttatacagaaggagtgcgcacacatccgggcctccttccgcgatggggaccctgtgcatcgacaccgtcagctggcgaaattgttatacgtacatatgctgggatatccagctcactttggtcaaatggaatgtctaaagctcattgcctcttcaagattcacagataaaagggtgggctacctgggggcaatgcttctgttggacgagcggcatgatgcccacctcctgatcactaacagtattaagaatgacctgagccagggaatccagccggtccagggcctcgctttatgcacgctgtccaccatgggttctgcagagatgtgtcgcgatcttgcccccgaagtggagaagttgctgctacaaccttcgccatatgttagaaagaaagctatactcacagccgtgcacatgatcaggaaagtccccgaactgtcaagcgtgtttcttcctccatgcgcgcagctgttgcatgagcggcaccatgggattctcctgggaactatcaccttaattacagagctgtgtgaacgcagtcccgcagccctccgacacttcagaaaggtagttcctcagcttgtgcacatcctgaggaccttggtcactatgggctactccacagagcattctataagcggcgtgtccgacccatttctacaggtgcaaattctgcggctcctgcgtatccttgggcgcaaccacgaagagtcaagtgaaaccatgaatgatctgttggctcaggtcgccacgaacactgacaccagcagaaatgcaggaaacgctgttctcttcgagacagtgctgactattatggatatcaggtctgccgcgggtttacgggtactggccgtgaatatcctaggccgatttctcctgaactccgaccgcaatattagatatgtcgcacttacctcattgctgaggctcgtgcagagcgatcatagtgctgttcaacggcaccgcccgacagtggtcgagtgcctgagagaaaccgacgcctctctttccaggcgtgctctggagttgagcctcgccctggtgaactcgtctaatgtacgggcaatgatgcaggaattacaggccttcctggagtcctgtccccctgacctacgagctgattgcgcgtcagggatactcctggcagccgaaagatttgctccaacgaaaaggtggcatatcgacactattcttcacgttttgacaaccgccggaactcacgtgcgcgatgacgcagtcgccaacctgacacagctcatcggcggtgctcaagagctgcatgcctacagtgtgcggagattatataatgcactggcggaggatataagccagcagccccttgtccaggtggctgcctggtgtattggggaatacggagacttgctcctggcaggcaactgcgaggaaatcgagcctctacaagttgatgaagaggaggtgctggccctcctggaaaaggtacttcagtcccacatgtctttgccagctaccaggggctacgccctgacggcattaatgaagctcagcacccgcctgtgtggggacaataaccgaatccggcaggtcgtgtcaatttatggaagttgccttgatgttgagctgcagcaacgtgctgtggaatacgacacattgttcagaaaatatgatcatatgagggccgcgatcctcgagaagatgcccctggtcgagcgcgacggtccgcaggccgacgaagaggctaaagaatccaaggaggcagcccagctaagcgaagctgcccctgtgcccactgagccacaggcatctcaactgctcgatctgcttgacttgctggatggcgcgtcaggggacgtacagcaccctccccacttagatccaagtcccggaggcgccctcgtgcatctgcttgacctgccttgcgttccaccgccccctgctccaattcccgatctaaaagtctttgagcgggaaggtgtgcagctcaacctgagcttcataagacctccagagaatcccgccttgctgttaatcaccattacagcaactaacttttccgaaggggacgtgacccacttcatctgtcaagctgccgtcccgaagtctctccagctgcagcttcaggcaccttcgggcaatacagttccagccaggggaggcctgcccatcacccaattgttccgcattctcaaccctaataaagctcccctgcgactaaagctgcggcttacttacgatcattttcaccagagcgtgcaggagatattcgaagtgaacaatctcccagtagagtcctggcagtga

SEQ ID NO: 7945 - RNA, 2358 nt, synthetic construct
  misc_feature 1..2358: note = derived and/or modified sequence opt4 fromc-Jun__Homo_sapiens__BAA33390
  source 1..2358: mol_type = other RNA
atggtggtgcccagcctgaagctgcaggacctgatcgaggagatcagaggcgccaagacccaggcccaggagagagaggtgatccagaaggagtgcgcccacatcagagccagcttcagagacggcgaccccgtgcacagacacagacagctggccaagctgctgtacgtgcacatgctgggctaccccgcccacttcggccagatggagtgcctgaagctgatcgccagcagcagattcaccgacaagagagtgggctacctgggcgccatgctgctgctggacgagagacacgacgcccacctgctgatcaccaacagcatcaagaacgacctgagccagggcatccagcccgtgcagggcctggccctgtgcaccctgagcaccatgggcagcgccgagatgtgcagagacctggcccccgaggtggagaagctgctgctgcagcccagcccctacgtgagaaagaaggccatcctgaccgccgtgcacatgatcagaaaggtgcccgagctgagcagcgtgttcctgcccccctgcgcccagctgctgcacgagagacaccacggcatcctgctgggcaccatcaccctgatcaccgagctgtgcgagagaagccccgccgccctgagacacttcagaaaggtggtgccccagctggtgcacatcctgagaaccctggtgaccatgggctacagcaccgagcacagcatcagcggcgtgagcgaccccttcctgcaggtgcagatcctgagactgctgagaatcctgggcagaaaccacgaggagagcagcgagaccatgaacgacctgctggcccaggtggccaccaacaccgacaccagcagaaacgccggcaacgccgtgctgttcgagaccgtgctgaccatcatggacatcagaagcgccgccggcctgagagtgctggccgtgaacatcctgggcagattcctgctgaacagcgacagaaacatcagatacgtggccctgaccagcctgctgagactggtgcagagcgaccacagcgccgtgcagagacacagacccaccgtggtggagtgcctgagagagaccgacgccagcctgagcagaagagccctggagctgagcctggccctggtgaacagcagcaacgtgagagccatgatgcaggagctgcaggccttcctggagagctgcccccccgacctgagagccgactgcgccagcggcatcctgctggccgccgagagattcgcccccaccaagagatggcacatcgacaccatcctgcacgtgctgaccaccgccggcacccacgtgagagacgacgccgtggccaacctgacccagctgatcggcggcgcccaggagctgcacgcctacagcgtgagaagactgtacaacgccctggccgaggacatcagccagcagcccctggtgcaggtggccgcctggtgcatcggcgagtacggcgacctgctgctggccggcaactgcgaggagatcgagcccctgcaggtggacgaggaggaggtgctggccctgctggagaaggtgctgcagagccacatgagcctgcccgccaccagaggctacgccctgaccgccctgatgaagctgagcaccagactgtgcggcgacaacaacagaatcagacaggtggtgagcatctacggcagctgcctggacgtggagctgcagcagagagccgtggagtacgacaccctgttcagaaagtacgaccacatgagagccgccatcctggagaagatgcccctggtggagagagacggcccccaggccgacgaggaggccaaggagagcaaggaggccgcccagctgagcgaggccgcccccgtgcccaccgagccccaggccagccagctgctggacctgctggacctgctggacggcgccagcggcgacgtgcagcaccccccccacctggaccccagccccggcggcgccctggtgcacctgctggacctgccctgcgtgccccccccccccgcccccatccccgacctgaaggtgttcgagagagagggcgtgcagctgaacctgagcttcatcagaccccccgagaaccccgccctgctgctgatcaccatcaccgccaccaacttcagcgagggcgacgtgacccacttcatctgccaggccgccgtgcccaagagcctgcagctgcagctgcaggcccccagcggcaacaccgtgcccgccagaggcggcctgcccatcacccagctgttcagaatcctgaaccccaacaaggcccccctgagactgaagctgagactgacctacgaccacttccaccagagcgtgcaggagatcttcgaggtgaacaacctgcccgtggagagctggcagtga

SEQ ID NO: 7946 - RNA, 2358 nt, synthetic construct
  misc_feature 1..2358: note = derived and/or modified sequence opt5 fromc-Jun__Homo_sapiens__BAA33390
  source 1..2358: mol_type = other RNA
atggtggtccccagcctgaagctccaggacctgatcgaggaaattagaggcgccaaaacccaagctcaggagcgggaagttatccagaaggagtgcgcccacattcgcgcgtccttcagagatggggaccctgtgcatcggcaccgccagcttgctaaactgctctacgtgcatatgctgggatatccggcccactttggccaaatggaatgtcttaagctgatcgcctctagcagattcacagataaacgggtcgggtacctcggagctatgctgctgctcgacgagcgccatgatgcccatctgcttattacgaactccatcaagaatgacctgtctcagggcatccagcccgtgcaggggctcgctctgtgcacccttagcacaatgggatccgccgagatgtgtagagatctggcgcctgaagttgagaagctcctgctgcaaccctctccttatgtgcggaaaaaggccattctcaccgctgtccacatgatccgcaaagtgcccgaactgagctccgtttttcttcctccgtgcgcccagctgctccacgagagacaccatggcattctgcttggcacaatcaccctgattacagagctctgtgaacggagccccgctgccctgcgccacttcagaaaggtggtccctcagctggtgcacatcctccggaccctggtgacgatggggtactctaccgagcattccattagcggagtctctgacccctttcttcaggttcaaatcctgcgcctcctgagaatccttggccggaaccacgaagagtccagcgaaacaatgaatgatctgctcgcccaggtggcgaccaacacagacacctctagaaatgctgggaacgccgtgctgttcgagacggtcctgacaattatggatatccgctccgctgccggactccgggtgctggccgttaatattcttggcagatttctgctcaacagcgaccgcaatatccggtatgtggctctgacctccctgcttagactcgtccagtctgatcatagcgcggtgcaacgccaccggcctacagttgtggagtgcctgagagaaaccgacgcctccctgagccgccgggctctcgagctgtctcttgccctggtcaactccagcaatgtgagagccatgatgcaggaactccaggctttcctggagtcttgtcccccggacctgcgcgccgattgcgcgagcgggattcttctcgctgccgaacggtttgcccctaccaaaagatggcatatcgacacaatcctgcacgtcctgacgaccgctggaacacacgtgcgggatgacgccgttgctaacctcacccagctgattggcggcgcccaagagcttcatgcgtactccgtgcgcagactgtataatgccctcgctgaggatatctctcagcagcccctggtccaggtggccgcttggtgtattggggaatacggagacctgcttctcgccggcaactgcgaggaaatcgagcctctgcaagttgatgaagaggaggtgctggcgctcctggaaaaggtccttcagagccacatgtccctgcccgccacacgggggtacgctctcaccgccctgatgaagctgagcacgagactttgtggagacaataaccgcattagacaggtggtgtctatctatggctcctgcctcgatgttgagctgcagcaacgggctgtcgaatacgacacactgttccgcaaatatgatcatatgagagccgccatcctcgagaagatgcccctggtggagcgggacgggcctcaggctgacgaagaggcgaaagaaagcaaggaggccgctcagctttctgaagccgccccggtgcccaccgagcctcaggcttcccaactgctcgatctgctggaccttctggatggagccagcggcgacgtccagcatccccctcacctcgatccctccccgggcggggcgctggtgcacctcctggaccttccttgcgttccccctccccctgctcccattccggatctgaaagtgtttgagcgcgaaggagtccagctcaacctgtctttcatcagacctcccgagaatcccgccctgcttctgattaccatcacagccaccaactttagcgaaggcgacgtgacacacttcatttgtcaagctgccgttcctaagtccctccagctgcagctccaggcgccgtctgggaatacggtgcccgctcggggaggcctgcctatcacccaacttttccgcattctgaaccccaataaagcccctctcagactgaagctgcggcttacatacgatcattttcaccagagcgtccaggagatcttcgaagtgaacaatctgcccgttgagtcctggcagtga

SEQ ID NO: 7947 - protein, 331 aa, synthetic construct
  REGION 1..331: note = c-Jun__Homo_sapiens__P05412
MTAKMETTFYDDALNASFLPSESGPYGYSNPKILKQSMTLNLADPVGSLKPHLRAKNSDLLTSPDVGLLKLASPELERLIIQSSNGHITTTPTPTQFLCPKNVTDEQEGFAEGFVRALAELHSQNTLPSVTSAAQPVNGAGMVAPAVASVAGGSGSGGFSASLHSEPPVYANLSNFNPGALSSGGGAPSYGAAGLAFPAQPQQQQQPPHHLPQQMPVQHPRLQALKEEPQTVPEMPGETPPLSPIDMESQERIKAERKRMRNRIAASKCRKRKLERIARLEEKVKTLKAQNSELASTANMLREQVAQLKQKVMNHVNSGCQLMLTQQLQTF

SEQ ID NO: 7948 - RNA, 996 nt, synthetic construct
  misc_feature 1..996: note = c-Jun__Homo_sapiens__AAA59197
  source 1..996: mol_type = other RNA
atgactgcaaagatggaaacgaccttctatgacgatgccctcaacgcctcgttcctcccgtccgagagcggaccttatggctacagtaaccccaagatcctgaaacagagcatgaccctgaacctggccgacccagtggggagcctgaagccgcacctccgcgccaagaactcggacctcctcacctcgcccgacgtggggctgctcaagctggcgtcgcccgagctggagcgcctgataatccagtccagcaacgggcacatcaccaccacgccgacccccacccagttcctgtgccccaagaacgtgacagatgagcaggaggggttcgccgagggcttcgtgcgcgccctggccgaactgcacagccagaacacgctgcccagcgtcacgtcggcggcgcagccggtcaacggggcaggcatggtggctcccgcggtagcctcggtggcagggggcagcggcagcggcggcttcagcgccagcctgcacagcgagccgccggtctacgcaaacctcagcaacttcaacccaggcgcgctgagcagcggcggcggggcgccctcctacggcgcggccggcctggcctttcccgcgcaaccccagcagcagcagcagccgccgcaccacctgccccagcagatgcccgtgcagcacccgcggctgcaggccctgaaggaggagcctcagacagtgcccgagatgcccggcgagacaccgcccctgtcccccatcgacatggagtcccaggagcggatcaaggcggagaggaagcgcatgaggaaccgcatcgctgcctccaagtgccgaaaaaggaagctggagagaatcgcccggctggaggaaaaagtgaaaaccttgaaagctcagaactcggagctggcgtccacggccaacatgctcagggaacaggtggcacagcttaaacagaaagtcatgaaccacgttaacagtgggtgccaactcatgctaacgcagcagttgcaaacattttga

SEQ ID NO: 7949 - RNA, 996 nt, synthetic construct
  misc_feature 1..996: note = derived and/or modified sequence opt1 fromc-Jun__Homo_sapiens__AAA59197
  source 1..996: mol_type = other RNA
atgaccgccaagatggagaccacgttctacgacgacgccctgaacgcgagcttcctcccctccgagagcggcccgtacgggtactccaaccccaagatcctgaagcagagcatgaccctgaacctcgccgaccccgtgggctccctgaagccccacctccgcgccaagaacagcgacctgctgacctccccggacgtcgggctgctcaagctggccagccccgagctggagcggctcatcatccagtccagcaacggccacatcaccacgacccccacccccacccagttcctgtgcccgaagaacgtgacggacgagcaggaggggttcgccgagggcttcgtgcgcgcgctggccgagctccactcccagaacaccctgcccagcgtcacctccgccgcccagcccgtgaacggcgcggggatggtggcccccgccgtcgccagcgtggccggcgggtccggcagcgggggcttctccgcgagcctgcactccgagccgcccgtgtacgccaacctcagcaacttcaaccccggcgccctgagctccgggggcggggcccccagctacggcgccgcgggcctggccttcccggcccagccccagcagcagcagcagccgccccaccacctcccccagcagatgcccgtccagcacccccggctgcaggccctgaaggaggagccccagaccgtgccggagatgcccggggagacgccgcccctctcccccatcgacatggagagccaggagcgcatcaaggccgagcggaagcgcatgcggaaccgcatcgcggcctccaagtgccggaagcgcaagctggagcggatcgcccgcctggaggagaaggtgaagaccctcaaggcccagaacagcgagctggcctccaccgcgaacatgctgcgggagcaggtcgcccagctcaagcagaaggtgatgaaccacgtgaacagcggctgccagctgatgctgacccagcagctccagacgttctga

SEQ ID NO: 7950 - RNA, 996 nt, synthetic construct
  misc_feature 1..996: note = derived and/or modified sequence opt2 fromc-Jun__Homo_sapiens__AAA59197
  source 1..996: mol_type = other RNA
atgaccgccaagatggagaccaccttctacgacgacgccctcaacgcctccttcctcccctccgagtccggcccctacggctactccaaccccaagatcctcaagcagtccatgaccctcaacctcgccgaccccgtcggctccctcaagccccacctccgcgccaagaactccgacctcctcacctcccccgacgtcggcctcctcaagctcgcctcccccgagctcgagcgcctcatcatccagtcctccaacggccacatcaccaccacccccacccccacccagttcctctgccccaagaacgtcaccgacgagcaggagggcttcgccgagggcttcgtccgcgccctcgccgagctccactcccagaacaccctcccctccgtcacctccgccgcccagcccgtcaacggcgccggcatggtcgcccccgccgtcgcctccgtcgccggcggctccggctccggcggcttctccgcctccctccactccgagccccccgtctacgccaacctctccaacttcaaccccggcgccctctcctccggcggcggcgccccctcctacggcgccgccggcctcgccttccccgcccagccccagcagcagcagcagcccccccaccacctcccccagcagatgcccgtccagcacccccgcctccaggccctcaaggaggagccccagaccgtccccgagatgcccggcgagaccccccccctctcccccatcgacatggagtcccaggagcgcatcaaggccgagcgcaagcgcatgcgcaaccgcatcgccgcctccaagtgccgcaagcgcaagctcgagcgcatcgcccgcctcgaggagaaggtcaagaccctcaaggcccagaactccgagctcgcctccaccgccaacatgctccgcgagcaggtcgcccagctcaagcagaaggtcatgaaccacgtcaactccggctgccagctcatgctcacccagcagctccagaccttctga

SEQ ID NO: 7951 - RNA, 996 nt, synthetic construct
  misc_feature 1..996: note = derived and/or modified sequence opt3 fromc-Jun__Homo_sapiens__AAA59197
  source 1..996: mol_type = other RNA
atgaccgccaagatggagacaactttctacgacgatgctctgaacgcatcctttctcccctccgaatctggcccttatgggtactcaaatccaaaaatccttaagcagagtatgacgctgaacttggccgacccggtgggtagcttaaaaccccacctgagagcgaagaatagcgatctactcacctctcctgacgtcggactgcttaaactggcttcgccagagttggaaaggctcattatacaatcaagcaacggccatatcacaactacccccacacctacccagttcctgtgcccaaagaatgttactgatgagcaggaagggtttgccgagggattcgtgcgggcactggccgagctccacagtcagaacacattaccctccgtaacctctgctgcacaacctgtgaatggcgccggtatggtcgctccagccgtggcgagcgttgcagggggatccggctcaggcgggtttagtgccagcctgcattctgaaccgcccgtgtatgctaacctttccaatttcaaccctggagccttgtcaagcggtggcggggcaccaagttacggagctgccggcctggcgtttcccgcccagcctcagcagcaacagcagccaccccaccatctaccgcagcaaatgcctgtccagcacccccgcctccaggcactgaaggaggaaccacaaacggtgcctgagatgcccggtgagactccacccctttctcctattgacatggaatcccaggagcgaatcaaagctgaacgtaagagaatgaggaatcggattgccgctagcaaatgtcgcaagagaaaactggagaggatcgcccggttggaagagaaggtaaagaccctcaaagcacagaactcggagctggcctctacagctaatatgttacgcgaacaggttgcgcaactgaagcagaaagtgatgaaccacgtcaattccgggtgccagctcatgcttactcagcaactgcagaccttctga

SEQ ID NO: 7952 - RNA, 996 nt, synthetic construct
  misc_feature 1..996: note = derived and/or modified sequence opt4 fromc-Jun__Homo_sapiens__AAA59197
  source 1..996: mol_type = other RNA
atgaccgccaagatggagaccaccttctacgacgacgccctgaacgccagcttcctgcccagcgagagcggcccctacggctacagcaaccccaagatcctgaagcagagcatgaccctgaacctggccgaccccgtgggcagcctgaagccccacctgagagccaagaacagcgacctgctgaccagccccgacgtgggcctgctgaagctggccagccccgagctggagagactgatcatccagagcagcaacggccacatcaccaccacccccacccccacccagttcctgtgccccaagaacgtgaccgacgagcaggagggcttcgccgagggcttcgtgagagccctggccgagctgcacagccagaacaccctgcccagcgtgaccagcgccgcccagcccgtgaacggcgccggcatggtggcccccgccgtggccagcgtggccggcggcagcggcagcggcggcttcagcgccagcctgcacagcgagccccccgtgtacgccaacctgagcaacttcaaccccggcgccctgagcagcggcggcggcgcccccagctacggcgccgccggcctggccttccccgcccagccccagcagcagcagcagcccccccaccacctgccccagcagatgcccgtgcagcaccccagactgcaggccctgaaggaggagccccagaccgtgcccgagatgcccggcgagaccccccccctgagccccatcgacatggagagccaggagagaatcaaggccgagagaaagagaatgagaaacagaatcgccgccagcaagtgcagaaagagaaagctggagagaatcgccagactggaggagaaggtgaagaccctgaaggcccagaacagcgagctggccagcaccgccaacatgctgagagagcaggtggcccagctgaagcagaaggtgatgaaccacgtgaacagcggctgccagctgatgctgacccagcagctgcagaccttctga

SEQ ID NO: 7953 - RNA, 996 nt, synthetic construct
  misc_feature 1..996: note = derived and/or modified sequence opt5 fromc-Jun__Homo_sapiens__AAA59197
  source 1..996: mol_type = other RNA
atgaccgccaagatggagacaacgttctacgacgatgctctgaacgccagctttctcccctccgaatctggcccttatgggtacagcaatccgaaaatcctgaagcagtccatgacccttaacctggcggaccccgtgggatctctcaaacctcacctgagagctaagaatagcgatcttctgacatcccccgacgtgggcctcctgaaactggcctctcctgagctcgaacggctgattatccaaagctccaacgggcatattaccacaacccccacacctacccagttcctttgcccgaagaatgttacggatgagcaggaaggatttgccgagggcttcgtgcgcgctctggccgagctccacagccagaacaccctgccctctgtgacatccgctgcccaacctgtcaatggggcgggaatggtggcccccgctgttgccagcgtggctggcggctctgggtccggaggctttagcgcctctcttcattccgaacctcccgtctatgcgaacctgagcaatttcaacccgggggccctctcctctggaggcggggctcctagctacggagccgctggcctggcctttcccgcccagcctcagcagcaacagcagcctccccaccatctgccccagcaaatgccggtgcagcaccccagactccaggctctgaaggaggaacctcaaaccgttcccgagatgcctggcgagacacccccgctttcccctatcgacatggaaagccaggagcggattaaagcggaacgcaagagaatgcggaatcgcatcgccgcttctaaatgtagaaagcggaaactggagcgcatcgccagactcgaagagaaggtgaagaccctgaaagcccagaactccgagcttgctagcacggccaatatgctgcgggaacaggtcgcgcaactcaagcagaaagtgatgaaccacgtcaattctgggtgccagctgatgctgacacagcaactccagaccttctga

SEQ ID NO: 7954 - protein, 418 aa, synthetic construct
  REGION 1..418: note = c-Jun__Homo_sapiens__P53677
MIHSLFLINSSGDIFLEKHWKSVVSRSVCDYFFEAQERATEAENVPPVIPTPHHYLLSVYRHKIFFVAVIQTEVPPLFVIEFLHRVVDTFQDYFGVCSEPVIKDNVVVVYEVLEEMLDNGFPLATESNILKELIKPPTILRTVVNTITGSTNVGDQLPTGQLSVVPWRRTGVKYTNNEAYFDVIEEIDAIIDKSGSTITAEIQGVIDACVKLTGMPDLTLSFMNPRLLDDVSFHPCVRFKRWESERILSFIPPDGNFRLLSYHVSAQNLVAIPVYVKHNISFRDSSSLGRFEITVGPKQTMGKTIEGVTVTSQMPKGVLNMSLTPSQGTHTFDPVTKMLSWDVGKINPQKLPSLKGTMSLQAGASKPDENPTINLQFKIQQLAISGLKVNRLDMYGEKYKPFKGIKYMTKAGKFQVRT

SEQ ID NO: 7955 - RNA, 1257 nt, synthetic construct
  misc_feature 1..1257: note = c-Jun__Homo_sapiens__AAH56398
  source 1..1257: mol_type = other RNA
atgatccatagtcttttcttgatcaactcctctggagacattttcctggagaaacattggaaaagtgtggtcagccgttctgtttgtgattacttttttgaggcgcaagagagagctactgaggcagaaaatgtgcctccggttatccctacccctcaccactatctcttaagtgtttaccgccacaagatcttttttgtggccgtgatccagacggaggtcccccctctgtttgtcattgagtttcttcaccgagtggtggacacatttcaggattattttggagtctgttcagagccagtgatcaaagacaatgtagttgtggtttatgaggtattggaagagatgcttgacaatggttttccattggctaccgagtcgaacattcttaaagaactcataaagcctcctaccatccttcgaacggttgtcaacaccatcacaggaagcacgaatgtgggtgaccagcttcccactgggcagctgtcagtggtgccttggcgacggactggggtgaaatataccaacaatgaggcctattttgatgtgattgaagagattgatgcaattattgataaatcaggctccacaattactgctgagatccagggggtgattgatgcctgtgtcaagctgactggcatgccagaccttacactttccttcatgaaccctaggttgttggatgatgtcagcttccatccttgtgttcgtttcaaacgctgggaatctgagcgcatcctctccttcatccctcctgatggaaacttccgcctgctgtcttaccatgtcagtgcacagaatctggttgcaatcccagtgtatgtcaaacataacatcagtttccgggacagtagttcccttggacgctttgaaataacggtgggacccaagcagacgatggggaagaccattgagggagtgactgtcaccagccagatgcccaagggggtcctgaacatgagccttactccatcacaggggacacacacattcgacccagtcacaaagatgctgtcttgggatgtaggaaaaataaatccacaaaagctaccaagtttgaaggggaccatgagtcttcaggctggagcttccaaaccagatgaaaaccccacaattaacctgcagtttaagatccagcagctggccatttctggactcaaggtgaatcgtctggatatgtatggagaaaagtacaaaccctttaagggcataaaatacatgaccaaagctgggaagttccaagttcgaacctga

SEQ ID NO: 7956 - RNA, 1257 nt, synthetic construct
  misc_feature 1..1257: note = derived and/or modified sequence opt1 fromc-Jun__Homo_sapiens__AAH56398
  source 1..1257: mol_type = other RNA
atgatccacagcctgttcctcatcaactccagcggcgacatcttcctggagaagcactggaagtccgtggtcagccgctccgtgtgcgactacttcttcgaggcccaggagcgggccaccgaggcggagaacgtgcccccggtcatccccacgccccaccactacctgctcagcgtgtaccgccacaagatcttcttcgtggccgtcatccagaccgaggtgcccccgctgttcgtgatcgagttcctgcaccgggtcgtggacaccttccaggactacttcggggtgtgctccgagcccgtcatcaaggacaacgtggtggtcgtgtacgaggtgctcgaggagatgctggacaacggcttccccctggccaccgagagcaacatcctcaaggagctgatcaagcccccgaccatcctgcgcacggtcgtgaacaccatcaccgggtccaccaacgtgggcgaccagctccccacggggcagctgagcgtcgtgccctggcggcgcaccggcgtgaagtacaccaacaacgaggcctacttcgacgtcatcgaggagatcgacgccatcatcgacaagtccggcagcaccatcacggcggagatccagggggtgatcgacgcctgcgtcaagctgaccggcatgcccgacctcaccctgtccttcatgaacccgcggctgctcgacgacgtgagcttccacccctgcgtgcgcttcaagcggtgggagtccgagcgcatcctgagcttcatcccgcccgacgggaacttccggctgctctcctaccacgtcagcgcccagaacctggtggccatccccgtgtacgtcaagcacaacatctccttccgcgacagcagctccctgggccggttcgagatcaccgtggggcccaagcagacgatgggcaagaccatcgagggcgtgaccgtcaccagccagatgcccaagggggtgctcaacatgtccctgacgcccagccagggcacccacaccttcgacccggtgaccaagatgctgtcctgggacgtcgggaagatcaacccccagaagctccccagcctgaagggcacgatgtccctgcaggcgggcgccagcaagcccgacgagaacccgaccatcaacctccagttcaagatccagcagctggccatctccgggctgaaggtgaaccgcctcgacatgtacggcgagaagtacaagcccttcaaggggatcaagtacatgaccaaggccggcaagttccaggtgcggacctga

SEQ ID NO: 7957 - RNA, 1257 nt, synthetic construct
  misc_feature 1..1257: note = derived and/or modified sequence opt2 fromc-Jun__Homo_sapiens__AAH56398
  source 1..1257: mol_type = other RNA
atgatccactccctcttcctcatcaactcctccggcgacatcttcctcgagaagcactggaagtccgtcgtctcccgctccgtctgcgactacttcttcgaggcccaggagcgcgccaccgaggccgagaacgtcccccccgtcatccccaccccccaccactacctcctctccgtctaccgccacaagatcttcttcgtcgccgtcatccagaccgaggtcccccccctcttcgtcatcgagttcctccaccgcgtcgtcgacaccttccaggactacttcggcgtctgctccgagcccgtcatcaaggacaacgtcgtcgtcgtctacgaggtcctcgaggagatgctcgacaacggcttccccctcgccaccgagtccaacatcctcaaggagctcatcaagccccccaccatcctccgcaccgtcgtcaacaccatcaccggctccaccaacgtcggcgaccagctccccaccggccagctctccgtcgtcccctggcgccgcaccggcgtcaagtacaccaacaacgaggcctacttcgacgtcatcgaggagatcgacgccatcatcgacaagtccggctccaccatcaccgccgagatccagggcgtcatcgacgcctgcgtcaagctcaccggcatgcccgacctcaccctctccttcatgaacccccgcctcctcgacgacgtctccttccacccctgcgtccgcttcaagcgctgggagtccgagcgcatcctctccttcatcccccccgacggcaacttccgcctcctctcctaccacgtctccgcccagaacctcgtcgccatccccgtctacgtcaagcacaacatctccttccgcgactcctcctccctcggccgcttcgagatcaccgtcggccccaagcagaccatgggcaagaccatcgagggcgtcaccgtcacctcccagatgcccaagggcgtcctcaacatgtccctcaccccctcccagggcacccacaccttcgaccccgtcaccaagatgctctcctgggacgtcggcaagatcaacccccagaagctcccctccctcaagggcaccatgtccctccaggccggcgcctccaagcccgacgagaaccccaccatcaacctccagttcaagatccagcagctcgccatctccggcctcaaggtcaaccgcctcgacatgtacggcgagaagtacaagcccttcaagggcatcaagtacatgaccaaggccggcaagttccaggtccgcacctga

SEQ ID NO: 7958 - RNA, 1257 nt, synthetic construct
  misc_feature 1..1257: note = derived and/or modified sequence opt3 fromc-Jun__Homo_sapiens__AAH56398
  source 1..1257: mol_type = other RNA
atgatccacagcctgttcctcattaactcctctggcgacatatttcttgagaagcattggaaatcagtggtcagtagaagcgtttgcgattacttctttgaagcccaggagagggctaccgaagcagagaatgtgccccctgtaatcccaacaccgcaccattatctgttgtccgtgtaccggcacaagattttctttgtcgccgtgatccaaactgaagttccccctttattcgtgattgagtttctgcatcgcgtcgtggacacgttccaggattattttggggtatgttctgagccagttatcaaagacaacgtggtcgtggtgtacgaagtcctagaggaaatgctcgataatggattccccctggcgaccgagtcgaacatacttaaggagctgatcaaacctccaacaattttgcgaactgttgtgaataccatcacaggttcaaccaacgtaggcgaccagctccccactgggcagctgagcgtggtcccttggcgtagaacaggagtgaagtataccaataacgaggcttactttgatgttattgaagaaatcgacgccataattgataagagtggctccacgatcactgcagagattcaaggtgtgatcgacgcctgcgtcaaactgaccgggatgccagatctcacattatctttcatgaatccgaggctgcttgacgatgtgagctttcacccctgtgtacggttcaagcgctgggaatccgagagaatcttgtcattcattcctccagacggaaactttaggctgctaagttatcacgttagcgctcagaatctcgtggcaatacccgtctacgtgaaacataacatctctttccgggactcctcaagcctgggccgctttgagattactgtcggccctaagcagaccatggggaaaacaatcgaaggagtgaccgttacgagtcagatgccaaagggtgtgcttaatatgtctctgactccctcccaaggcacacacaccttcgatccggtaactaagatgttgagctgggacgtcgggaaaataaaccctcagaagctcccctcgctgaaaggaacaatgtctttacaggccggcgcttccaagccagatgagaatcctaccattaacctgcagtttaaaatccaacagctcgccatctcaggtcttaaggtgaaccgactggacatgtacggggaaaaatataagcccttcaagggaattaaatacatgacgaaggcgggcaaatttcaggttagaacctga

SEQ ID NO: 7959 - RNA, 1257 nt, synthetic construct
  misc_feature 1..1257: note = derived and/or modified sequence opt4 fromc-Jun__Homo_sapiens__AAH56398
  source 1..1257: mol_type = other RNA
atgatccacagcctgttcctgatcaacagcagcggcgacatcttcctggagaagcactggaagagcgtggtgagcagaagcgtgtgcgactacttcttcgaggcccaggagagagccaccgaggccgagaacgtgccccccgtgatccccaccccccaccactacctgctgagcgtgtacagacacaagatcttcttcgtggccgtgatccagaccgaggtgccccccctgttcgtgatcgagttcctgcacagagtggtggacaccttccaggactacttcggcgtgtgcagcgagcccgtgatcaaggacaacgtggtggtggtgtacgaggtgctggaggagatgctggacaacggcttccccctggccaccgagagcaacatcctgaaggagctgatcaagccccccaccatcctgagaaccgtggtgaacaccatcaccggcagcaccaacgtgggcgaccagctgcccaccggccagctgagcgtggtgccctggagaagaaccggcgtgaagtacaccaacaacgaggcctacttcgacgtgatcgaggagatcgacgccatcatcgacaagagcggcagcaccatcaccgccgagatccagggcgtgatcgacgcctgcgtgaagctgaccggcatgcccgacctgaccctgagcttcatgaaccccagactgctggacgacgtgagcttccacccctgcgtgagattcaagagatgggagagcgagagaatcctgagcttcatcccccccgacggcaacttcagactgctgagctaccacgtgagcgcccagaacctggtggccatccccgtgtacgtgaagcacaacatcagcttcagagacagcagcagcctgggcagattcgagatcaccgtgggccccaagcagaccatgggcaagaccatcgagggcgtgaccgtgaccagccagatgcccaagggcgtgctgaacatgagcctgacccccagccagggcacccacaccttcgaccccgtgaccaagatgctgagctgggacgtgggcaagatcaacccccagaagctgcccagcctgaagggcaccatgagcctgcaggccggcgccagcaagcccgacgagaaccccaccatcaacctgcagttcaagatccagcagctggccatcagcggcctgaaggtgaacagactggacatgtacggcgagaagtacaagcccttcaagggcatcaagtacatgaccaaggccggcaagttccaggtgagaacctga

SEQ ID NO: 7960 - RNA, 1257 nt, synthetic construct
  misc_feature 1..1257: note = derived and/or modified sequence opt5 fromc-Jun__Homo_sapiens__AAH56398
  source 1..1257: mol_type = other RNA
atgatccacagcctgttcctcattaactcctctggcgacatctttctggagaagcattggaaaagcgtggtctccagatctgtttgcgattacttctttgaagcccaggagcgggctaccgaagccgagaatgtgccccctgtgattccgacaccccaccattatcttctgagcgtctaccgccacaagatcttctttgtggcggttattcaaacggaagtgcctcccctcttcgtcatcgagtttctgcatagagtggttgacaccttccaggattattttggggtgtgttccgagcctgtcatcaaagacaacgtggtggtcgtttacgaagtgcttgaggaaatgctggataatggattccccctcgctacagagtctaacattctgaaggagctgatcaaacctccgaccattctccggacagtggtcaataccatcacaggcagcaccaacgtgggggaccagctgcccacgggacagctttccgttgtgccttggcgcagaaccggcgtcaagtatacaaataacgaagcctactttgatgtgattgaggaaatcgacgccattatcgataagagcgggtctaccatcacagctgagattcaaggagttatcgacgcctgcgtgaaactgaccggcatgcccgatctcacgctgtccttcatgaatcctcggcttctggacgatgtcagctttcacccctgtgtgcgcttcaagagatgggaatctgagcggattctctccttcatcccgcctgacggcaactttcgcctgctgagctatcacgtctctgctcagaatctcgtggccattcccgtttacgtgaaacataacatctccttcagagacagctcctctctggggcggtttgagatcacagtcggacctaagcagaccatgggcaaaacaattgaaggggtgaccgttaccagccagatgcccaagggagtgcttaatatgtccctgacacccagccaaggcacgcacaccttcgatcctgtcacaaagatgctctcttgggacgtggggaaaatcaacccgcagaagctgccctcccttaaaggaaccatgagcctgcaggcgggcgcctctaagcctgatgagaatcccacaattaacctccagtttaaaatccaacagctggctattagcggcctgaaggtgaaccgcctcgacatgtacggggaaaaatataagcctttcaagggaatcaaatacatgaccaaggccggcaaatttcaggttagaacgtga

SEQ ID NO: 7961 - protein, 158 aa, synthetic construct
  REGION 1..158: note = c-Jun__Homo_sapiens__P61966
MMRFMLLFSRQGKLRLQKWYLATSDKERKKMVRELMQVVLARKPKMCSFLEWRDLKVVYKRYASLYFCCAIEGQDNELITLELIHRYVELLDKYFGSVCELDIIFNFEKAYFILDEFLMGGDVQDTSKKSVLKAIEQADLLQEEDESPRSVLEEMGLA

SEQ ID NO: 7962 - RNA, 477 nt, synthetic construct
  misc_feature 1..477: note = c-Jun__Homo_sapiens__BAA33391
  source 1..477: mol_type = other RNA
atgatgcggttcatgctattattcagccggcagggaaaactgcggctgcaaaaatggtacctggccacttcggacaaggaacggaagaagatggtgcgcgagctcatgcaggttgtcctggctcgaaagcccaagatgtgcagcttcctggagtggagggacctcaaagttgtctataagagatatgccagcctctacttctgctgcgccatcgagggccaagacaatgagctcatcacactggagctgatccaccgatacgtggagctcttagacaaatactttggcagtgtgtgcgagctggacatcatcttcaactttgagaaggcctacttcatcctggatgagtttttgatggggggggatgtccaggacacctccaagaagagtgtgctgaaagccatcgagcaggctgacctactgcaagaggaggatgagtcgccacggagtgtgctggaggagatgggtttggcatag

SEQ ID NO: 7963 - RNA, 477 nt, synthetic construct
  misc_feature 1..477: note = derived and/or modified sequence opt1 fromc-Jun__Homo_sapiens__BAA33391
  source 1..477: mol_type = other RNA
atgatgcgcttcatgctcctgttcagccggcagggcaagctgcgcctgcagaagtggtacctcgccacctccgacaaggagcggaagaagatggtgcgcgagctgatgcaggtcgtgctggcccggaagcccaagatgtgcagcttcctcgagtggcgcgacctgaaggtggtctacaagcggtacgcgtccctgtacttctgctgcgccatcgaggggcaggacaacgagctcatcaccctggagctgatccaccgctacgtggagctcctggacaagtacttcggcagcgtgtgcgagctggacatcatcttcaacttcgagaaggcctacttcatcctcgacgagttcctgatgggcggggacgtccaggacacgtccaagaagtccgtgctgaaggccatcgagcaggccgacctcctgcaggaggaggacgagagcccgcggagcgtgctggaggagatggggctcgcgtga

SEQ ID NO: 7964 - RNA, 477 nt, synthetic construct
  misc_feature 1..477: note = derived and/or modified sequence opt2 fromc-Jun__Homo_sapiens__BAA33391
  source 1..477: mol_type = other RNA
atgatgcgcttcatgctcctcttctcccgccagggcaagctccgcctccagaagtggtacctcgccacctccgacaaggagcgcaagaagatggtccgcgagctcatgcaggtcgtcctcgcccgcaagcccaagatgtgctccttcctcgagtggcgcgacctcaaggtcgtctacaagcgctacgcctccctctacttctgctgcgccatcgagggccaggacaacgagctcatcaccctcgagctcatccaccgctacgtcgagctcctcgacaagtacttcggctccgtctgcgagctcgacatcatcttcaacttcgagaaggcctacttcatcctcgacgagttcctcatgggcggcgacgtccaggacacctccaagaagtccgtcctcaaggccatcgagcaggccgacctcctccaggaggaggacgagtccccccgctccgtcctcgaggagatgggcctcgcctga

SEQ ID NO: 7965 - RNA, 477 nt, synthetic construct
  misc_feature 1..477: note = derived and/or modified sequence opt3 fromc-Jun__Homo_sapiens__BAA33391
  source 1..477: mol_type = other RNA
atgatgagattcatgctgctctttagcaggcagggcaaacttcggctgcaaaagtggtacttggccacctccgacaaggagcgcaaaaagatggtgcgagaattaatgcaggtcgttctggctcgtaaacccaagatgtgctctttcctagagtggagagatctcaaggtggtatataaaaggtacgcatcactgtatttttgttgcgccatcgaagggcaggacaacgagcttattacactggaattgatacaccggtacgtggagctcctggataagtatttcggaagtgtctgtgagctggacatcatttttaatttcgaaaaagcgtactttatcctcgatgagttcttaatgggtggcgacgtgcaggatactagcaagaaatccgttctgaaggctattgaacaagccgaccttttgcaggaggaggatgaatctcctcgctcggtgctggaggaaatggggctagcatga

SEQ ID NO: 7966 - RNA, 477 nt, synthetic construct
  misc_feature 1..477: note = derived and/or modified sequence opt4 fromc-Jun__Homo_sapiens__BAA33391
  source 1..477: mol_type = other RNA
atgatgagattcatgctgctgttcagcagacagggcaagctgagactgcagaagtggtacctggccaccagcgacaaggagagaaagaagatggtgagagagctgatgcaggtggtgctggccagaaagcccaagatgtgcagcttcctggagtggagagacctgaaggtggtgtacaagagatacgccagcctgtacttctgctgcgccatcgagggccaggacaacgagctgatcaccctggagctgatccacagatacgtggagctgctggacaagtacttcggcagcgtgtgcgagctggacatcatcttcaacttcgagaaggcctacttcatcctggacgagttcctgatgggcggcgacgtgcaggacaccagcaagaagagcgtgctgaaggccatcgagcaggccgacctgctgcaggaggaggacgagagccccagaagcgtgctggaggagatgggcctggcctga

SEQ ID NO: 7967 - RNA, 477 nt, synthetic construct
  misc_feature 1..477: note = derived and/or modified sequence opt5 fromc-Jun__Homo_sapiens__BAA33391
  source 1..477: mol_type = other RNA
atgatgagattcatgctgctctttagccggcagggcaagctgcgccttcaaaaatggtacctggccacctccgacaaggagcggaaaaagatggtgagagaactcatgcaggtcgttctggctcgcaaacccaagatgtgctctttccttgagtggagagatctgaaggtggtgtataaacggtacgccagcctctatttttgttgcgcgatcgaagggcaggacaacgagctgattacactggaactcatccaccgctacgtcgagctgcttgataagtatttcggatccgtgtgtgagctggacattatctttaatttcgaaaaagcctactttattctcgatgagttcctgatgggcggggacgttcaggatacgtctaagaaaagcgtgcttaaggctatcgaacaagccgacctgctccaggaggaggatgaatcccctagatctgtcctggaggaaatgggactggcttga

SEQ ID NO: 7968 - protein, 302 aa, synthetic construct
  REGION 1..302: note = c-Jun__Homo_sapiens__Q63HQ0
MGNCCWTQCFGLLRKEAGRLQRVGGGGGSKYFRTCSRGEHLTIEFENLVESDEGESPGSSHRPLTEEEIVDLRERHYDSIAEKQKDLDKKIQKELALQEEKLRLEEEALYAAQREAARAAKQRKLLEQERQRIVQQYHPSNNGEYQSSGPEDDFESCLRNMKSQYEVFRSSRLSSDATVLTPNTESSCDLMTKTKSTSGNDDSTSLDLEWEDEEGMNRMLPMRERSKTEEDILRAALKYSNKKTGSNPTSASDDSNGLEWENDFVSAEMDDNGNSEYSGFVNPVLELSDSGIRHSDTDQQTR

SEQ ID NO: 7969 - RNA, 909 nt, synthetic construct
  misc_feature 1..909: note = c-Jun__Homo_sapiens__AAY40962
  source 1..909: mol_type = other RNA
atggggaactgctgctggacgcagtgcttcggactgcttcgcaaggaagcggggcggctgcagcgagtaggcggcggcggaggatccaagtattttagaacatgctcaagaggtgagcacttaacaatagagtttgagaatctagtagaaagtgatgaaggggagagcccaggaagcagtcataggcctcttactgaggaagaaattgttgacctaagagaaaggcattatgattccattgccgaaaaacaaaaagatcttgataagaaaattcaaaaagagttagccttacaagaagagaagttaagactagaagaagaagctttatacgctgcacagcgtgaagcagccagggcagcaaagcagcgaaagctcttggagcaagaaaggcagagaattgtgcagcaatatcatccttccaacaatggagaatatcaaagttcaggaccagaagatgacttcgaatcttgtttgagaaatatgaagtcacagtatgaagtttttcgaagtagtagactctcatcagatgctacagttttgacaccaaatacagaaagcagttgtgatttaatgaccaaaactaaatcaactagtggaaatgacgacagcacatccttagatctagagtgggaagatgaagaaggaatgaatagaatgcttccaatgagagaacgttccaaaacagaggaagacattctacgggcagcacttaagtatagcaacaagaagactggaagtaatcctacatcagcctctgatgattccaatgggctggagtgggaaaatgattttgttagtgccgaaatggatgataatggaaattccgagtattctggatttgtaaatcctgtattagaactgtctgattctggcataaggcattctgacacagatcaacagactcgatag

SEQ ID NO: 7970 - RNA, 909 nt, synthetic construct
  misc_feature 1..909: note = derived and/or modified sequence opt1 fromc-Jun__Homo_sapiens__AAY40962
  source 1..909: mol_type = other RNA
atgggcaactgctgctggacccagtgcttcgggctgctccgcaaggaggccggccggctgcagcgcgtcgggggcgggggcggcagcaagtacttccggacctgctcccgcggggagcacctgacgatcgagttcgagaacctcgtggagagcgacgagggcgagtcccccgggagctcccaccggccgctgaccgaggaggagatcgtggacctgcgcgagcggcactacgacagcatcgccgagaagcagaaggacctcgacaagaagatccagaaggagctggcgctgcaggaggagaagctccgcctggaggaggaggccctgtacgccgcccagcgggaggccgcgcgcgccgccaagcagcggaagctcctggagcaggagcgccagcggatcgtgcagcagtaccacccctccaacaacggcgagtaccagagctccgggcccgaggacgacttcgagagctgcctgcgcaacatgaagtcccagtacgaggtcttccggagctcccgcctcagctccgacgccaccgtgctgacccccaacacggagagctcctgcgacctgatgaccaagaccaagagcacctccggcaacgacgacagcacgagcctcgacctggagtgggaggacgaggagggcatgaaccggatgctgccgatgcgcgagcggtccaagaccgaggaggacatcctccgcgcggccctgaagtacagcaacaagaagaccgggtccaaccccaccagcgcctccgacgacagcaacggcctggagtgggagaacgacttcgtgtccgccgagatggacgacaacgggaacagcgagtactccggcttcgtcaaccccgtgctcgagctgagcgactccggcatccggcacagcgacacggaccagcagacccgctga

SEQ ID NO: 7971 - RNA, 909 nt, synthetic construct
  misc_feature 1..909: note = derived and/or modified sequence opt2 fromc-Jun__Homo_sapiens__AAY40962
  source 1..909: mol_type = other RNA
atgggcaactgctgctggacccagtgcttcggcctcctccgcaaggaggccggccgcctccagcgcgtcggcggcggcggcggctccaagtacttccgcacctgctcccgcggcgagcacctcaccatcgagttcgagaacctcgtcgagtccgacgagggcgagtcccccggctcctcccaccgccccctcaccgaggaggagatcgtcgacctccgcgagcgccactacgactccatcgccgagaagcagaaggacctcgacaagaagatccagaaggagctcgccctccaggaggagaagctccgcctcgaggaggaggccctctacgccgcccagcgcgaggccgcccgcgccgccaagcagcgcaagctcctcgagcaggagcgccagcgcatcgtccagcagtaccacccctccaacaacggcgagtaccagtcctccggccccgaggacgacttcgagtcctgcctccgcaacatgaagtcccagtacgaggtcttccgctcctcccgcctctcctccgacgccaccgtcctcacccccaacaccgagtcctcctgcgacctcatgaccaagaccaagtccacctccggcaacgacgactccacctccctcgacctcgagtgggaggacgaggagggcatgaaccgcatgctccccatgcgcgagcgctccaagaccgaggaggacatcctccgcgccgccctcaagtactccaacaagaagaccggctccaaccccacctccgcctccgacgactccaacggcctcgagtgggagaacgacttcgtctccgccgagatggacgacaacggcaactccgagtactccggcttcgtcaaccccgtcctcgagctctccgactccggcatccgccactccgacaccgaccagcagacccgctga

SEQ ID NO: 7972 - RNA, 909 nt, synthetic construct
  misc_feature 1..909: note = derived and/or modified sequence opt3 fromc-Jun__Homo_sapiens__AAY40962
  source 1..909: mol_type = other RNA
atgggcaactgctgttggacccagtgcttcgggctgctcagaaaggaggccggaaggcttcaacgggtgggtggcgggggaggcagcaaatactttcgcacatgttcccgaggtgaacacctgactatcgagttcgaaaatttggtcgagtctgacgaaggggagtcacccggaagtagccatcgtcctttaacggaggaagagattgttgatctgagagaaaggcactatgactccatagctgagaagcagaaagatctagacaagaaaatccagaaggagctcgcactgcaggaagagaaacttcggctggaagaggaagccttgtacgcggctcaacgcgaggccgcaagagccgctaagcagaggaagctcctggagcaggaacggcagcgcattgtgcaacagtatcatccatctaacaatggcgagtaccagtcgtcaggcccggaagatgactttgagagctgcctgcgaaacatgaaaagtcagtatgaagtattcagatcctctaggctcagctccgatgcaaccgtgttaacacccaatactgagtcaagttgtgacctgatgaccaagacaaaaagcacctctgggaacgatgactccacttcacttgatttggagtgggaagacgaggaaggaatgaatcggatgctgcctatgcgtgagcgcagcaagacagaagaggatatcctaagagccgctctcaagtacagtaacaaaaagaccggttctaatccaacgtccgccagcgacgactcgaacggcctggagtgggaaaatgattttgtctctgcggagatggacgataacggaaattccgaatattcagggttcgtgaaccccgttcttgagctgagtgacagcggcattaggcactccgatactgaccaacagacccggtga

SEQ ID NO: 7973 - RNA, 909 nt, synthetic construct
  misc_feature 1..909: note = derived and/or modified sequence opt4 fromc-Jun__Homo_sapiens__AAY40962
  source 1..909: mol_type = other RNA
atgggcaactgctgctggacccagtgcttcggcctgctgagaaaggaggccggcagactgcagagagtgggcggcggcggcggcagcaagtacttcagaacctgcagcagaggcgagcacctgaccatcgagttcgagaacctggtggagagcgacgagggcgagagccccggcagcagccacagacccctgaccgaggaggagatcgtggacctgagagagagacactacgacagcatcgccgagaagcagaaggacctggacaagaagatccagaaggagctggccctgcaggaggagaagctgagactggaggaggaggccctgtacgccgcccagagagaggccgccagagccgccaagcagagaaagctgctggagcaggagagacagagaatcgtgcagcagtaccaccccagcaacaacggcgagtaccagagcagcggccccgaggacgacttcgagagctgcctgagaaacatgaagagccagtacgaggtgttcagaagcagcagactgagcagcgacgccaccgtgctgacccccaacaccgagagcagctgcgacctgatgaccaagaccaagagcaccagcggcaacgacgacagcaccagcctggacctggagtgggaggacgaggagggcatgaacagaatgctgcccatgagagagagaagcaagaccgaggaggacatcctgagagccgccctgaagtacagcaacaagaagaccggcagcaaccccaccagcgccagcgacgacagcaacggcctggagtgggagaacgacttcgtgagcgccgagatggacgacaacggcaacagcgagtacagcggcttcgtgaaccccgtgctggagctgagcgacagcggcatcagacacagcgacaccgaccagcagaccagatga

SEQ ID NO: 7974 - RNA, 909 nt, synthetic construct
  misc_feature 1..909: note = derived and/or modified sequence opt5 fromc-Jun__Homo_sapiens__AAY40962
  source 1..909: mol_type = other RNA
atgggcaactgctgttggacccagtgcttcgggctgctcagaaaggaggccggacggctgcaacgcgtgggcgggggaggcgggagcaaatactttagaacatgttcccggggagaacaccttacgatcgagttcgaaaatctggtcgagtctgacgaaggcgagagccccggctcctctcatcgccctctcaccgaggaagagattgttgatctgagagaacggcactatgacagcatcgctgagaagcagaaagatcttgacaagaaaattcagaaggagctggccctccaggaagagaagctgcgcctggaagaggaagcgctctacgctgcccaaagagaggccgctcgggccgctaaacagcgcaagctgcttgagcaggaaagacagcggatcgtgcaacagtatcatccgtccaacaatggggagtaccagtctagcggacccgaagatgactttgagtcctgcctgcgcaacatgaaaagccagtatgaagtgttcagatcttcccggctcagctctgatgccacagtcctgacccctaatacagagtccagctgtgaccttatgaccaagacaaaatctacctccggcaacgatgacagcacgtccctggatctcgagtgggaagacgaggaagggatgaatcgcatgctgcccatgagagagcggtctaagaccgaagaggatattctgagagcggccctcaagtacagcaacaaaaagacaggatccaatcctaccagcgcttctgacgactccaacggcctggagtgggaaaatgattttgtgagcgccgagatggacgataacggaaattctgaatatagcgggttcgttaaccccgtgcttgagctgtccgactctggcatccgccacagcgatacagaccaacagacccggtga

SEQ ID NO: 7975 - protein, 200 aa, synthetic construct
  REGION 1..200: note = c-Jun__Homo_sapiens__Q7Z5Q8
MLGTGKLGFSFVRITALMVSCNRLWVGTGNGVIISIPLTETVILHQGRLLGLRANKTSGVPGNRPGSVIRVYGDENSDKVTPGTFIPYCSMAHAQLCFHGHRDAVKFFVAVPGQVISPQSSSSGTDLTGDKAGPSAQEPGSQTPLKSMLVISGGEGYIDFRMGDEGGESELLGEDLPLEPSVTKAERSHLIVWQVMYGNE

SEQ ID NO: 7976 - RNA, 603 nt, synthetic construct
  misc_feature 1..603: note = c-Jun__Homo_sapiens__AAN12270
  source 1..603: mol_type = other RNA
atgttaggtactggaaaactgggcttctcttttgtgagaattacagctcttatggtgtcttgtaatcgtttgtgggtggggacaggaaatggtgtcattatctccatcccattgacagaaaccgtaatcctccaccagggacgtttactggggctgagggcaaataaaacctcaggtgtaccaggaaatcgtcctggaagtgtaatccgtgtatatggtgatgaaaacagtgataaagtgactccagggacatttataccctattgttcaatggcacatgcacagctttgcttccatgggcaccgggatgctgtgaaattctttgtggcagtcccaggtcaagtcatcagcccacaaagtagcagtagtggcacggatctgacgggtgacaaagcagggccatctgcacaggagcctggtagtcagacgcccttgaagtctatgcttgtcatcagtggaggagagggctacatcgacttccgaatgggtgatgaaggtggagaatcagaacttcttggagaggatcttccacttgaaccttctgtcaccaaagcagaaaggagtcacttgatagtgtggcaagtgatgtatggcaatgagtga

SEQ ID NO: 7977 - RNA, 603 nt, synthetic construct
  misc_feature 1..603: note = derived and/or modified sequence opt1 fromc-Jun__Homo_sapiens__AAN12270
  source 1..603: mol_type = other RNA
atgctgggcaccgggaagctcggcttcagcttcgtgcgcatcaccgccctgatggtctcctgcaaccggctgtgggtggggacgggcaacggggtgatcatcagcatccccctcaccgagaccgtcatcctgcaccagggccgcctgctcggcctgcgggccaacaagacctccggggtgccgggcaaccgccccgggagcgtgatccgggtctacggcgacgagaactccgacaaggtgacgcccgggaccttcatcccctactgcagcatggcgcacgcccagctgtgcttccacggccaccgcgacgccgtgaagttcttcgtcgccgtgccgggccaggtgatcagcccccagagctccagctccgggaccgacctcaccggcgacaaggccgggcccagcgcgcaggagcccggctcccagacgccgctgaagtccatgctggtcatctccggcggggagggctacatcgacttccggatgggggacgagggcggggagagcgagctcctgggcgaggacctgcccctcgagccctccgtgaccaaggccgagcgcagccacctgatcgtgtggcaggtcatgtacggcaacgagtga

SEQ ID NO: 7978 - RNA, 603 nt, synthetic construct
  misc_feature 1..603: note = derived and/or modified sequence opt2 fromc-Jun__Homo_sapiens__AAN12270
  source 1..603: mol_type = other RNA
atgctcggcaccggcaagctcggcttctccttcgtccgcatcaccgccctcatggtctcctgcaaccgcctctgggtcggcaccggcaacggcgtcatcatctccatccccctcaccgagaccgtcatcctccaccagggccgcctcctcggcctccgcgccaacaagacctccggcgtccccggcaaccgccccggctccgtcatccgcgtctacggcgacgagaactccgacaaggtcacccccggcaccttcatcccctactgctccatggcccacgcccagctctgcttccacggccaccgcgacgccgtcaagttcttcgtcgccgtccccggccaggtcatctccccccagtcctcctcctccggcaccgacctcaccggcgacaaggccggcccctccgcccaggagcccggctcccagacccccctcaagtccatgctcgtcatctccggcggcgagggctacatcgacttccgcatgggcgacgagggcggcgagtccgagctcctcggcgaggacctccccctcgagccctccgtcaccaaggccgagcgctcccacctcatcgtctggcaggtcatgtacggcaacgagtga

SEQ ID NO: 7979 - RNA, 603 nt, synthetic construct
  misc_feature 1..603: note = derived and/or modified sequence opt3 fromc-Jun__Homo_sapiens__AAN12270
  source 1..603: mol_type = other RNA
atgctgggcaccgggaagctcggattcagctttgtgagaatcacagcccttatggtctcctgcaacaggctgtgggttggtactggcaatggggtgattatatctatccccttgacggagaccgtaattttacaccagggacggctgctaggcctccgcgctaacaaaacatcaggtgtgcctgggaatcgaccaggaagtgtcatccgtgtgtacggcgacgaaaacagcgataaggttactccgggcaccttcattccctattgttccatggcacatgcccagctgtgctttcacgggcatagagacgcggtgaaattctttgtcgctgtgcctggacaggtaatctctccacagtcgtcaagcagtggtacagatcttaccggcgacaaggccgggccctccgcacaggagcctggatctcaaactccactgaaaagcatgttggttatatccggcggtgaagggtacatcgatttcaggatgggagacgagggcggcgaatcagagctcctgggggaggatctgcccctcgaacctagtgtgacaaaggccgagcggagccacttaattgtctggcaagtgatgtatggaaatgaatga

SEQ ID NO: 7980 - RNA, 603 nt, synthetic construct
  misc_feature 1..603: note = derived and/or modified sequence opt4 fromc-Jun__Homo_sapiens__AAN12270
  source 1..603: mol_type = other RNA
atgctgggcaccggcaagctgggcttcagcttcgtgagaatcaccgccctgatggtgagctgcaacagactgtgggtgggcaccggcaacggcgtgatcatcagcatccccctgaccgagaccgtgatcctgcaccagggcagactgctgggcctgagagccaacaagaccagcggcgtgcccggcaacagacccggcagcgtgatcagagtgtacggcgacgagaacagcgacaaggtgacccccggcaccttcatcccctactgcagcatggcccacgcccagctgtgcttccacggccacagagacgccgtgaagttcttcgtggccgtgcccggccaggtgatcagcccccagagcagcagcagcggcaccgacctgaccggcgacaaggccggccccagcgcccaggagcccggcagccagacccccctgaagagcatgctggtgatcagcggcggcgagggctacatcgacttcagaatgggcgacgagggcggcgagagcgagctgctgggcgaggacctgcccctggagcccagcgtgaccaaggccgagagaagccacctgatcgtgtggcaggtgatgtacggcaacgagtga

SEQ ID NO: 7981 - RNA, 603 nt, synthetic construct
  misc_feature 1..603: note = derived and/or modified sequence opt5 fromc-Jun__Homo_sapiens__AAN12270
  source 1..603: mol_type = other RNA
atgctgggcaccgggaagctcggattcagctttgtgagaatcacagccctgatggtctcctgcaaccggctttgggttggcacggggaatggagtgattatctctattcccctgaccgagacagtgatcctccaccagggccgcctgcttgggctgagagctaacaaaaccagcggagtccctggcaatcggccgggctccgtgattcgcgtttacggggacgaaaactctgataaggtgacacccggaaccttcatcccttattgtagcatggcccatgcgcaactctgctttcacggccatagagacgctgtcaaattctttgtggccgttcccggacaggtgatctcccctcagtctagctccagcgggacagatctgaccggcgacaaggccgggccctctgctcaggagcctggatcccaaacgccgctgaaaagcatgctcgtcatttctggcggcgaagggtacatcgatttccggatgggagacgagggcggggaatccgagctgcttggagaggatctgcccctcgaacctagcgtgaccaaggccgagcgctctcacctgattgtgtggcaggtcatgtatggcaatgaatga

SEQ ID NO: 7982 - protein, 154 aa, synthetic construct
  REGION 1..154: note = c-Jun__Homo_sapiens__Q96PC3
MIHFILLFSRQGKLRLQKWYITLPDKERKKITREIVQIILSRGHRTSSFVDWKELKLVYKRYASLYFCCAIENQDNELLTLEIVHRYVELLDKYFGNVCELDIIFNFEKAYFILDEFIIGGEIQETSKKIAVKAIEDSDMLQEVSTVSQTMGER

SEQ ID NO: 7983 - RNA, 465 nt, synthetic construct
  misc_feature 1..465: note = c-Jun__Homo_sapiens__AAL09586
  source 1..465: mol_type = other RNA
atgatacatttcatattgctcttcagtcgacaagggaaattacggctacagaaatggtacatcactctccctgataaagagaggaagaagatcacccgggaaattgttcagattattctctcccgtggtcacaggacaagcagttttgttgactggaaggagctaaaacttgtttataaaaggtatgctagtttatatttttgctgtgcaatagaaaatcaggacaatgagctcttgacgctagagattgtgcatcgttacgtggagctgctggacaaatattttggaaatgtctgtgagctggatattatctttaattttgaaaaggcttatttcatcctggacgagtttataataggtggggaaattcaggaaacatccaagaaaattgctgtcaaagccattgaagactctgatatgttacaggaggtcagtacggtttcccaaaccatgggagaaagatga

SEQ ID NO: 7984 - RNA, 465 nt, synthetic construct
  misc_feature 1..465: note = derived and/or modified sequence opt1 fromc-Jun__Homo_sapiens__AAL09586
  source 1..465: mol_type = other RNA
atgatccacttcatcctcctgttcagccgccagggcaagctgcggctgcagaagtggtacatcaccctccccgacaaggagcgcaagaagatcacccgggagatcgtgcagatcatcctgtcccgcgggcaccggacgagctccttcgtcgactggaaggagctgaagctcgtgtacaagcgctacgccagcctgtacttctgctgcgccatcgagaaccaggacaacgagctgctcaccctggagatcgtgcaccggtacgtcgagctgctcgacaagtacttcggcaacgtgtgcgagctggacatcatcttcaacttcgagaaggcgtacttcatcctggacgagttcatcatcgggggcgagatccaggagacctccaagaagatcgccgtgaaggccatcgaggacagcgacatgctccaggaggtctccaccgtgagccagacgatgggggagcgctga

SEQ ID NO: 7985 - RNA, 465 nt, synthetic construct
  misc_feature 1..465: note = derived and/or modified sequence opt2 fromc-Jun__Homo_sapiens__AAL09586
  source 1..465: mol_type = other RNA
atgatccacttcatcctcctcttctcccgccagggcaagctccgcctccagaagtggtacatcaccctccccgacaaggagcgcaagaagatcacccgcgagatcgtccagatcatcctctcccgcggccaccgcacctcctccttcgtcgactggaaggagctcaagctcgtctacaagcgctacgcctccctctacttctgctgcgccatcgagaaccaggacaacgagctcctcaccctcgagatcgtccaccgctacgtcgagctcctcgacaagtacttcggcaacgtctgcgagctcgacatcatcttcaacttcgagaaggcctacttcatcctcgacgagttcatcatcggcggcgagatccaggagacctccaagaagatcgccgtcaaggccatcgaggactccgacatgctccaggaggtctccaccgtctcccagaccatgggcgagcgctga

SEQ ID NO: 7986 - RNA, 465 nt, synthetic construct
  misc_feature 1..465: note = derived and/or modified sequence opt3 fromc-Jun__Homo_sapiens__AAL09586
  source 1..465: mol_type = other RNA
atgatccacttcattctgctctttagcagacagggcaaacttaggctgcaaaagtggtacataaccttgcccgacaaggagcggaaaaagatcacacgcgaaattgtgcagatcattttatcccgagggcatcgtacttcttcattcgtcgattggaaagagctgaagctagtttataagagatacgccagtctctatttttgctgtgctatcgaaaaccaggacaatgagctgcttacgctggaaatagtgcacaggtacgtagagttgctcgataaatatttcggaaacgtgtgcgagctggacatcatttttaatttcgaaaaggcatactttatcctggatgagttcattatcggtggcgaaatacaggagaccagcaaaaagattgccgtcaaagcgatcgaggactccgatatgctccaagaagtgtctacagtttcgcagactatgggggagcggtga

SEQ ID NO: 7987 - RNA, 465 nt, synthetic construct
  misc_feature 1..465: note = derived and/or modified sequence opt4 fromc-Jun__Homo_sapiens__AAL09586
  source 1..465: mol_type = other RNA
atgatccacttcatcctgctgttcagcagacagggcaagctgagactgcagaagtggtacatcaccctgcccgacaaggagagaaagaagatcaccagagagatcgtgcagatcatcctgagcagaggccacagaaccagcagcttcgtggactggaaggagctgaagctggtgtacaagagatacgccagcctgtacttctgctgcgccatcgagaaccaggacaacgagctgctgaccctggagatcgtgcacagatacgtggagctgctggacaagtacttcggcaacgtgtgcgagctggacatcatcttcaacttcgagaaggcctacttcatcctggacgagttcatcatcggcggcgagatccaggagaccagcaagaagatcgccgtgaaggccatcgaggacagcgacatgctgcaggaggtgagcaccgtgagccagaccatgggcgagagatga

SEQ ID NO: 7988 - RNA, 465 nt, synthetic construct
  misc_feature 1..465: note = derived and/or modified sequence opt5 fromc-Jun__Homo_sapiens__AAL09586
  source 1..465: mol_type = other RNA
atgatccacttcattctgctctttagcagacagggcaagctgcggcttcaaaaatggtacatcaccctgcccgacaaggagcgcaaaaagattacaagagaaatcgtgcagattatcctctcccgggggcatcgcacgtctagcttcgtcgattggaaagagctgaaacttgtttataagagatacgcctccctgtatttttgctgtgctatcgaaaaccaggacaatgagctcctgaccctggaaattgtgcaccggtacgtggagctcctggataagtatttcggaaacgtctgcgagcttgacatcatttttaatttcgaaaaggcctactttatcctggatgagttcattatcggcggggaaattcaggagacatctaaaaagatcgcggtgaaagctatcgaggacagcgatatgctccaagaagtttccaccgtgtctcagacaatgggagagcgctga

SEQ ID NO: 7989 - protein, 423 aa, synthetic construct
  REGION 1..423: note = c-Jun__Homo_sapiens__Q9BXS5
MSASAVYVLDLKGKVLICRNYRGDVDMSEVEHFMPILMEKEEEGMLSPILAHGGVRFMWIKHNNLYLVATSKKNACVSLVFSFLYKVVQVFSEYFKELEEESIRDNFVIIYELLDELMDFGYPQTTDSKILQEYITQEGHKLETGAPRPPATVTNAVSWRSEGIKYRKNEVFLDVIESVNLLVSANGNVLRSEIVGSIKMRVFLSGMPELRLGLNDKVLFDNTGRGKSKSVELEDVKFHQCVRLSRFENDRTISFIPPDGEFELMSYRLNTHVKPLIWIESVIEKHSHSRIEYMIKAKSQFKRRSTANNVEIHIPVPNDADSPKFKTTVGSVKWVPENSEIVWSIKSFPGGKEYLMRAHFGLPSVEAEDKEGKPPISVKFEIPYFTTSGIQVRYLKIIEKSGYQALPWVRYITQNGDYQLRTQ

SEQ ID NO: 7990 - RNA, 1272 nt, synthetic construct
  misc_feature 1..1272: note = c-Jun__Homo_sapiens__AAK28024
  source 1..1272: mol_type = other RNA
atgtccgccagcgccgtctacgtgctggacctgaagggcaaggtgctcatctgccggaactaccgtggcgacgtggacatgtcagaggtggagcacttcatgcccatcctgatggagaaggaggaggaggggatgctgtcgcccatcctggcccacgggggggtccgtttcatgtggatcaaacacaacaacctgtatctggttgccacatccaagaagaacgcgtgcgtgtcgctggtcttttctttcctctataaggtggtgcaggtgttttccgagtacttcaaggagctggaggaggagagcatccgggacaactttgttatcatctacgagctgctggacgagctcatggacttcggctacccccagaccaccgacagcaagatcctgcaggagtacatcactcaggaaggccacaagctggaaacaggggccccgcggccaccagccaccgtcaccaacgcggtgtcctggcggtccgaaggcatcaagtatcggaagaatgaggtgttcttggacgtcatcgagtctgtcaacctcttggtcagcgccaacggcaatgtcctgcgcagcgagatcgtgggctccatcaagatgcgagtcttcctctcgggcatgcccgagctgcgcctgggcctcaacgacaaggtcctctttgacaacacgggccgcggcaaaagcaaatccgtggagctggaggatgtgaagttccaccagtgtgtgcggctatcacgcttcgagaatgaccgcaccatctccttcatcccacccgacggcgagttcgagctcatgtcctaccggctcaacacccacgtcaagcctttgatatggatcgagtcggtgatcgagaagcactcccacagccgcatcgagtacatgatcaaggccaaaagccagttcaagcggcggtcaacagccaacaacgtggagatccacattcccgtgcccaatgatgccgactcacccaagttcaagacgacggtggggagcgttaagtgggtccccgagaacagcgagatcgtgtggtccatcaagtccttcccgggcggcaaggagtacctgatgcgggcccacttcggcctgcctagtgtggaggccgaagacaaggagggcaagcccccgatcagtgtcaagttcgagatcccttacttcactacctccggcatccaggtgcgctacctgaagatcattgagaagagtgggtaccaggccctgccctgggtgcgttatatcacgcagaatggagattaccagctccggacccagtga

SEQ ID NO: 7991 - RNA, 1272 nt, synthetic construct
  misc_feature 1..1272: note = derived and/or modified sequence opt1 fromc-Jun__Homo_sapiens__AAK28024
  source 1..1272: mol_type = other RNA
atgagcgccagcgccgtgtacgtcctggacctcaagggcaaggtgctgatctgccgcaactaccgcggggacgtggacatgagcgaggtcgagcacttcatgcccatcctgatggagaaggaggaggagggcatgctctccccgatcctggcgcacgggggcgtgcgcttcatgtggatcaagcacaacaacctgtacctcgtggccaccagcaagaagaacgcctgcgtctccctggtgttcagcttcctgtacaaggtggtccaggtgttctccgagtacttcaaggagctcgaggaggagagcatccgggacaacttcgtgatcatctacgagctgctggacgagctcatggacttcgggtacccccagaccacggactccaagatcctgcaggagtacatcacccaggagggccacaagctggagaccggcgcgccccggcccccggccaccgtcacgaacgccgtgagctggcggtccgaggggatcaagtaccgcaagaacgaggtgttcctcgacgtcatcgagagcgtgaacctgctggtgtccgccaacggcaacgtcctccggagcgagatcgtggggtccatcaagatgcgcgtgttcctgagcggcatgcccgagctgcggctcgggctgaacgacaaggtcctgttcgacaacaccggccgcggcaagtccaagagcgtggagctcgaggacgtgaagttccaccagtgcgtccggctgtcccgcttcgagaacgaccggaccatcagcttcatcccgcccgacggggagttcgagctgatgagctaccgcctcaacacccacgtgaagcccctgatctggatcgagtccgtcatcgagaagcacagccactcccggatcgagtacatgatcaaggccaagagccagttcaagcgccggtccacggccaacaacgtggagatccacatccccgtgcccaacgacgcggacagccccaagttcaagaccaccgtcggctccgtgaagtgggtgccggagaacagcgagatcgtctggtccatcaagagcttccccgggggcaaggagtacctgatgcgcgcccacttcggcctcccctccgtggaggccgaggacaaggaggggaagcccccgatcagcgtgaagttcgagatcccctacttcaccacgtccggcatccaggtccggtacctgaagatcatcgagaagtccgggtaccaggccctgccctgggtgcgctacatcacccagaacggcgactaccagctccggacccagtga

SEQ ID NO: 7992 - RNA, 1272 nt, synthetic construct
  misc_feature 1..1272: note = derived and/or modified sequence opt2 fromc-Jun__Homo_sapiens__AAK28024
  source 1..1272: mol_type = other RNA
atgtccgcctccgccgtctacgtcctcgacctcaagggcaaggtcctcatctgccgcaactaccgcggcgacgtcgacatgtccgaggtcgagcacttcatgcccatcctcatggagaaggaggaggagggcatgctctcccccatcctcgcccacggcggcgtccgcttcatgtggatcaagcacaacaacctctacctcgtcgccacctccaagaagaacgcctgcgtctccctcgtcttctccttcctctacaaggtcgtccaggtcttctccgagtacttcaaggagctcgaggaggagtccatccgcgacaacttcgtcatcatctacgagctcctcgacgagctcatggacttcggctacccccagaccaccgactccaagatcctccaggagtacatcacccaggagggccacaagctcgagaccggcgccccccgcccccccgccaccgtcaccaacgccgtctcctggcgctccgagggcatcaagtaccgcaagaacgaggtcttcctcgacgtcatcgagtccgtcaacctcctcgtctccgccaacggcaacgtcctccgctccgagatcgtcggctccatcaagatgcgcgtcttcctctccggcatgcccgagctccgcctcggcctcaacgacaaggtcctcttcgacaacaccggccgcggcaagtccaagtccgtcgagctcgaggacgtcaagttccaccagtgcgtccgcctctcccgcttcgagaacgaccgcaccatctccttcatcccccccgacggcgagttcgagctcatgtcctaccgcctcaacacccacgtcaagcccctcatctggatcgagtccgtcatcgagaagcactcccactcccgcatcgagtacatgatcaaggccaagtcccagttcaagcgccgctccaccgccaacaacgtcgagatccacatccccgtccccaacgacgccgactcccccaagttcaagaccaccgtcggctccgtcaagtgggtccccgagaactccgagatcgtctggtccatcaagtccttccccggcggcaaggagtacctcatgcgcgcccacttcggcctcccctccgtcgaggccgaggacaaggagggcaagccccccatctccgtcaagttcgagatcccctacttcaccacctccggcatccaggtccgctacctcaagatcatcgagaagtccggctaccaggccctcccctgggtccgctacatcacccagaacggcgactaccagctccgcacccagtga

SEQ ID NO: 7993 - RNA, 1272 nt, synthetic construct
  misc_feature 1..1272: note = derived and/or modified sequence opt3 fromc-Jun__Homo_sapiens__AAK28024
  source 1..1272: mol_type = other RNA
atgagcgcctccgctgtgtacgtcctggacctcaagggcaaagttcttatctgcagaaactataggggagatgtggacatgtctgaggtagaacacttcatgcccattctgatggagaaggaagaggaagggatgttgtcacctatattagcacatggtggcgtgcggtttatgtggatcaaacacaataacctgtacctagtcgccaccagtaagaaaaatgcgtgtgtgagcctcgttttctcctttctgtataaggtggtccaggtgttctctgagtactttaaggagcttgaagaggaatcgattcgcgataacttcgtaatcatttatgagctgttggacgagctcatggattttgggtacccacaaacaactgactcaaaaatcctgcaggaatatataacgcaggagggacataagctggaaaccggcgctccgcgaccccctgccacagttactaatgcagtgagctggcgtagtgagggtatcaaatacagaaagaacgaagtcttcctcgatgtgattgagtccgtgaatttactggtctctgccaacgggaatgttcttaggagcgagatcgtgggatccattaaaatgcgggtatttttgtcaggcatgccagaactgcgcctaggcctcaacgacaaggtgctgttcgataataccgggagaggaaagagtaaaagcgtcgagcttgaagacgtgaagtttcaccagtgcgttaggctgtctcggttcgagaacgatcgcacaatctcctttataccccctgacggtgagttcgaattgatgtcataccgactcaatacccatgtgaaaccactgatttggatcgagagcgtcattgaaaagcacagtcactctagaatcgagtatatgatcaaagctaagtcccaattcaaaaggcggagcactgcaaacaatgtggaaattcatatacccgtacctaacgatgccgactcgccaaagtttaagacaaccgttggctctgtgaaatgggtcccggagaactccgaaatcgtgtggtcaattaagagtttccccgggggaaaagagtacttaatgcgtgctcactttggcctgcctagcgtcgaggccgaagacaaggagggtaaaccacccatctccgtgaagttcgaaataccttattttacgacttctgggattcaggttcgctacctcaagatcatcgagaaaagcggatatcaggcgcttccatgggtgagatacattacccagaatggcgattatcaactgaggacacagtga

SEQ ID NO: 7994 - RNA, 1272 nt, synthetic construct
  misc_feature 1..1272: note = derived and/or modified sequence opt4 fromc-Jun__Homo_sapiens__AAK28024
  source 1..1272: mol_type = other RNA
atgagcgccagcgccgtgtacgtgctggacctgaagggcaaggtgctgatctgcagaaactacagaggcgacgtggacatgagcgaggtggagcacttcatgcccatcctgatggagaaggaggaggagggcatgctgagccccatcctggcccacggcggcgtgagattcatgtggatcaagcacaacaacctgtacctggtggccaccagcaagaagaacgcctgcgtgagcctggtgttcagcttcctgtacaaggtggtgcaggtgttcagcgagtacttcaaggagctggaggaggagagcatcagagacaacttcgtgatcatctacgagctgctggacgagctgatggacttcggctacccccagaccaccgacagcaagatcctgcaggagtacatcacccaggagggccacaagctggagaccggcgcccccagaccccccgccaccgtgaccaacgccgtgagctggagaagcgagggcatcaagtacagaaagaacgaggtgttcctggacgtgatcgagagcgtgaacctgctggtgagcgccaacggcaacgtgctgagaagcgagatcgtgggcagcatcaagatgagagtgttcctgagcggcatgcccgagctgagactgggcctgaacgacaaggtgctgttcgacaacaccggcagaggcaagagcaagagcgtggagctggaggacgtgaagttccaccagtgcgtgagactgagcagattcgagaacgacagaaccatcagcttcatcccccccgacggcgagttcgagctgatgagctacagactgaacacccacgtgaagcccctgatctggatcgagagcgtgatcgagaagcacagccacagcagaatcgagtacatgatcaaggccaagagccagttcaagagaagaagcaccgccaacaacgtggagatccacatccccgtgcccaacgacgccgacagccccaagttcaagaccaccgtgggcagcgtgaagtgggtgcccgagaacagcgagatcgtgtggagcatcaagagcttccccggcggcaaggagtacctgatgagagcccacttcggcctgcccagcgtggaggccgaggacaaggagggcaagccccccatcagcgtgaagttcgagatcccctacttcaccaccagcggcatccaggtgagatacctgaagatcatcgagaagagcggctaccaggccctgccctgggtgagatacatcacccagaacggcgactaccagctgagaacccagtga

SEQ ID NO: 7995 - RNA, 1272 nt, synthetic construct
  misc_feature 1..1272: note = derived and/or modified sequence opt5 fromc-Jun__Homo_sapiens__AAK28024
  source 1..1272: mol_type = other RNA
atgagcgcctccgctgtgtacgtcctggacctcaagggcaaagttctgatctgcagaaactatcgcggggatgtggacatgtctgaggtggaacacttcatgcccattcttatggagaaggaagaggaaggaatgctgagccctatcctcgcccatggcggggtccggtttatgtggattaaacacaataacctgtaccttgtggcgacctccaagaaaaatgcttgtgtttctctggtgttcagctttctctataaggtcgtgcaggttttctccgagtactttaaggagctggaagaggaatctatcagagataacttcgtgattatctatgagctgctcgacgagctgatggattttggatacccgcaaacaacggacagcaaaatccttcaggaatatattacccaggagggccataagctggaaacaggggctccccggcctcccgccaccgtcacaaatgccgtgtcctggcgcagcgagggaatcaaatacagaaagaacgaagtgttcctcgatgtcattgagtctgttaatctgcttgtgtccgccaacggcaatgtgctgcggagcgagatcgtcggctctattaaaatgcgcgtgtttctctccgggatgcctgaactgagactgggactcaacgacaaggttctgttcgataataccggccggggaaagagcaaatctgtggagcttgaagacgtcaagtttcaccagtgcgtgcgcctgtccagattcgagaacgatcggacaatcagctttattccccctgacggggagttcgaactcatgtcctaccgcctgaatacccatgttaaaccgcttatctggatcgagtctgtgattgaaaagcacagccactccagaatcgagtatatgattaaagctaagagccaattcaaacggcgctctacggccaacaatgtcgaaatccatattcccgtgcctaacgatgcggactcccccaagtttaagaccacagtcggcagcgtgaaatgggttcctgagaactctgaaatcgtgtggagcatcaagtccttccccgggggaaaagagtacctgatgagagcccactttggcctcccgtctgtcgaggctgaagacaaggagggcaaacctcccattagcgtgaagttcgaaatcccttattttaccacatccgggattcaggttcggtacctgaagatcattgagaaaagcggatatcaggccctgccctgggtgagatacatcacccagaatggcgattatcaactccgcacgcagtga

SEQ ID NO: 7996 - protein, 423 aa, synthetic construct
  REGION 1..423: note = c-Jun__Homo_sapiens__Q9Y6Q5
MSASAVFILDVKGKPLISRNYKGDVAMSKIEHFMPLLVQREEEGALAPLLSHGQVHFLWIKHSNLYLVATTSKNANASLVYSFLYKTIEVFCEYFKELEEESIRDNFVIVYELLDELMDFGFPQTTDSKILQEYITQQSNKLETGKSRVPPTVTNAVSWRSEGIKYKKNEVFIDVIESVNLLVNANGSVLLSEIVGTIKLKVFLSGMPELRLGLNDRVLFELTGRSKNKSVELEDVKFHQCVRLSRFDNDRTISFIPPDGDFELMSYRLSTQVKPLIWIESVIEKFSHSRVEIMVKAKGQFKKQSVANGVEISVPVPSDADSPRFKTSVGSAKYVPERNVVIWSIKSFPGGKEYLMRAHFGLPSVEKEEVEGRPPIGVKFEIPYFTVSGIQVRYMKIIEKSGYQALPWVRYITQSGDYQLRTS

SEQ ID NO: 7997 - RNA, 1272 nt, synthetic construct
  misc_feature 1..1272: note = c-Jun__Homo_sapiens__AAD25870
  source 1..1272: mol_type = other RNA
atgtccgcctcggctgtcttcattctggacgttaagggcaagccattgatcagccgcaactacaagggcgatgtggccatgagcaagattgagcacttcatgcctttgctggtacagcgggaggaggaaggcgccctggccccgctgctgagccacggccaggtccacttcctatggatcaaacacagcaacctctacttggtggccaccacatcgaagaatgccaatgcctccctggtgtactccttcctgtataagacaatagaggtattctgcgaatacttcaaggagctggaggaggagagcatccgggacaactttgtcatcgtctacgagttgctggacgagctcatggactttggcttcccgcagaccaccgacagcaagatcctgcaggagtacatcactcagcagagcaacaagctggagacgggcaagtcacgggtgccacccactgtcaccaacgctgtgtcctggcgctccgagggtatcaagtataagaagaacgaggtcttcattgatgtcatagagtctgtcaacctgctggtcaatgccaacggcagcgtccttctgagcgaaatcgtcggtaccatcaagctcaaggtgtttctgtcaggaatgccagagctgcggctgggcctcaatgaccgcgtgctcttcgagctcactggccgcagcaagaacaaatcagtagagctggaggatgtaaaattccaccagtgcgtgcggctctctcgctttgacaacgaccgcaccatctccttcatcccgcctgatggtgactttgagctcatgtcataccgcctcagcacccaggtcaagccactgatctggattgagtctgtcattgagaagttctcccacagccgcgtggagatcatggtcaaggccaaggggcagtttaagaaacagtcagtggccaacggtgtggagatatctgtgcctgtacccagcgatgccgactcccccagattcaagaccagtgtgggcagcgccaagtatgtgccggagagaaacgtcgtgatttggagtattaagtctttcccggggggcaaggagtacttgatgcgagcccactttggcctccccagtgtggaaaaggaagaggtggagggccggccccccatcggggtcaagtttgagatcccctacttcaccgtctctgggatccaggtccgatacatgaagatcattgagaaaagtggttaccaggccctgccctgggttcgctacatcacccagagtggcgattaccaacttcgtaccagctag

SEQ ID NO: 7998 - RNA, 1272 nt, synthetic construct
  misc_feature 1..1272: note = derived and/or modified sequence opt1 fromc-Jun__Homo_sapiens__AAD25870
  source 1..1272: mol_type = other RNA
atgagcgcctccgccgtgttcatcctggacgtcaagggcaagcccctcatcagccgcaactacaagggggacgtggcgatgtccaagatcgagcacttcatgccgctgctggtgcagcgggaggaggagggcgccctcgcgcccctgctgagccacgggcaggtccacttcctctggatcaagcactccaacctgtacctggtggccaccaccagcaagaacgccaacgcctccctcgtgtacagcttcctgtacaagacgatcgaggtcttctgcgagtacttcaaggagctggaggaggagtccatccgcgacaacttcgtgatcgtgtacgagctcctggacgagctgatggacttcggcttcccccagaccaccgacagcaagatcctccaggagtacatcacccagcagtccaacaagctggagacgggcaagagccgggtgcccccgaccgtcaccaacgccgtgtcctggcgcagcgaggggatcaagtacaagaagaacgaggtcttcatcgacgtgatcgagtccgtgaacctgctcgtcaacgccaacggcagcgtgctgctgtccgagatcgtggggaccatcaagctcaaggtcttcctgagcggcatgcccgagctgcggctcgggctgaacgaccgcgtgctgttcgagctcacgggccggtccaagaacaagagcgtggagctggaggacgtcaagttccaccagtgcgtgcgcctgagccggttcgacaacgaccgcaccatctccttcatcccgcccgacggggacttcgagctcatgagctaccggctgtccacccaggtgaagcccctgatctggatcgagagcgtcatcgagaagttctcccacagccgcgtggagatcatggtcaaggccaagggccagttcaagaagcagtccgtggcgaacggcgtggagatcagcgtccccgtgccctccgacgccgacagcccccggttcaagacctccgtggggagcgccaagtacgtcccggagcgcaacgtggtgatctggtccatcaagagcttccccggcgggaaggagtacctcatgcgggcccacttcggcctgccctccgtcgagaaggaggaggtggagggccggcccccgatcggggtgaagttcgagatcccctacttcacggtcagcggcatccaggtgcgctacatgaagatcatcgagaagtccgggtaccaggccctgccctgggtgcgctacatcacccagagcggcgactaccagctccggacctcctga

SEQ ID NO: 7999 - RNA, 1272 nt, synthetic construct
  misc_feature 1..1272: note = derived and/or modified sequence opt2 fromc-Jun__Homo_sapiens__AAD25870
  source 1..1272: mol_type = other RNA
atgtccgcctccgccgtcttcatcctcgacgtcaagggcaagcccctcatctcccgcaactacaagggcgacgtcgccatgtccaagatcgagcacttcatgcccctcctcgtccagcgcgaggaggagggcgccctcgcccccctcctctcccacggccaggtccacttcctctggatcaagcactccaacctctacctcgtcgccaccacctccaagaacgccaacgcctccctcgtctactccttcctctacaagaccatcgaggtcttctgcgagtacttcaaggagctcgaggaggagtccatccgcgacaacttcgtcatcgtctacgagctcctcgacgagctcatggacttcggcttcccccagaccaccgactccaagatcctccaggagtacatcacccagcagtccaacaagctcgagaccggcaagtcccgcgtcccccccaccgtcaccaacgccgtctcctggcgctccgagggcatcaagtacaagaagaacgaggtcttcatcgacgtcatcgagtccgtcaacctcctcgtcaacgccaacggctccgtcctcctctccgagatcgtcggcaccatcaagctcaaggtcttcctctccggcatgcccgagctccgcctcggcctcaacgaccgcgtcctcttcgagctcaccggccgctccaagaacaagtccgtcgagctcgaggacgtcaagttccaccagtgcgtccgcctctcccgcttcgacaacgaccgcaccatctccttcatcccccccgacggcgacttcgagctcatgtcctaccgcctctccacccaggtcaagcccctcatctggatcgagtccgtcatcgagaagttctcccactcccgcgtcgagatcatggtcaaggccaagggccagttcaagaagcagtccgtcgccaacggcgtcgagatctccgtccccgtcccctccgacgccgactccccccgcttcaagacctccgtcggctccgccaagtacgtccccgagcgcaacgtcgtcatctggtccatcaagtccttccccggcggcaaggagtacctcatgcgcgcccacttcggcctcccctccgtcgagaaggaggaggtcgagggccgcccccccatcggcgtcaagttcgagatcccctacttcaccgtctccggcatccaggtccgctacatgaagatcatcgagaagtccggctaccaggccctcccctgggtccgctacatcacccagtccggcgactaccagctccgcacctcctga

SEQ ID NO: 8000 - RNA, 1272 nt, synthetic construct
  misc_feature 1..1272: note = derived and/or modified sequence opt3 fromc-Jun__Homo_sapiens__AAD25870
  source 1..1272: mol_type = other RNA
atgagcgcctccgctgtgttcatcctggacgtcaagggcaaacccctcatttctagaaactacaagggggatgttgcaatgtcaaaaatagagcactttatgcctcttctggtgcagagggaagaggaaggagccttggcgccattactgagtcatggtcaagtacacttcctatggatcaagcatagcaatctctatctggtggctaccacatccaaaaacgccaatgcatctcttgtctactcgtttctgtataagactattgaggtgttctgcgaatactttaaggagttggaggaagagtcaatccgggacaacttcgttattgtgtatgaactcctggatgagctgatggactttggcttcccgcagacgaccgatagcaaaatcctccaggagtacataacacagcaaagtaataagttagaaactgggaaatcccgcgtgccccctaccgtcacaaacgccgtatcttggcgaagcgagggaatcaagtataaaaagaatgaagtttttattgacgtgatcgagtccgtcaacctgcttgtgaatgctaacggctcagtgttgctgagtgaaattgtcggtaccatcaagctaaaagttttcctcagcgggatgccagagctgcgtcttggactgaatgatagagtgttgtttgagctcactggcaggtctaagaacaaatccgtagaactggaggacgtgaagttccaccagtgtgtccggttatcacgctttgataatgacagaacaattagcttcataccccctgatggcgacttcgaactgatgagttacaggctctctacccaggtgaaaccacttatctggattgagtccgttatcgaaaagtttagccattcgcgggtggagatcatggtcaaagcaaaggggcagttcaagaaacaatctgtggccaacggagtagagatttccgttcccgtgccttcagatgctgacagtccacgctttaagacgagcgtcggttccgccaaatacgtgccggaacgaaatgtcgtgatatggtctatcaagagcttccccggcgggaaagagtatctgatgagagcgcactttggattgccttcagttgaaaaggaggaagtggagggcaggccacccattggtgtaaagttcgagatcccttactttactgtcagtgggatacaggtgcggtatatgaaaattatcgaaaagtccggataccaggcactaccatgggttcgttatatcacccagagcggcgactaccaactgcgcacatcttga

SEQ ID NO: 8001 - RNA, 1272 nt, synthetic construct
  misc_feature 1..1272: note = derived and/or modified sequence opt4 fromc-Jun__Homo_sapiens__AAD25870
  source 1..1272: mol_type = other RNA
atgagcgccagcgccgtgttcatcctggacgtgaagggcaagcccctgatcagcagaaactacaagggcgacgtggccatgagcaagatcgagcacttcatgcccctgctggtgcagagagaggaggagggcgccctggcccccctgctgagccacggccaggtgcacttcctgtggatcaagcacagcaacctgtacctggtggccaccaccagcaagaacgccaacgccagcctggtgtacagcttcctgtacaagaccatcgaggtgttctgcgagtacttcaaggagctggaggaggagagcatcagagacaacttcgtgatcgtgtacgagctgctggacgagctgatggacttcggcttcccccagaccaccgacagcaagatcctgcaggagtacatcacccagcagagcaacaagctggagaccggcaagagcagagtgccccccaccgtgaccaacgccgtgagctggagaagcgagggcatcaagtacaagaagaacgaggtgttcatcgacgtgatcgagagcgtgaacctgctggtgaacgccaacggcagcgtgctgctgagcgagatcgtgggcaccatcaagctgaaggtgttcctgagcggcatgcccgagctgagactgggcctgaacgacagagtgctgttcgagctgaccggcagaagcaagaacaagagcgtggagctggaggacgtgaagttccaccagtgcgtgagactgagcagattcgacaacgacagaaccatcagcttcatcccccccgacggcgacttcgagctgatgagctacagactgagcacccaggtgaagcccctgatctggatcgagagcgtgatcgagaagttcagccacagcagagtggagatcatggtgaaggccaagggccagttcaagaagcagagcgtggccaacggcgtggagatcagcgtgcccgtgcccagcgacgccgacagccccagattcaagaccagcgtgggcagcgccaagtacgtgcccgagagaaacgtggtgatctggagcatcaagagcttccccggcggcaaggagtacctgatgagagcccacttcggcctgcccagcgtggagaaggaggaggtggagggcagaccccccatcggcgtgaagttcgagatcccctacttcaccgtgagcggcatccaggtgagatacatgaagatcatcgagaagagcggctaccaggccctgccctgggtgagatacatcacccagagcggcgactaccagctgagaaccagctga

SEQ ID NO: 8002 - RNA, 1272 nt, synthetic construct
  misc_feature 1..1272: note = derived and/or modified sequence opt5 fromc-Jun__Homo_sapiens__AAD25870
  source 1..1272: mol_type = other RNA
atgagcgcttccgctgtgttcatcctggacgtcaagggcaaacccctcatttctagaaactacaagggggatgttgccatgagcaaaatcgagcactttatgcctctgcttgtgcagcgggaagaggaaggagcgctggctccgctcctgtcccatggccaagtgcacttcctttggattaagcattctaatctgtatctcgtcgccaccacaagcaaaaacgccaatgcttccctggtgtactcttttctgtataagacgatcgaggttttctgcgaatactttaaggagctcgaggaagagagcattcgcgacaacttcgtgatcgtctatgaactgcttgatgagctgatggactttgggttcccccagaccacagattccaaaatcctccaggagtacattacccagcaaagcaataagctggaaacaggaaaatctagagtgcctcccaccgttacaaacgccgtgtcctggcggagcgagggcatcaagtataaaaagaatgaagtctttattgacgtgatcgagtctgtgaaccttctggtcaatgctaacgggtccgttctcctgagcgaaattgtgggaaccatcaagctgaaagtgttcctctctggcatgcctgagctgcgccttggcctgaatgatagagtcctctttgagctgacggggcggtccaagaacaaaagcgtggaacttgaggacgttaagttccaccagtgtgtgcgcctgtccagatttgataatgaccggaccatttctttcattccccctgatggagacttcgaactcatgagctaccgcctgtccacacaggtcaaaccgctgatctggatcgagagcgtgatcgaaaagttttctcattccagagttgagattatggtgaaagccaagggccagttcaagaaacaaagcgtcgcgaacggggtggagatctctgtccccgtgcctagcgatgccgactctccccggtttaagacctccgttggaagcgctaaatacgtgcctgaacgcaatgtcgtgatttggtccatcaagagcttccccggcgggaaagagtatctcatgagagcccactttggactgccgtctgttgaaaaggaggaagtggagggccggcctcccatcggcgtcaagttcgagattccttactttacagtgtccgggatccaggtgcgctatatgaaaattatcgaaaagagcggataccaggcccttccctgggttagatatattacccagtctggcgactaccaactgcggacgtcctga

SEQ ID NO: 8003 - protein, 584 aa, synthetic construct
  REGION 1..584: note = CO8A__Homo_sapiens__P07357
MFAVVFFILSLMTCQPGVTAQEKVNQRVRRAATPAAVTCQLSNWSEWTDCFPCQDKKYRHRSLLQPNKFGGTICSGDIWDQASCSSSTTCVRQAQCGQDFQCKETGRCLKRHLVCNGDQDCLDGSDEDDCEDVRAIDEDCSQYEPIPGSQKAALGYNILTQEDAQSVYDASYYGGQCETVYNGEWRELRYDSTCERLYYGDDEKYFRKPYNFLKYHFEALADTGISSEFYDNANDLLSKVKKDKSDSFGVTIGIGPAGSPLLVGVGVSHSQDTSFLNELNKYNEKKFIFTRIFTKVQTAHFKMRKDDIMLDEGMLQSLMELPDQYNYGMYAKFINDYGTHYITSGSMGGIYEYILVIDKAKMESLGITSRDITTCFGGSLGIQYEDKINVGGGLSGDHCKKFGGGKTERARKAMAVEDIISRVRGGSSGWSGGLAQNRSTITYRSWGRSLKYNPVVIDFEMQPIHEVLRHTSLGPLEAKRQNLRRALDQYLMEFNACRCGPCFNNGVPILEGTSCRCQCRLGSLGAACEQTQTEGAKADGSWSCWSSWSVCRAGIQERRRECDNPAPQNGGASCPGRKVQTQAC

SEQ ID NO: 8004 - RNA, 1755 nt, synthetic construct
  misc_feature 1..1755: note = CO8A__Homo_sapiens__AAA52200
  source 1..1755: mol_type = other RNA
atgtttgctgttgttttcttcatcttgtctttgatgacttgtcagcctggggtaactgcacaggagaaggtgaaccagagagtaagacgggcagctacacccgcagcagttacctgccagctgagcaactggtcagagtggacagattgctttccgtgccaggacaaaaagtaccgacaccggagcctcttgcagccaaacaagtttgggggaaccatctgcagtggtgacatctgggatcaagccagctgctccagttctacaacttgtgtaaggcaagcacagtgtggacaggatttccagtgtaaggagacaggtcgctgcctgaaacgccaccttgtgtgtaatggagaccaggactgccttgatggctctgatgaggacgactgtgaagatgtcagggccattgacgaagactgcagccagtatgaaccaattccaggatcacagaaggcagccttggggtacaatatcctgacccaggaagatgctcagagtgtgtacgatgccagttattatgggggccagtgtgagacggtatacaatggggaatggagggagcttcgatatgactccacctgtgaacgtctctactatggagatgatgagaaatactttcggaaaccctacaactttctgaagtaccactttgaagccctggcagatactggaatctcctcagagttttatgataatgcaaatgaccttctttccaaagttaaaaaagacaagtctgactcatttggagtgaccatcggcataggcccagccggcagccctttattggtgggtgtaggtgtatcccactcacaagacacttcattcttgaacgaattaaacaagtataatgagaagaaattcattttcacaagaatcttcacaaaggtgcagactgcacattttaagatgaggaaggatgacattatgctggatgaaggaatgctgcagtcattaatggagcttccagatcagtacaattatggcatgtatgccaagttcatcaatgactatggcacccattacatcacatctggatccatgggtggcatttatgaatatatcctggtgattgacaaagcaaaaatggaatcccttggtattaccagcagagatatcacgacatgttttggaggctccttgggcattcaatatgaagacaaaataaatgttggtggaggtttatcaggagaccattgtaaaaaatttggaggtggcaaaactgaaagggccaggaaggccatggctgtggaagacattatttctcgggtgcgaggtggcagttctggctggagcggtggcttggcacagaacaggagcaccattacataccgttcctgggggaggtcattaaagtataatcctgttgttatcgattttgagatgcagcctatccacgaggtgctgcggcacacaagcctggggcctctggaggccaagcgccagaacctgcgccgcgccttggaccagtatctgatggaattcaatgcctgccgatgtgggccttgcttcaacaatggggtgcccatcctcgagggcaccagctgcaggtgccagtgccgcctgggtagcttgggtgctgcctgtgagcaaacacagacagaaggagccaaagcagatgggagctggagttgctggagctcctggtctgtatgcagagcaggcatccaggaaaggagaagagagtgtgacaatccagcacctcagaatggaggggcctcgtgtccagggcggaaagtacagacgcaggcttgctga

SEQ ID NO: 8005 - RNA, 1755 nt, synthetic construct
  misc_feature 1..1755: note = derived and/or modified sequence opt1 fromCO8A__Homo_sapiens__AAA52200
  source 1..1755: mol_type = other RNA
atgttcgccgtggtcttcttcatcctgagcctcatgacctgccagcccggcgtgaccgcccaggagaaggtgaaccagcgcgtccggcgcgccgccacgccggccgccgtgacctgccagctgtccaactggagcgagtggaccgactgcttcccctgccaggacaagaagtaccggcaccgctccctgctccagcccaacaagttcgggggcaccatctgcagcggggacatctgggaccaggcctcctgcagctccagcacgacctgcgtgcggcaggcgcagtgcggccaggacttccagtgcaaggagaccgggcgctgcctgaagcggcacctggtctgcaacggcgaccaggactgcctcgacggctccgacgaggacgactgcgaggacgtgcgcgccatcgacgaggactgcagccagtacgagcccatcccggggtcccagaaggccgccctgggctacaacatcctgacccaggaggacgcgcagagcgtgtacgacgcctcctactacgggggccagtgcgagacggtctacaacggggagtggcgggagctccgctacgacagcacgtgcgagcggctgtactacggcgacgacgagaagtacttccgcaagccctacaacttcctgaagtaccacttcgaggccctcgccgacaccggcatctccagcgagttctacgacaacgccaacgacctgctgtccaaggtgaagaaggacaagagcgactccttcggggtgaccatcggcatcgggcccgcgggcagccccctcctggtcggcgtgggggtgagccactcccaggacaccagcttcctgaacgagctcaacaagtacaacgagaagaagttcatcttcacccggatcttcaccaaggtccagaccgcccacttcaagatgcgcaaggacgacatcatgctggacgagggcatgctgcagtccctcatggagctgccggaccagtacaactacgggatgtacgccaagttcatcaacgactacggcacgcactacatcaccagcgggtccatgggcggcatctacgagtacatcctggtgatcgacaaggccaagatggagagcctcgggatcacctcccgggacatcaccacgtgcttcggcgggagcctgggcatccagtacgaggacaagatcaacgtcgggggcggcctgtccggggaccactgcaagaagttcggcgggggcaagaccgagcgcgcccggaaggcgatggccgtggaggacatcatcagccgcgtgcgcgggggctccagcggctggtccgggggcctcgcccagaaccggagcaccatcacctaccggtcctgggggcgcagcctgaagtacaaccccgtggtcatcgacttcgagatgcagcccatccacgaggtgctgcgccacacgtccctcggccccctggaggccaagcggcagaacctgcgccgggccctcgaccagtacctgatggagttcaacgcgtgccgctgcggcccgtgcttcaacaacggggtgcccatcctggagggcaccagctgccggtgccagtgccgcctcgggtccctgggcgccgcctgcgagcagacccagaccgagggggccaaggccgacggcagctggagctgctggtccagctggtccgtctgccgggcgggcatccaggagcgccggcgcgagtgcgacaaccccgcgccccagaacgggggcgccagctgcccggggcggaaggtgcagacgcaggcctgctga

SEQ ID NO: 8006 - RNA, 1755 nt, synthetic construct
  misc_feature 1..1755: note = derived and/or modified sequence opt2 fromCO8A__Homo_sapiens__AAA52200
  source 1..1755: mol_type = other RNA
atgttcgccgtcgtcttcttcatcctctccctcatgacctgccagcccggcgtcaccgcccaggagaaggtcaaccagcgcgtccgccgcgccgccacccccgccgccgtcacctgccagctctccaactggtccgagtggaccgactgcttcccctgccaggacaagaagtaccgccaccgctccctcctccagcccaacaagttcggcggcaccatctgctccggcgacatctgggaccaggcctcctgctcctcctccaccacctgcgtccgccaggcccagtgcggccaggacttccagtgcaaggagaccggccgctgcctcaagcgccacctcgtctgcaacggcgaccaggactgcctcgacggctccgacgaggacgactgcgaggacgtccgcgccatcgacgaggactgctcccagtacgagcccatccccggctcccagaaggccgccctcggctacaacatcctcacccaggaggacgcccagtccgtctacgacgcctcctactacggcggccagtgcgagaccgtctacaacggcgagtggcgcgagctccgctacgactccacctgcgagcgcctctactacggcgacgacgagaagtacttccgcaagccctacaacttcctcaagtaccacttcgaggccctcgccgacaccggcatctcctccgagttctacgacaacgccaacgacctcctctccaaggtcaagaaggacaagtccgactccttcggcgtcaccatcggcatcggccccgccggctcccccctcctcgtcggcgtcggcgtctcccactcccaggacacctccttcctcaacgagctcaacaagtacaacgagaagaagttcatcttcacccgcatcttcaccaaggtccagaccgcccacttcaagatgcgcaaggacgacatcatgctcgacgagggcatgctccagtccctcatggagctccccgaccagtacaactacggcatgtacgccaagttcatcaacgactacggcacccactacatcacctccggctccatgggcggcatctacgagtacatcctcgtcatcgacaaggccaagatggagtccctcggcatcacctcccgcgacatcaccacctgcttcggcggctccctcggcatccagtacgaggacaagatcaacgtcggcggcggcctctccggcgaccactgcaagaagttcggcggcggcaagaccgagcgcgcccgcaaggccatggccgtcgaggacatcatctcccgcgtccgcggcggctcctccggctggtccggcggcctcgcccagaaccgctccaccatcacctaccgctcctggggccgctccctcaagtacaaccccgtcgtcatcgacttcgagatgcagcccatccacgaggtcctccgccacacctccctcggccccctcgaggccaagcgccagaacctccgccgcgccctcgaccagtacctcatggagttcaacgcctgccgctgcggcccctgcttcaacaacggcgtccccatcctcgagggcacctcctgccgctgccagtgccgcctcggctccctcggcgccgcctgcgagcagacccagaccgagggcgccaaggccgacggctcctggtcctgctggtcctcctggtccgtctgccgcgccggcatccaggagcgccgccgcgagtgcgacaaccccgccccccagaacggcggcgcctcctgccccggccgcaaggtccagacccaggcctgctga

SEQ ID NO: 8007 - RNA, 1755 nt, synthetic construct
  misc_feature 1..1755: note = derived and/or modified sequence opt3 fromCO8A__Homo_sapiens__AAA52200
  source 1..1755: mol_type = other RNA
atgttcgccgtggtctttttcatcctgagcctcatgacctgccagcccggcgttacagctcaagagaaggtgaaccagagagtaaggcgggcagccactcctgcggctgtgacgtgtcagctttccaattggtctgaatggaccgactgctttccatgtcaggataaaaagtaccgccaccgatcactgttgcaaccgaacaaattcgggggaacaatttgcagtggtgacatatgggatcaggccagctgttcctcttcgactacctgcgtccgtcaggcacagtgtggccaagactttcagtgcaaggagacagggagatgtttaaaaaggcatctggtgtgcaatggagatcaggactgtctagatggctcagacgaagatgactgcgaggatgttcgggccatcgacgaagattgcagccagtatgagcccattcctggtagtcaaaaggctgcactcgggtacaacatcctgacccaggaggacgcccagtccgtgtatgacgcttcttactatggaggccaatgtgaaactgtctacaatggcgagtggcgcgaacttagatatgatagcacatgcgagaggctgtactacggggacgatgagaagtatttccggaaaccatacaactttttgaagtatcacttcgaagccctcgcggacaccggaatttcctcagagttttacgataatgcaaacgacctgctgagtaaagtgaagaaagataagagcgactctttcggtgtaacgatcggcatagggcccgccggatcccctctcttagttggcgtgggtgtctcacatagccaggataccagttttctgaatgaacttaacaagtataatgagaaaaagttcatctttactcgcattttcacaaaagtgcagactgctcacttcaagatgcgaaaagacgatatcatgttggacgaagggatgctgcagtctctaatggagctcccagaccaatacaactatggaatgtacgccaagtttattaatgattacggcacccattatatcacatccggcagcatgggagggatatacgagtatattctggtgatcgacaaagcaaagatggaatcgcttggtattacctctagagatatcacgacttgtttcggcgggtccctgggaatccagtacgaggacaagattaacgtcggcggtgggttgtcaggcgatcactgcaaaaagtttggaggcgggaaaacagaaagggctcggaaggccatggcggttgaggacataatcagtcgtgtgcgcggaggtagctccggctggtctgggggactcgcccagaatagaagcaccattacttataggtcatggggccggagtctgaaatacaaccccgtagtgatcgatttcgaaatgcagcctatacacgaggtcttacgacatacatccctgggtccactcgaggcaaagcgccaaaaccttagaagggctctggaccagtatttgatggaatttaatgcctgtcggtgcgggccgtgtttcaacaatggcgtgcccattctagagggaaccagctgccgctgtcagtgcagactgggctctctcggggctgcctgtgaacagacgcaaaccgagggagcaaaggccgatggttcatggagttgctggagctcctggtctgtttgcagggctggcatccaggaacgtcggcgagagtgtgacaaccctgcgccacagaatgggggagcatcgtgccccggcagaaaagtgcagacacaagcctgttga

SEQ ID NO: 8008 - RNA, 1755 nt, synthetic construct
  misc_feature 1..1755: note = derived and/or modified sequence opt4 fromCO8A__Homo_sapiens__AAA52200
  source 1..1755: mol_type = other RNA
atgttcgccgtggtgttcttcatcctgagcctgatgacctgccagcccggcgtgaccgcccaggagaaggtgaaccagagagtgagaagagccgccacccccgccgccgtgacctgccagctgagcaactggagcgagtggaccgactgcttcccctgccaggacaagaagtacagacacagaagcctgctgcagcccaacaagttcggcggcaccatctgcagcggcgacatctgggaccaggccagctgcagcagcagcaccacctgcgtgagacaggcccagtgcggccaggacttccagtgcaaggagaccggcagatgcctgaagagacacctggtgtgcaacggcgaccaggactgcctggacggcagcgacgaggacgactgcgaggacgtgagagccatcgacgaggactgcagccagtacgagcccatccccggcagccagaaggccgccctgggctacaacatcctgacccaggaggacgcccagagcgtgtacgacgccagctactacggcggccagtgcgagaccgtgtacaacggcgagtggagagagctgagatacgacagcacctgcgagagactgtactacggcgacgacgagaagtacttcagaaagccctacaacttcctgaagtaccacttcgaggccctggccgacaccggcatcagcagcgagttctacgacaacgccaacgacctgctgagcaaggtgaagaaggacaagagcgacagcttcggcgtgaccatcggcatcggccccgccggcagccccctgctggtgggcgtgggcgtgagccacagccaggacaccagcttcctgaacgagctgaacaagtacaacgagaagaagttcatcttcaccagaatcttcaccaaggtgcagaccgcccacttcaagatgagaaaggacgacatcatgctggacgagggcatgctgcagagcctgatggagctgcccgaccagtacaactacggcatgtacgccaagttcatcaacgactacggcacccactacatcaccagcggcagcatgggcggcatctacgagtacatcctggtgatcgacaaggccaagatggagagcctgggcatcaccagcagagacatcaccacctgcttcggcggcagcctgggcatccagtacgaggacaagatcaacgtgggcggcggcctgagcggcgaccactgcaagaagttcggcggcggcaagaccgagagagccagaaaggccatggccgtggaggacatcatcagcagagtgagaggcggcagcagcggctggagcggcggcctggcccagaacagaagcaccatcacctacagaagctggggcagaagcctgaagtacaaccccgtggtgatcgacttcgagatgcagcccatccacgaggtgctgagacacaccagcctgggccccctggaggccaagagacagaacctgagaagagccctggaccagtacctgatggagttcaacgcctgcagatgcggcccctgcttcaacaacggcgtgcccatcctggagggcaccagctgcagatgccagtgcagactgggcagcctgggcgccgcctgcgagcagacccagaccgagggcgccaaggccgacggcagctggagctgctggagcagctggagcgtgtgcagagccggcatccaggagagaagaagagagtgcgacaaccccgccccccagaacggcggcgccagctgccccggcagaaaggtgcagacccaggcctgctga

SEQ ID NO: 8009 - RNA, 1755 nt, synthetic construct
  misc_feature 1..1755: note = derived and/or modified sequence opt5 fromCO8A__Homo_sapiens__AAA52200
  source 1..1755: mol_type = other RNA
atgttcgccgtggtctttttcatcctgagcctcatgacctgccagcccggcgttacagctcaagagaaggtgaaccagagagtgcggcgcgccgcgacgcctgctgccgtcacctgtcagctgtccaattggtctgaatggacagactgctttccgtgtcaggataaaaagtacagacaccggagccttctgcaacccaacaaattcgggggaaccatttgctccggcgacatctgggatcaggcctcttgtagctcctctacaacctgcgtgcgccaggctcagtgtgggcaagactttcagtgcaaggagacaggaagatgtctcaaacggcatctggtttgcaatggcgatcaggactgtcttgatgggagcgacgaagatgactgcgaggatgtgcgcgccattgacgaagattgctcccagtatgagcctatccccggaagccaaaaggctgccctgggctacaacattctcacccaggaggacgcgcagtctgtctatgacgcctcctactatggcgggcaatgtgaaacggtgtacaatggagagtggagagaactgcggtatgatagcacatgcgagcgcctgtactacggcgacgatgagaagtatttcagaaaaccttacaactttctcaagtatcacttcgaagctctggccgacacagggatctcttccgagttttacgataatgctaacgaccttctgagcaaagttaagaaagataagtctgactccttcggagtgaccatcggcattgggcccgccggaagccctctcctggtcggcgtgggcgtgtcccattctcaggataccagctttcttaatgaactgaacaagtataatgagaaaaagttcatctttacccggattttcacgaaagtccagacagcgcacttcaagatgcgcaaagacgatatcatgctcgacgaagggatgctgcagtccctgatggagctcccggaccaatacaactatggaatgtacgccaagtttattaatgattacggcacccattatatcacaagcgggtctatgggaggcatttacgagtatatcctggttatcgacaaagctaagatggaatcccttgggattaccagcagagatatcaccacatgtttcggaggctctctgggcattcagtacgaggacaagatcaacgtcgggggaggcctcagcggggatcactgcaaaaagtttggaggcgggaaaacggaacgggcccgcaaggctatggccgtggaggacattatctccagagtgcggggcggatctagcggctggtccgggggactggcccagaatagaagcaccatcacatatcgctcttggggccggtcccttaaatacaaccccgtggttattgatttcgaaatgcagcctatccacgaggtgctgagacataccagcctcgggcccctggaggctaagcgccaaaacctgcggagagcgctcgaccagtatctgatggaatttaatgcctgtcgctgcggaccttgtttcaacaatggcgtccccattcttgaggggacatcttgccggtgtcagtgcagactgggctccctcggagctgcctgtgaacagacccaaacggagggcgccaaggctgatgggagctggtcctgctggtctagctggtccgtgtgccgcgccggaatccaggaacggagacgcgagtgtgacaacccggcgcctcagaatggcggggcttcttgccccggacggaaagttcagacacaagcctgttga

SEQ ID NO: 8010 - protein, 591 aa, synthetic construct
  REGION 1..591: note = CO8B__Homo_sapiens__P07358
MKNSRTWAWRAPVELFLLCAALGCLSLPGSRGERPHSFGSNAVNKSFAKSRQMRSVDVTLMPIDCELSSWSSWTTCDPCQKKRYRYAYLLQPSQFHGEPCNFSDKEVEDCVTNRPCRSQVRCEGFVCAQTGRCVNRRLLCNGDNDCGDQSDEANCRRIYKKCQHEMDQYWGIGSLASGINLFTNSFEGPVLDHRYYAGGCSPHYILNTRFRKPYNVESYTPQTQGKYEFILKEYESYSDFERNVTEKMASKSGFSFGFKIPGIFELGISSQSDRGKHYIRRTKRFSHTKSVFLHARSDLEVAHYKLKPRSLMLHYEFLQRVKRLPLEYSYGEYRDLFRDFGTHYITEAVLGGIYEYTLVMNKEAMERGDYTLNNVHACAKNDFKIGGAIEEVYVSLGVSVGKCRGILNEIKDRNKRDTMVEDLVVLVRGGASEHITTLAYQELPTADLMQEWGDAVQYNPAIIKVKVEPLYELVTATDFAYSSTVRQNMKQALEEFQKEVSSCHCAPCQGNGVPVLKGSRCDCICPVGSQGLACEVSYRKNTPIDGKWNCWSNWSSCSGRRKTRQRQCNNPPPQNGGSPCSGPASETLDCS

SEQ ID NO: 8011 - RNA, 1776 nt, synthetic construct
  misc_feature 1..1776: note = CO8B__Homo_sapiens__AAI30576
  source 1..1776: mol_type = other RNA
atgaagaattccaggacatgggcttggagggcgccggtggagctatttcttctctgtgctgccctgggctgtctcagtttgcctggctccagaggtgaaaggccacattcctttgggtcaaatgcagtcaacaagagctttgctaagagcagacagatgcggagtgtggatgttaccctgatgcccattgattgtgagctgtctagttggtcctcttggaccacatgtgacccctgtcagaagaaaaggtacaggtatgcctacttgctccagccctctcagttccatggggaaccgtgcaacttctctgacaaggaagtcgaagactgtgttaccaacagaccatgcagaagtcaagtgcgatgtgaaggctttgtgtgtgcacagacaggaaggtgtgtaaaccgcagacttctttgcaatggggacaatgactgtggagaccagtcagatgaagcaaactgtagaaggatttataaaaaatgtcagcatgaaatggaccaatactggggaattggcagtctggccagtgggataaatttgttcacaaacagttttgagggcccagttcttgatcacaggtattatgcaggtggatgctccccgcattacatcctgaacacgaggtttaggaagccctacaatgtggaaagctacacgccacagacccaaggcaaatacgaattcatattaaaagagtatgaatcatactcagattttgaacgcaatgtcacagagaaaatggcaagcaagtctggtttcagttttggttttaaaatacctggaatatttgaacttggcatcagtagtcaaagtgatcgaggcaaacactatattaggagaaccaaacgattctctcatactaaaagcgtatttctgcatgcacgctctgaccttgaagtagcacattacaagctgaaacccagaagcctcatgctccattacgagttccttcagagagttaagcggctgcccctggagtacagctacggggaatacagagatctcttccgtgattttgggacccactacatcacagaggctgtgcttgggggcatttatgaatacaccctcgttatgaacaaagaggccatggagagaggagattatactcttaacaacgtccatgcctgtgccaaaaatgattttaaaattggtggtgccattgaagaggtctacgtcagtctgggtgtgtctgtaggcaaatgcagaggtattctgaatgaaataaaagacagaaacaagagggacaccatggtggaggacttggtggtcctggtacgaggaggggcaagtgagcacatcaccaccctggcataccaggagctgccgacggcggacctgatgcaggagtggggagacgctgtgcagtacaacccagccatcatcaaagttaaggtggagcctctgtatgaactagtgacagccacagattttgcctattccagcacagtgaggcagaacatgaagcaggcactggaggagttccagaaggaagttagttcctgccactgtgctccctgccaaggaaatggagtccctgtcctgaaaggatcacgctgtgactgcatctgtcctgttggatcccaaggcctagcctgtgaggtctcctatcggaagaatacccccattgatgggaagtggaattgctggtcaaattggtcttcatgctctggaagacgtaagacaagacaaaggcagtgtaacaatccacctcctcaaaatgggggtagcccctgttcaggccctgcttcagaaacacttgactgctcctag

SEQ ID NO: 8012 - RNA, 1776 nt, synthetic construct
  misc_feature 1..1776: note = derived and/or modified sequence opt1 fromCO8B__Homo_sapiens__AAI30576
  source 1..1776: mol_type = other RNA
atgaagaacagccgcacctgggcctggcgggcccccgtggagctgttcctcctgtgcgcggccctgggctgcctctccctgcccgggagccgcggcgagcggccccactccttcgggagcaacgccgtcaacaagtccttcgccaagagccgccagatgcggtccgtggacgtgaccctgatgcccatcgactgcgagctcagctcctggagctcctggacgacctgcgacccctgccagaagaagcgctaccggtacgcctacctgctgcagccgagccagttccacggcgagccctgcaacttctccgacaaggaggtcgaggactgcgtgaccaaccgcccctgccggagccaggtgcgctgcgaggggttcgtctgcgcgcagaccggccggtgcgtgaaccgccggctcctgtgcaacggcgacaacgactgcggggaccagtccgacgaggccaactgccgccggatctacaagaagtgccagcacgagatggaccagtactggggcatcgggagcctggcctccggcatcaacctcttcacgaacagcttcgaggggcccgtgctggaccaccgctactacgccggcggctgctccccgcactacatcctgaacacccggttccgcaagccctacaacgtcgagagctacacgccccagacccaggggaagtacgagttcatcctcaaggagtacgagagctactccgacttcgagcggaacgtgaccgagaagatggcgagcaagtccggcttcagcttcgggttcaagatccccggcatcttcgagctgggcatctccagccagtccgaccgcgggaagcactacatccggcgcaccaagcgcttcagccacaccaagtccgtgttcctgcacgcccggagcgacctcgaggtcgcccactacaagctgaagccgcgctccctgatgctccactacgagttcctgcagcgggtgaagcgcctgcccctcgagtacagctacggcgagtaccgggacctgttccgcgacttcgggacccactacatcacggaggccgtgctgggcgggatctacgagtacaccctcgtcatgaacaaggaggccatggagcggggcgactacaccctgaacaacgtgcacgcgtgcgccaagaacgacttcaagatcggcggggccatcgaggaggtgtacgtctccctgggcgtgagcgtggggaagtgccgcggcatcctcaacgagatcaaggaccggaacaagcgcgacaccatggtcgaggacctggtggtgctggtccgcgggggcgcctccgagcacatcacgaccctcgcctaccaggagctgcccaccgcggacctgatgcaggagtggggcgacgccgtgcagtacaaccccgccatcatcaaggtcaaggtggagccgctctacgagctggtgaccgccacggacttcgcctacagctccaccgtccggcagaacatgaagcaggcgctggaggagttccagaaggaggtgagctcctgccactgcgccccctgccaggggaacggcgtgcccgtcctcaaggggagccggtgcgactgcatctgccccgtgggcagccaggggctggcctgcgaggtgtcctaccgcaagaacaccccgatcgacggcaagtggaactgctggagcaactggtccagctgctccggccggcgcaagacccggcagcgccagtgcaacaacccgccgccccagaacgggggcagcccctgctccgggcccgccagcgagacgctggactgctcctga

SEQ ID NO: 8013 - RNA, 1776 nt, synthetic construct
  misc_feature 1..1776: note = derived and/or modified sequence opt2 fromCO8B__Homo_sapiens__AAI30576
  source 1..1776: mol_type = other RNA
atgaagaactcccgcacctgggcctggcgcgcccccgtcgagctcttcctcctctgcgccgccctcggctgcctctccctccccggctcccgcggcgagcgcccccactccttcggctccaacgccgtcaacaagtccttcgccaagtcccgccagatgcgctccgtcgacgtcaccctcatgcccatcgactgcgagctctcctcctggtcctcctggaccacctgcgacccctgccagaagaagcgctaccgctacgcctacctcctccagccctcccagttccacggcgagccctgcaacttctccgacaaggaggtcgaggactgcgtcaccaaccgcccctgccgctcccaggtccgctgcgagggcttcgtctgcgcccagaccggccgctgcgtcaaccgccgcctcctctgcaacggcgacaacgactgcggcgaccagtccgacgaggccaactgccgccgcatctacaagaagtgccagcacgagatggaccagtactggggcatcggctccctcgcctccggcatcaacctcttcaccaactccttcgagggccccgtcctcgaccaccgctactacgccggcggctgctccccccactacatcctcaacacccgcttccgcaagccctacaacgtcgagtcctacaccccccagacccagggcaagtacgagttcatcctcaaggagtacgagtcctactccgacttcgagcgcaacgtcaccgagaagatggcctccaagtccggcttctccttcggcttcaagatccccggcatcttcgagctcggcatctcctcccagtccgaccgcggcaagcactacatccgccgcaccaagcgcttctcccacaccaagtccgtcttcctccacgcccgctccgacctcgaggtcgcccactacaagctcaagccccgctccctcatgctccactacgagttcctccagcgcgtcaagcgcctccccctcgagtactcctacggcgagtaccgcgacctcttccgcgacttcggcacccactacatcaccgaggccgtcctcggcggcatctacgagtacaccctcgtcatgaacaaggaggccatggagcgcggcgactacaccctcaacaacgtccacgcctgcgccaagaacgacttcaagatcggcggcgccatcgaggaggtctacgtctccctcggcgtctccgtcggcaagtgccgcggcatcctcaacgagatcaaggaccgcaacaagcgcgacaccatggtcgaggacctcgtcgtcctcgtccgcggcggcgcctccgagcacatcaccaccctcgcctaccaggagctccccaccgccgacctcatgcaggagtggggcgacgccgtccagtacaaccccgccatcatcaaggtcaaggtcgagcccctctacgagctcgtcaccgccaccgacttcgcctactcctccaccgtccgccagaacatgaagcaggccctcgaggagttccagaaggaggtctcctcctgccactgcgccccctgccagggcaacggcgtccccgtcctcaagggctcccgctgcgactgcatctgccccgtcggctcccagggcctcgcctgcgaggtctcctaccgcaagaacacccccatcgacggcaagtggaactgctggtccaactggtcctcctgctccggccgccgcaagacccgccagcgccagtgcaacaacccccccccccagaacggcggctccccctgctccggccccgcctccgagaccctcgactgctcctga

SEQ ID NO: 8014 - RNA, 1776 nt, synthetic construct
  misc_feature 1..1776: note = derived and/or modified sequence opt3 fromCO8B__Homo_sapiens__AAI30576
  source 1..1776: mol_type = other RNA
atgaagaacagcagaacctgggcctggagggctcccgtggagctgttcctcctttgcgcagccctgggctgtttgtccttacctgggtctcggggagaacgcccacactcatttggtagtaatgcggtcaacaagagcttcgctaaatcccgacagatgcgttctgttgacgtgacactgatgccgatcgattgcgagctatcgtcatggagcagttggactacgtgtgacccctgccagaaaaagagatacaggtatgcctacctcctgcaaccttcccagtttcatggcgaaccatgtaatttctctgataaagaggtagaagactgcgtgaccaaccggccctgtcgcagccaggtcagatgcgaggggtttgtgtgtgcacaaacaggaaggtgcgttaatcggcgccttctgtgtaacggcgataatgactgcggtgatcagtccgacgaggccaactgccgaagaatttataagaagtgtcagcacgaaatggatcagtactgggggataggatcattggctagtggcatcaatctcttcactaacagctttgagggccctgtgctggaccataggtattacgcagggggatgctctccacactatattctgaatacccggttccgtaaaccctacaacgtcgaatcctacacacctcaaacccagggtaagtatgagtttatcctcaaagagtacgaatcatatagcgatttcgagcgcaatgtgactgaaaagatggccagtaaatctggcttttccttcgggtttaagattccaggaatcttcgagttaggcataagctcgcagtctgacagaggtaagcattacatcaggcggacaaaacgattctcccacaccaagtcagtatttctgcacgctcgcagtgatcttgaagttgcccattataaattgaagccgagaagcctgatgctacactacgagttcctccagagggtgaaacggctgccccttgagtattcctacggggaataccgcgacctgtttagagacttcggaacgcattatattactgaggcggtcttgggcggcatctacgaatataccctcgtgatgaacaaggaggcaatggaacgtggggattacacactgaataacgtgcacgcctgtgctaaaaacgactttaagattggaggtgccatcgaggaggtctatgtttctttaggcgtgagcgtagggaagtgcaggggaatactgaatgaaattaaagatcggaacaagcgagacactatggtggaggatctcgtcgtgcttgttagaggcggtgcatcagaacacatcaccacactggcttaccaagagttgcctaccgccgacctaatgcaggaatggggcgatgcggtgcagtataatccagccattatcaaagtcaaggtggagcccctgtacgagctcgtaacggcaactgacttcgcttacagttccacagttaggcaaaacatgaaacaggccctggaagagtttcagaaggaagtgagctcttgtcattgcgctccttgtcaggggaatggagtcccagtgcttaagggctcacgctgcgattgtatctgccccgtcgggagtcaaggactggcctgtgaggtgagctatcggaaaaacaccccgattgacggtaagtggaattgctggtccaactggtcttcgtgcagcggcagaaggaaaactcgccagcgacagtgtaataaccctcccccacagaatgggggatccccttgctcaggccccgcaagtgagacattggattgttcttga

SEQ ID NO: 8015 - RNA, 1776 nt, synthetic construct
  misc_feature 1..1776: note = derived and/or modified sequence opt4 fromCO8B__Homo_sapiens__AAI30576
  source 1..1776: mol_type = other RNA
atgaagaacagcagaacctgggcctggagagcccccgtggagctgttcctgctgtgcgccgccctgggctgcctgagcctgcccggcagcagaggcgagagaccccacagcttcggcagcaacgccgtgaacaagagcttcgccaagagcagacagatgagaagcgtggacgtgaccctgatgcccatcgactgcgagctgagcagctggagcagctggaccacctgcgacccctgccagaagaagagatacagatacgcctacctgctgcagcccagccagttccacggcgagccctgcaacttcagcgacaaggaggtggaggactgcgtgaccaacagaccctgcagaagccaggtgagatgcgagggcttcgtgtgcgcccagaccggcagatgcgtgaacagaagactgctgtgcaacggcgacaacgactgcggcgaccagagcgacgaggccaactgcagaagaatctacaagaagtgccagcacgagatggaccagtactggggcatcggcagcctggccagcggcatcaacctgttcaccaacagcttcgagggccccgtgctggaccacagatactacgccggcggctgcagcccccactacatcctgaacaccagattcagaaagccctacaacgtggagagctacaccccccagacccagggcaagtacgagttcatcctgaaggagtacgagagctacagcgacttcgagagaaacgtgaccgagaagatggccagcaagagcggcttcagcttcggcttcaagatccccggcatcttcgagctgggcatcagcagccagagcgacagaggcaagcactacatcagaagaaccaagagattcagccacaccaagagcgtgttcctgcacgccagaagcgacctggaggtggcccactacaagctgaagcccagaagcctgatgctgcactacgagttcctgcagagagtgaagagactgcccctggagtacagctacggcgagtacagagacctgttcagagacttcggcacccactacatcaccgaggccgtgctgggcggcatctacgagtacaccctggtgatgaacaaggaggccatggagagaggcgactacaccctgaacaacgtgcacgcctgcgccaagaacgacttcaagatcggcggcgccatcgaggaggtgtacgtgagcctgggcgtgagcgtgggcaagtgcagaggcatcctgaacgagatcaaggacagaaacaagagagacaccatggtggaggacctggtggtgctggtgagaggcggcgccagcgagcacatcaccaccctggcctaccaggagctgcccaccgccgacctgatgcaggagtggggcgacgccgtgcagtacaaccccgccatcatcaaggtgaaggtggagcccctgtacgagctggtgaccgccaccgacttcgcctacagcagcaccgtgagacagaacatgaagcaggccctggaggagttccagaaggaggtgagcagctgccactgcgccccctgccagggcaacggcgtgcccgtgctgaagggcagcagatgcgactgcatctgccccgtgggcagccagggcctggcctgcgaggtgagctacagaaagaacacccccatcgacggcaagtggaactgctggagcaactggagcagctgcagcggcagaagaaagaccagacagagacagtgcaacaacccccccccccagaacggcggcagcccctgcagcggccccgccagcgagaccctggactgcagctga

SEQ ID NO: 8016 - RNA, 1776 nt, synthetic construct
  misc_feature 1..1776: note = derived and/or modified sequence opt5 fromCO8B__Homo_sapiens__AAI30576
  source 1..1776: mol_type = other RNA
atgaagaacagcagaacctgggcctggcgggctcccgtggagctgttcctcctgtgcgccgcgcttggctgtctgtccctccctgggtctcgcggagaaagaccgcacagctttggctccaatgctgtcaacaaatctttcgccaagagccggcagatgcgctccgttgacgtgacactgatgcccatcgattgcgagctttctagctggtccagctggacgacctgtgacccttgccagaaaaagagataccggtatgcctacctgctccaaccctctcagtttcatggggaaccttgtaatttctccgataaagaggtggaagactgcgtcacaaaccgcccctgtagaagccaggtgcggtgcgagggatttgtttgtgctcaaaccggccgctgcgtgaatagacggctgctgtgtaacggggataatgactgcggagatcagtctgacgaggccaactgccgcagaatttataagaagtgtcagcacgaaatggatcagtactggggcatcggctccctcgctagcgggattaatctgttcacaaactcttttgagggacctgtccttgaccatcggtattacgccggcgggtgctccccgcactatatcctgaatacccgcttcagaaaaccctacaacgtggaaagctacacacctcaaacccagggaaagtatgagtttattctcaaagagtacgaatcctattctgatttcgagcggaatgttacggaaaagatggcgagcaaatccggctttagcttcgggtttaagatccccggaatcttcgagctgggcatttcttcccagagcgacagaggcaagcattacatccgccggaccaaaagattctctcacacaaagagcgtgtttcttcacgcccgctccgatctggaagtcgctcattataaactcaagcctcggtctctgatgctgcactacgagttcctccagagagtgaaacgcctgccccttgagtatagctacggggaataccgggacctgtttagagacttcggaacccattatattacagaggccgtgctcggcgggatctacgaatataccctggtcatgaacaaggaggctatggaacgcggagattacacgcttaataacgttcacgcctgtgcgaaaaacgactttaagattggcggggccatcgaggaggtgtatgtgtccctgggagtcagcgtgggcaagtgccggggcattctcaatgaaatcaaagatagaaacaagcgcgacacaatggttgaggatctggtggtcctggtgagagggggagcttctgaacacatcaccacactcgcctaccaagagctgccgaccgctgaccttatgcaggaatggggcgatgccgttcagtataatcctgccattatcaaagtgaaggtcgagcccctgtacgagctcgtgaccgctacagacttcgcgtactccagcacggtccggcaaaacatgaaacaggccctggaagagtttcagaaggaagtgtcttcctgtcattgcgctccttgtcaggggaatggagttcccgtgcttaagggcagccggtgcgattgtatttgccccgtcgggtcccaaggcctggcctgtgaggtgtcttatcgcaaaaacacccctatcgacggaaagtggaattgctggagcaactggtcctcttgcagcggcagacggaaaacaagacagcgccagtgtaataacccgccccctcagaatgggggatccccctgcagcggccctgcctctgagaccctcgattgttcctga

SEQ ID NO: 8017 - protein, 202 aa, synthetic construct
  REGION 1..202: note = CO8G__Homo_sapiens__P07360
MLPPGTATLLTLLLAAGSLGQKPQRPRRPASPISTIQPKANFDAQQFAGTWLLVAVGSACRFLQEQGHRAEATTLHVAPQGTAMAVSTFRKLDGICWQVRQLYGDTGVLGRFLLQARDARGAVHVVVAETDYQSFAVLYLERAGQLSVKLYARSLPVSDSVLSGFEQRVQEAHLTEDQIFYFPKYGFCEAADQFHVLDEVRR

SEQ ID NO: 8018 - RNA, 609 nt, synthetic construct
  misc_feature 1..609: note = CO8G__Homo_sapiens__CCDS7017.1
  source 1..609: mol_type = other RNA
atgctgccccctgggactgcgaccctcttgactctgctcctggcagctggctcgctgggccagaagcctcagaggccacgccggcccgcatcccccatcagcaccatccagcccaaggccaattttgatgctcagcagtttgcagggacctggctccttgtggctgtgggctccgcttgccgtttcctgcaggagcagggccaccgggccgaggccaccacactgcatgtggctccccagggcacagccatggctgtcagtaccttccgaaagctggatgggatctgctggcaggtgcgccagctctatggagacacaggggtcctcggccgcttcctgcttcaagcccgagacgcccgaggggctgtgcacgtggttgtcgctgagaccgactaccagagtttcgctgtcctgtacctggagcgggcggggcagctgtcagtgaagctctacgcccgctcgctccctgtgagcgactcggtcctgagtgggtttgagcagcgggtccaggaggcccacctgactgaggaccagatcttctacttccccaagtacggcttctgcgaggctgcagaccagttccacgtcctggacgaagtgaggaggtga

SEQ ID NO: 8019 - RNA, 609 nt, synthetic construct
  misc_feature 1..609: note = derived and/or modified sequence opt1 fromCO8G__Homo_sapiens__CCDS7017.1
  source 1..609: mol_type = other RNA
atgctgcccccgggcaccgccaccctcctgacgctgctcctggccgcggggagcctgggccagaagccccagcgcccccggcgccccgcctccccgatcagcaccatccagcccaaggccaacttcgacgcccagcagttcgccgggacctggctcctggtggcggtcggctccgcctgccggttcctgcaggagcaggggcaccgcgccgaggccaccacgctccacgtggcgccccagggcaccgccatggccgtgagcaccttccggaagctggacggcatctgctggcaggtccgccagctgtacggggacaccggcgtgctcgggcggttcctgctgcaggcccgcgacgcccggggcgcggtgcacgtcgtggtggccgagacggactaccagtccttcgccgtcctctacctggagcgcgccgggcagctgagcgtgaagctctacgcccggtccctgcccgtgagcgactccgtcctgagcggcttcgagcagcgcgtgcaggaggcgcacctcaccgaggaccagatcttctacttcccgaagtacggcttctgcgaggccgccgaccagttccacgtgctggacgaggtccggcgctga

SEQ ID NO: 8020 - RNA, 609 nt, synthetic construct
  misc_feature 1..609: note = derived and/or modified sequence opt2 fromCO8G__Homo_sapiens__CCDS7017.1
  source 1..609: mol_type = other RNA
atgctcccccccggcaccgccaccctcctcaccctcctcctcgccgccggctccctcggccagaagccccagcgcccccgccgccccgcctcccccatctccaccatccagcccaaggccaacttcgacgcccagcagttcgccggcacctggctcctcgtcgccgtcggctccgcctgccgcttcctccaggagcagggccaccgcgccgaggccaccaccctccacgtcgccccccagggcaccgccatggccgtctccaccttccgcaagctcgacggcatctgctggcaggtccgccagctctacggcgacaccggcgtcctcggccgcttcctcctccaggcccgcgacgcccgcggcgccgtccacgtcgtcgtcgccgagaccgactaccagtccttcgccgtcctctacctcgagcgcgccggccagctctccgtcaagctctacgcccgctccctccccgtctccgactccgtcctctccggcttcgagcagcgcgtccaggaggcccacctcaccgaggaccagatcttctacttccccaagtacggcttctgcgaggccgccgaccagttccacgtcctcgacgaggtccgccgctga

SEQ ID NO: 8021 - RNA, 609 nt, synthetic construct
  misc_feature 1..609: note = derived and/or modified sequence opt3 fromCO8G__Homo_sapiens__CCDS7017.1
  source 1..609: mol_type = other RNA
atgctgccccctggcaccgccacactccttactctgttgttagctgcagggagcctgggacagaagccacaaagaccgaggcggcccgcctcccctatctctacgattcagccaaaagcgaacttcgacgctcagcagtttgccggtacctggctactcgtggcagtcggctcagcctgccgcttcctgcaagagcaggggcaccgagctgaagcaacaactcttcatgttgctccccagggaaccgccatggccgtgagtacatttcgtaagctggatggcatatgttggcaggtaagacaattgtacggtgacaccggggtgctcggaaggttcctgctgcaggcgcgggatgcacgcggcgccgtccacgtggttgtggctgagactgactatcagagctttgccgtcctctacttagaaagagcaggccagctgtccgtgaaactttatgctaggtctttgcctgtatcggattcagttctgagcgggttcgagcaacgggtgcaggaagcccatctaacagaggaccagatcttttacttcccaaagtatggattttgcgaggcggccgatcaattccacgtcctcgacgaagtgcgccgatga

SEQ ID NO: 8022 - RNA, 609 nt, synthetic construct
  misc_feature 1..609: note = derived and/or modified sequence opt4 fromCO8G__Homo_sapiens__CCDS7017.1
  source 1..609: mol_type = other RNA
atgctgccccccggcaccgccaccctgctgaccctgctgctggccgccggcagcctgggccagaagccccagagacccagaagacccgccagccccatcagcaccatccagcccaaggccaacttcgacgcccagcagttcgccggcacctggctgctggtggccgtgggcagcgcctgcagattcctgcaggagcagggccacagagccgaggccaccaccctgcacgtggccccccagggcaccgccatggccgtgagcaccttcagaaagctggacggcatctgctggcaggtgagacagctgtacggcgacaccggcgtgctgggcagattcctgctgcaggccagagacgccagaggcgccgtgcacgtggtggtggccgagaccgactaccagagcttcgccgtgctgtacctggagagagccggccagctgagcgtgaagctgtacgccagaagcctgcccgtgagcgacagcgtgctgagcggcttcgagcagagagtgcaggaggcccacctgaccgaggaccagatcttctacttccccaagtacggcttctgcgaggccgccgaccagttccacgtgctggacgaggtgagaagatga

SEQ ID NO: 8023 - RNA, 609 nt, synthetic construct
  misc_feature 1..609: note = derived and/or modified sequence opt5 fromCO8G__Homo_sapiens__CCDS7017.1
  source 1..609: mol_type = other RNA
atgctgccccctggcaccgccacactcctgacgcttctgctcgctgccgggagcctgggacagaagccgcaaagaccccggcgccctgcgtcccccatttctaccattcagcctaaagctaacttcgacgcccagcagtttgccggcacatggcttctggtggctgtcgggagcgcctgcagattcctccaagagcagggacaccgggctgaagccaccacactgcatgttgcgccccagggcaccgccatggctgtgtccacatttcgcaagctggatgggatctgttggcaagtgagacagctctacggagacaccggcgtcctgggccggttccttctgcaggcccgcgatgctagaggggccgtgcacgttgtggtcgcggagacggactatcagtcttttgccgtgctctacctggaacgggctggacagcttagcgttaaactgtatgcccgctccctccctgtgtctgatagcgtcctgtccggcttcgagcaaagagtgcaggaagctcatctgaccgaggaccagatcttttacttcccgaagtatgggttttgcgaggccgccgatcaattccacgtgctcgacgaagtccggcgctga

SEQ ID NO: 8024 - protein, 500 aa, synthetic construct
  REGION 1..500: note complement_system_component_C1INH__Homo_sapiens__P05155
MASRLTLLTLLLLLLAGDRASSNPNATSSSSQDPESLQDRGEGKVATTVISKMLFVEPILEVSSLPTTNSTTNSATKITANTTDEPTTQPTTEPTTQPTIQPTQPTTQLPTDSPTQPTTGSFCPGPVTLCSDLESHSTEAVLGDALVDFSLKLYHAFSAMKKVETNMAFSPFSIASLLTQVLLGAGENTKTNLESILSYPKDFTCVHQALKGFTTKGVTSVSQIFHSPDLAIRDTFVNASRTLYSSSPRVLSNNSDANLELINTWVAKNTNNKISRLLDSLPSDTRLVLLNAIYLSAKWKTTFDPKKTRMEPFHFKNSVIKVPMMNSKKYPVAHFIDQTLKAKVGQLQLSHNLSLVILVPQNLKHRLEDMEQALSPSVFKAIMEKLEMSKFQPTLLTLPRIKVTTSQDMLSIMEKLEFFDFSYDLNLCGLTEDPDLQVSAMQHQTVLELTETGVEAAAASAISVARTLLVFEVQQPFLFVLWDQQHKFPVFMGRVYDPRA

SEQ ID NO: 8025 - RNA, 1503 nt, synthetic construct
  misc_feature 1..1503: note complement_system_component_C1INH__Homo_sapiens__AAM21515
  source 1..1503: mol_type = other RNA
atggcctccaggctgaccctgctgaccctcctgctgctgctgctggctggggatagagcctcctcaaatccaaatgctaccagctccagctcccaggatccagagagtttgcaagacagaggcgaagggaaggtcgcaacaacagttatctccaagatgctattcgttgaacccatcctggaggtttccagcttgccgacaaccaactcaacaaccaattcagccaccaaaataacagctaataccactgatgaacccaccacacaacccaccacagagcccaccacccaacccaccatccaacccacccaaccaactacccagctcccaacagattctcctacccagcccactactgggtccttctgcccaggacctgttactctctgctctgacttggagagtcattcaacagaggccgtgttgggggatgctttggtagatttctccctgaagctctaccacgccttctcagcaatgaagaaggtggagaccaacatggccttttccccattcagcatcgccagcctccttacccaggtcctgctcggggctggggagaacaccaaaacaaacctggagagcatcctctcttaccccaaggacttcacctgtgtccaccaggccctgaagggcttcacgaccaaaggtgtcacctcagtctctcagatcttccacagcccagacctggccataagggacacctttgtgaatgcctctcggaccctgtacagcagcagccccagagtcctaagcaacaacagtgacgccaacttggagctcatcaacacctgggtggccaagaacaccaacaacaagatcagccggctgctagacagtctgccctccgatacccgccttgtcctcctcaatgctatctacctgagtgccaagtggaagacaacatttgatcccaagaaaaccagaatggaaccctttcacttcaaaaactcagttataaaagtgcccatgatgaatagcaagaagtaccctgtggcccatttcattgaccaaactttgaaagccaaggtggggcagctgcagctctcccacaatctgagtttggtgatcctggtaccccagaacctgaaacatcgtcttgaagacatggaacaggctctcagcccttctgttttcaaggccatcatggagaaactggagatgtccaagttccagcccactctcctaacactaccccgcatcaaagtgacgaccagccaggatatgctctcaatcatggagaaattggaattcttcgatttttcttatgaccttaacctgtgtgggctgacagaggacccagatcttcaggtttctgcgatgcagcaccagacagtgctggaactgacagagactggggtggaggcggctgcagcctccgccatctctgtggcccgcaccctgctggtctttgaagtgcagcagcccttcctcttcgtgctctgggaccagcagcacaagttccctgtcttcatggggcgagtatatgaccccagggcctga

SEQ ID NO: 8026 - RNA, 1503 nt, synthetic construct
  misc_feature 1..1503: note = derived and/or modified sequence opt1 fromcomplement_system_component_C1INH__Homo_sapiens__AAM215 15
  source 1..1503: mol_type = other RNA
atggccagccgcctgaccctcctgaccctgctcctgctgctcctggccggcgaccgggcgtccagcaaccccaacgccacgtccagctccagccaggacccggagtccctgcaggaccgcggggagggcaaggtggccaccaccgtcatcagcaagatgctgttcgtggagcccatcctggaggtgtccagcctgcccaccacgaactccaccaccaacagcgccaccaagatcacggccaacaccaccgacgagcccaccacgcagccgaccaccgagcccaccacgcagcccaccatccagcccacccagccgaccacgcagctccccaccgactcccccacccagcccaccacggggagcttctgcccgggccccgtcaccctgtgctccgacctggagagccactccaccgaggcggtgctcggggacgccctggtggacttcagcctgaagctctaccacgccttctccgccatgaagaaggtcgagaccaacatggcgttcagccccttcagcatcgcctccctgctgacccaggtgctcctgggcgccggcgagaacaccaagaccaacctggagagcatcctctcctaccccaaggacttcacgtgcgtgcaccaggccctgaaggggttcacgaccaagggcgtcaccagcgtgtcccagatcttccacagcccggacctggccatccgggacaccttcgtgaacgcgtcccgcacgctctacagctccagcccccgggtcctgtccaacaacagcgacgccaacctggagctcatcaacacctgggtggccaagaacaccaacaacaagatctcccgcctgctggacagcctcccctccgacacccggctggtgctgctcaacgccatctacctgagcgccaagtggaagaccacgttcgaccccaagaagacccgcatggagccgttccacttcaagaactccgtcatcaaggtgcccatgatgaacagcaagaagtaccccgtggcgcacttcatcgaccagaccctgaaggccaaggtcgggcagctccagctgtcccacaacctgagcctcgtgatcctggtgccccagaacctgaagcaccggctcgaggacatggagcaggccctgagcccgtccgtcttcaaggccatcatggagaagctggagatgagcaagttccagcccaccctcctgacgctgccccgcatcaaggtgaccacctcccaggacatgctgagcatcatggagaagctcgagttcttcgacttctcctacgacctgaacctgtgcggcctcaccgaggaccccgacctccaggtgagcgccatgcagcaccagacggtcctggagctcaccgagaccggggtggaggcggccgccgcctccgccatcagcgtcgcgcggaccctgctggtgttcgaggtgcagcagccgttcctcttcgtcctgtgggaccagcagcacaagttccccgtgttcatgggccgcgtgtacgacccccgggcctga

SEQ ID NO: 8027 - RNA, 1503 nt, synthetic construct
  misc_feature 1..1503: note = derived and/or modified sequence opt2 fromcomplement_system_component_C1INH__Homo_sapiens__AAM215 15
  source 1..1503: mol_type = other RNA
atggcctcccgcctcaccctcctcaccctcctcctcctcctcctcgccggcgaccgcgcctcctccaaccccaacgccacctcctcctcctcccaggaccccgagtccctccaggaccgcggcgagggcaaggtcgccaccaccgtcatctccaagatgctcttcgtcgagcccatcctcgaggtctcctccctccccaccaccaactccaccaccaactccgccaccaagatcaccgccaacaccaccgacgagcccaccacccagcccaccaccgagcccaccacccagcccaccatccagcccacccagcccaccacccagctccccaccgactcccccacccagcccaccaccggctccttctgccccggccccgtcaccctctgctccgacctcgagtcccactccaccgaggccgtcctcggcgacgccctcgtcgacttctccctcaagctctaccacgccttctccgccatgaagaaggtcgagaccaacatggccttctcccccttctccatcgcctccctcctcacccaggtcctcctcggcgccggcgagaacaccaagaccaacctcgagtccatcctctcctaccccaaggacttcacctgcgtccaccaggccctcaagggcttcaccaccaagggcgtcacctccgtctcccagatcttccactcccccgacctcgccatccgcgacaccttcgtcaacgcctcccgcaccctctactcctcctccccccgcgtcctctccaacaactccgacgccaacctcgagctcatcaacacctgggtcgccaagaacaccaacaacaagatctcccgcctcctcgactccctcccctccgacacccgcctcgtcctcctcaacgccatctacctctccgccaagtggaagaccaccttcgaccccaagaagacccgcatggagcccttccacttcaagaactccgtcatcaaggtccccatgatgaactccaagaagtaccccgtcgcccacttcatcgaccagaccctcaaggccaaggtcggccagctccagctctcccacaacctctccctcgtcatcctcgtcccccagaacctcaagcaccgcctcgaggacatggagcaggccctctccccctccgtcttcaaggccatcatggagaagctcgagatgtccaagttccagcccaccctcctcaccctcccccgcatcaaggtcaccacctcccaggacatgctctccatcatggagaagctcgagttcttcgacttctcctacgacctcaacctctgcggcctcaccgaggaccccgacctccaggtctccgccatgcagcaccagaccgtcctcgagctcaccgagaccggcgtcgaggccgccgccgcctccgccatctccgtcgcccgcaccctcctcgtcttcgaggtccagcagcccttcctcttcgtcctctgggaccagcagcacaagttccccgtcttcatgggccgcgtctacgacccccgcgcctga

SEQ ID NO: 8028 - RNA, 1503 nt, synthetic construct
  misc_feature 1..1503: note = derived and/or modified sequence opt3 fromcomplement_system_component_C1INH__Homo_sapiens__AAM215 15
  source 1..1503: mol_type = other RNA
atggccagcagactgaccctccttacactgttgttactgctactcgctggcgacagggcatcctctaaccccaatgccacttcaagtagctcccaggatcctgagtctctgcaagaccgcggggaaggaaaggtggcgacgaccgtcatctcgaaaatgcttttcgttgagccaattctggaagtgagctcattgccgacaactaacagtaccacaaattccgctaccaagataactgccaacacaaccgatgagcccacgactcagcctaccacagaaccaactacccagcccacaatccagcctacccaaccaacgactcagctccccacagactctcctacccagccaactacaggtagcttttgcccgggccccgtaaccctgtgttccgatctggagtcacacagtacggaggcagtgctcggggacgccttagtcgatttcagcctgaaactttaccatgctttttctgcaatgaagaaagtggaaaccaatatggccttctcccctttttcaattgctagcttgctgacacaggttctactcggagccggcgagaacactaagaccaatctggaaagtatcctttcttatccaaaggacttcacatgcgtgcaccaagcgctgaaaggttttactaccaagggggtcacatccgtgagccagattttccattcgcccgatttggcaatccgggacacctttgtaaacgcctctcgaactctctactcctcaagtcctcgtgttctgagcaataactccgatgctaatttagagctgataaacacgtgggtggccaaaaatacaaacaataagatctctagactccttgacagcctgccatcagataccaggttggtcctactgaacgcaatttatctcagtgctaaatggaagactaccttcgaccccaagaaaacacggatggagccgtttcacttcaagaactccgtgatcaaagtgcctatgatgaatagcaagaaataccccgtcgcccattttattgaccagaccctgaaggcgaaagttggacagcttcaactgtctcacaacttgtcactcgtgatcctggtaccacagaatttaaagcaccgcctggaagatatggagcaggccctaagtcctagcgtgttcaaggcaataatggaaaaactcgagatgtccaagttccaacccactctgcttacattgccaagaattaaagtcacgacctctcaggacatgctgtcgatcatggaaaagctcgagtttttcgattttagctatgacctgaacctttgtggcctgactgaggatcccgacctccaggtgtccgctatgcagcatcaaacagttttggaactgaccgagacaggcgtggaagccgctgccgcatcagccattagtgtcgctaggactttactggtgttcgaggtacagcagccttttctattcgttctctgggatcagcaacacaaatttccagtgttcatggggcgggtctacgacccgcgcgcgtga

SEQ ID NO: 8029 - RNA, 1503 nt, synthetic construct
  misc_feature 1..1503: note = derived and/or modified sequence opt4 fromcomplement_system_component_C1INH__Homo_sapiens__AAM215 15
  source 1..1503: mol_type = other RNA
atggccagcagactgaccctgctgaccctgctgctgctgctgctggccggcgacagagccagcagcaaccccaacgccaccagcagcagcagccaggaccccgagagcctgcaggacagaggcgagggcaaggtggccaccaccgtgatcagcaagatgctgttcgtggagcccatcctggaggtgagcagcctgcccaccaccaacagcaccaccaacagcgccaccaagatcaccgccaacaccaccgacgagcccaccacccagcccaccaccgagcccaccacccagcccaccatccagcccacccagcccaccacccagctgcccaccgacagccccacccagcccaccaccggcagcttctgccccggccccgtgaccctgtgcagcgacctggagagccacagcaccgaggccgtgctgggcgacgccctggtggacttcagcctgaagctgtaccacgccttcagcgccatgaagaaggtggagaccaacatggccttcagccccttcagcatcgccagcctgctgacccaggtgctgctgggcgccggcgagaacaccaagaccaacctggagagcatcctgagctaccccaaggacttcacctgcgtgcaccaggccctgaagggcttcaccaccaagggcgtgaccagcgtgagccagatcttccacagccccgacctggccatcagagacaccttcgtgaacgccagcagaaccctgtacagcagcagccccagagtgctgagcaacaacagcgacgccaacctggagctgatcaacacctgggtggccaagaacaccaacaacaagatcagcagactgctggacagcctgcccagcgacaccagactggtgctgctgaacgccatctacctgagcgccaagtggaagaccaccttcgaccccaagaagaccagaatggagcccttccacttcaagaacagcgtgatcaaggtgcccatgatgaacagcaagaagtaccccgtggcccacttcatcgaccagaccctgaaggccaaggtgggccagctgcagctgagccacaacctgagcctggtgatcctggtgccccagaacctgaagcacagactggaggacatggagcaggccctgagccccagcgtgttcaaggccatcatggagaagctggagatgagcaagttccagcccaccctgctgaccctgcccagaatcaaggtgaccaccagccaggacatgctgagcatcatggagaagctggagttcttcgacttcagctacgacctgaacctgtgcggcctgaccgaggaccccgacctgcaggtgagcgccatgcagcaccagaccgtgctggagctgaccgagaccggcgtggaggccgccgccgccagcgccatcagcgtggccagaaccctgctggtgttcgaggtgcagcagcccttcctgttcgtgctgtgggaccagcagcacaagttccccgtgttcatgggcagagtgtacgaccccagagcctga

SEQ ID NO: 8030 - RNA, 1503 nt, synthetic construct
  misc_feature 1..1503: note = derived and/or modified sequence opt5 fromcomplement_system_component_C1INH__Homo_sapiens__AAM215 15
  source 1..1503: mol_type = other RNA
atggccagcagactgaccctcctgacacttctgctcctgcttctggctggcgaccgggcctcctctaaccccaatgcgacgagctcctctagccaggatcctgagtccctccaagaccgcggggaaggaaaggtggctaccacagtcatctctaaaatgctgttcgttgagccgattctggaagtgagctccctccccaccacaaacagcaccacaaattctgccaccaagatcacggccaacaccacagatgagcctaccacacagcccaccacggaacctacaacccagcccacaattcagcctacccaaccgaccacacagctgcccacggactcccctacccagcccacaaccggcagcttttgccctgggcccgtgacactttgttctgatctggagtcccacagcaccgaggctgtcctcggagacgccctggtggatttctctcttaaactgtaccatgctttttccgccatgaagaaagttgaaacgaatatggcgttcagcccgttttccatcgcctctctcctgacacaggtgctgctcggcgctggggagaacaccaagaccaatctggaaagcattctttcctatcctaaggacttcacatgcgtccaccaagccctgaaaggatttaccacaaagggcgtgacgagcgtttctcagatcttccattcccccgatctcgctatcagagacacctttgtgaacgccagccggacactgtactctagctcccctcgcgtcctttctaataacagcgatgcgaatctggagctcattaacacctgggtggccaaaaatacaaacaataagatctccagactgctggacagcctcccctctgatacccggctggtgcttctgaacgctatttatctctccgccaaatggaagacgaccttcgaccccaagaaaacacgcatggagccttttcacttcaagaacagcgtcatcaaagttccgatgatgaactctaagaaataccccgtggctcattttattgaccagaccctgaaggccaaagtgggccagcttcaactgtcccacaatctcagcctggtcatcctggtgcctcagaatctcaagcacagactggaagatatggagcaggccctttccccctctgttttcaaggctattatggaaaaactggagatgagcaagttccaacctacactcctgaccctgccccggatcaaagtgacgacatcccaggacatgctttctatcatggaaaagctcgagtttttcgattttagctatgacctgaacctgtgtgggctcaccgaggatccggacctgcaggtctccgcgatgcagcatcaaacagtgcttgaactgaccgagaccggagttgaagccgctgccgccagcgctatttctgtggcccgcacactcctggtcttcgaggtgcagcagccttttctgttcgtcctttgggatcagcaacacaaatttcccgtgttcatgggcagagtttacgaccctcgggcgtga

SEQ ID NO: 8031 - protein, 652 aa, synthetic construct [sequence omitted]

SEQ ID NO: 8032 - RNA, 1959 nt, synthetic construct
  misc_feature 1..1959: note complement_system_component_C1qR__Homo_sapiens__CAC82720
  source 1..1959: mol_type = other RNA
atggccacctccatgggcctgctgctgctgctgctgctgctcctgacccagcccggggcggggacgggagctgacacggaggcggtggtctgcgtggggaccgcctgctacacggcccactcgggcaagctgagcgctgccgaggcccagaaccactgcaaccagaacgggggcaacctggccactgtgaagagcaaggaggaggcccagcacgtccagcgagtactggcccagctcctgaggcgggaggcagccctgacggcgaggatgagcaagttctggattgggctccagcgagagaagggcaagtgcctggaccctagtctgccgctgaagggcttcagctgggtgggcgggggggaggacacgccttactctaactggcacaaggagctccggaactcgtgcatctccaagcgctgtgtgtctctgctgctggacctgtcccagccgctccttcccagccgcctccccaagtggtctgagggcccctgtgggagcccaggctcccccggaagtaacattgagggcttcgtgtgcaagttcagcttcaaaggcatgtgccggcctctggccctggggggcccaggtcaggtgacctacaccacccccttccagaccaccagttcctccttggaggctgtgccctttgcctctgcggccaatgtagcctgtggggaaggtgacaaggacgagactcagagtcattatttcctgtgcaaggagaaggcccccgatgtgttcgactggggcagctcgggccccctctgtgtcagccccaagtatggctgcaacttcaacaatgggggctgccaccaggactgctttgaagggggggatggctccttcctctgcggctgccgaccaggattccggctgctggatgacctggtgacctgtgcctctcgaaacccttgcagctccagcccatgtcgtgggggggccacgtgcgccctgggaccccatgggaaaaactacacgtgccgctgcccccaagggtaccagctggactcgagtcagctggactgtgtggacgtggatgaatgccaggactccccctgtgcccaggagtgtgtcaacacccctgggggcttccgctgcgaatgctgggttggctatgagccgggcggtcctggagagggggcctgtcaggatgtggatgagtgtgctctgggtcgctcgccttgcgcccagggctgcaccaacacagatggctcatttcactgctcctgtgaggagggctacgtcctggccggggaggacgggactcagtgccaggacgtggatgagtgtgtgggcccggggggccccctctgcgacagcttgtgcttcaacacacaagggtccttccactgtggctgcctgccaggctgggtgctggccccaaatggggtctcttgcaccatggggcctgtgtctctgggaccaccatctgggccccccgatgaggaggacaaaggagagaaagaagggagcaccgtgccccgcgctgcaacagccagtcccacaaggggccccgagggcacccccaaggctacacccaccacaagtagaccttcgctgtcatctgacgcccccatcacatctgccccactcaagatgctggcccccagtgggtcctcaggcgtctggagggagcccagcatccatcacgccacagctgcctctggcccccaggagcctgcaggtggggactcctccgtggccacacaaaacaacgatggcactgacgggcaaaagctgcttttattctacatcctaggcaccgtggtggccatcctactcctgctggccctggctctggggctactggtctatcgcaagcggagagcgaagagggaggagaagaaggagaagaagccccagaatgcggcagacagttactcctgggttccagagcgagctgagagcagggccatggagaaccagtacagtccgacacctgggacagactgctga

SEQ ID NO: 8033 - RNA, 1959 nt, synthetic construct
  misc_feature 1..1959: note = derived and/or modified sequence opt1 fromcomplement_system_component_C1qR__Homo_sapiens__CAC8272 0
  source 1..1959: mol_type = other RNA
atggccaccagcatgggcctgctcctgctgctcctgctgctcctgacccagcccggggccggcacgggggcggacaccgaggccgtggtctgcgtgggcaccgcctgctacaccgcccactccgggaagctgagcgccgcggaggcccagaaccactgcaaccagaacggcggcaacctcgccacggtgaagtccaaggaggaggcccagcacgtccagcgcgtgctggcgcagctgctccggcgcgaggccgccctgaccgcccggatgagcaagttctggatcgggctgcagcgcgagaagggcaagtgcctcgacccgtccctgcccctgaaggggttcagctgggtgggcgggggcgaggacaccccctactccaactggcacaaggagctccggaacagctgcatctccaagcgctgcgtcagcctgctgctcgacctgtcccagcccctgctcccgagccggctgcccaagtggtccgagggcccctgcgggagccccggctccccggggagcaacatcgagggcttcgtgtgcaagttctccttcaagggcatgtgccgccccctggccctcgggggccccggccaggtgacctacacgacccccttccagaccaccagctccagcctggaggcggtcccgttcgccagcgccgccaacgtggcctgcggggagggggacaaggacgagacgcagtcccactacttcctgtgcaaggagaaggcgcccgacgtgttcgactggggcagctccggccccctctgcgtcagccccaagtacgggtgcaacttcaacaacggcgggtgccaccaggactgcttcgagggcggggacggctccttcctgtgcggctgccggccggggttccgcctgctcgacgacctggtgacctgcgccagccggaacccctgctccagctccccctgccgcggcggggcgacctgcgccctgggcccccacgggaagaactacacgtgccggtgcccgcagggctaccagctcgacagctcccagctggactgcgtggacgtcgacgagtgccaggacagcccctgcgcccaggagtgcgtgaacacccccggcgggttccgctgcgagtgctgggtgggctacgagcccgggggcccgggcgagggggcctgccaggacgtcgacgagtgcgccctgggccggtccccctgcgcccaggggtgcaccaacaccgacggcagcttccactgctcctgcgaggaggggtacgtgctcgccggcgaggacggcacccagtgccaggacgtggacgagtgcgtcgggcccggcgggcccctgtgcgacagcctgtgcttcaacacgcagggctccttccactgcgggtgcctcccgggctgggtgctggcccccaacggcgtgagctgcaccatggggcccgtctccctgggcccgcccagcgggccgcccgacgaggaggacaagggcgagaaggaggggagcaccgtgccccgcgcggccaccgcctcccccacgcggggccccgagggcacccccaaggccaccccgaccacgagccgcccctccctcagctccgacgcgcccatcaccagcgcgcccctgaagatgctggccccgtccgggagctccggcgtctggcgggagcccagcatccaccacgccaccgccgcctccgggccccaggagcccgccggcggggacagctccgtggccacccagaacaacgacggcacggacggccagaagctcctgctgttctacatcctggggaccgtggtcgccatcctcctgctgctcgccctggcgctgggcctcctggtgtaccgcaagcggcgcgccaagcgcgaggagaagaaggagaagaagccgcagaacgccgccgacagctactcctgggtgcccgagcgggccgagagccgcgcgatggagaaccagtactcccccacccccgggaccgactgctga

SEQ ID NO: 8034 - RNA, 1959 nt, synthetic construct
  misc_feature 1..1959: note = derived and/or modified sequence opt2 fromcomplement_system_component_C1qR__Homo_sapiens__CAC8272 0
  source 1..1959: mol_type = other RNA
atggccacctccatgggcctcctcctcctcctcctcctcctcctcacccagcccggcgccggcaccggcgccgacaccgaggccgtcgtctgcgtcggcaccgcctgctacaccgcccactccggcaagctctccgccgccgaggcccagaaccactgcaaccagaacggcggcaacctcgccaccgtcaagtccaaggaggaggcccagcacgtccagcgcgtcctcgcccagctcctccgccgcgaggccgccctcaccgcccgcatgtccaagttctggatcggcctccagcgcgagaagggcaagtgcctcgacccctccctccccctcaagggcttctcctgggtcggcggcggcgaggacaccccctactccaactggcacaaggagctccgcaactcctgcatctccaagcgctgcgtctccctcctcctcgacctctcccagcccctcctcccctcccgcctccccaagtggtccgagggcccctgcggctcccccggctcccccggctccaacatcgagggcttcgtctgcaagttctccttcaagggcatgtgccgccccctcgccctcggcggccccggccaggtcacctacaccacccccttccagaccacctcctcctccctcgaggccgtccccttcgcctccgccgccaacgtcgcctgcggcgagggcgacaaggacgagacccagtcccactacttcctctgcaaggagaaggcccccgacgtcttcgactggggctcctccggccccctctgcgtctcccccaagtacggctgcaacttcaacaacggcggctgccaccaggactgcttcgagggcggcgacggctccttcctctgcggctgccgccccggcttccgcctcctcgacgacctcgtcacctgcgcctcccgcaacccctgctcctcctccccctgccgcggcggcgccacctgcgccctcggcccccacggcaagaactacacctgccgctgcccccagggctaccagctcgactcctcccagctcgactgcgtcgacgtcgacgagtgccaggactccccctgcgcccaggagtgcgtcaacacccccggcggcttccgctgcgagtgctgggtcggctacgagcccggcggccccggcgagggcgcctgccaggacgtcgacgagtgcgccctcggccgctccccctgcgcccagggctgcaccaacaccgacggctccttccactgctcctgcgaggagggctacgtcctcgccggcgaggacggcacccagtgccaggacgtcgacgagtgcgtcggccccggcggccccctctgcgactccctctgcttcaacacccagggctccttccactgcggctgcctccccggctgggtcctcgcccccaacggcgtctcctgcaccatgggccccgtctccctcggccccccctccggcccccccgacgaggaggacaagggcgagaaggagggctccaccgtcccccgcgccgccaccgcctcccccacccgcggccccgagggcacccccaaggccacccccaccacctcccgcccctccctctcctccgacgcccccatcacctccgcccccctcaagatgctcgccccctccggctcctccggcgtctggcgcgagccctccatccaccacgccaccgccgcctccggcccccaggagcccgccggcggcgactcctccgtcgccacccagaacaacgacggcaccgacggccagaagctcctcctcttctacatcctcggcaccgtcgtcgccatcctcctcctcctcgccctcgccctcggcctcctcgtctaccgcaagcgccgcgccaagcgcgaggagaagaaggagaagaagccccagaacgccgccgactcctactcctgggtccccgagcgcgccgagtcccgcgccatggagaaccagtactcccccacccccggcaccgactgctga

SEQ ID NO: 8035 - RNA, 1959 nt, synthetic construct
  misc_feature 1..1959: note = derived and/or modified sequence opt3 fromcomplement_system_component_C1qR__Homo_sapiens__CAC8272 0
  source 1..1959: mol_type = other RNA
atggccaccagcatgggcctgctccttctgttgttactgctactcacacagcccggggctggaactggtgcagacacggaggccgtggtctgcgttggcaccgcgtgttacacagctcactccgggaagctgtctgccgcagaagcccaaaaccattgcaatcagaacggaggcaatcttgctactgtgaaatcaaaggaggaagcacagcacgtacagagagtgctggcccaattgctcaggcgggaggctgccctgaccgcgcgcatgagtaaattctggatcggtctgcagcgagaaaaggggaaatgtctcgatcctagcttaccactgaagggattttcctgggtcggcggcggggaggacacaccgtattctaactggcataaggagcttcgtaattcgtgcatttcaaaaagatgtgtgagcttgctgctagatctcagtcagcccctgcttccttccaggctgccaaagtggtctgaaggaccctgcggtagccctggctccccagggtcaaacatagagggattcgtttgtaaatttagtttcaagggcatgtgccggcccttggcactcggtgggcctggacaggtgacctacactacaccatttcaaaccacgtctagctccctggaagccgtcccgttcgcttcagccgcaaatgtggcttgtggcgagggcgacaaagatgagactcagagccactactttttatgcaaggaaaaggcccccgacgtattcgattgggggagttctggacctctgtgtgtttccccaaaatatggttgcaactttaataacggcgggtgccatcaggactgtttcgagggaggcgatggtagctttctctgcgggtgtcgccccggcttcagacttctggacgatttggtgacctgcgcgtcgaggaatccttgttcttcctcaccatgccggggaggcgccacatgtgcactagggccccacggaaagaactatacttgccgctgtccgcagggttaccaactggacagtagccagctcgattgcgtcgacgtggacgaatgtcaggattccccttgcgctcaagagtgcgtgaatacccccggcgggtttcgatgtgaatgctgggtcggatatgagccaggcggtcctggggagggcgcctgtcaggacgttgatgaatgcgctctgggaagatctccctgtgcccagggctgcacaaacaccgacgggagcttccactgttcatgcgaggaaggatacgtgcttgccggtgaggatggcacgcagtgtcaagacgtagatgaatgcgtggggccaggaggccccctgtgtgacagtttgtgcttcaatactcagggttcctttcattgcgggtgtctccctggctgggtcctggcaccaaacggagtgagctgcacaatgggcccggtttctttagggcccccttcaggaccacccgatgaggaggacaaaggcgaaaaggagggtagtaccgtgcctagggctgcgactgcaagcccaacacgggggcccgaaggaaccccgaaagccacgcctaccacatcccgtccatctctgtcgagcgatgctcccatcacttccgcccctctaaagatgctcgcaccctcaggcagttctggtgtctggcgcgagccaagcattcaccatgccaccgctgcctccggccctcaggaacccgcagggggagactcaagcgtggcgacacagaacaatgacggcactgatgggcaaaaactgcttttgttctacatcctgggaaccgtagttgctattctcctgcttctggccttggcactcggcctgttagtgtatagaaagaggcgggccaagcgagaggagaaaaaggagaaaaagccacagaacgctgccgactcttactcctgggtcccggaacgcgcagaaagtagagctatggagaatcagtatagccctacacccggtaccgattgttga

SEQ ID NO: 8036 - RNA, 1959 nt, synthetic construct
  misc_feature 1..1959: note = derived and/or modified sequence opt4 fromcomplement_system_component_C1qR__Homo_sapiens__CAC8272 0
  source 1..1959: mol_type = other RNA
atggccaccagcatgggcctgctgctgctgctgctgctgctgctgacccagcccggcgccggcaccggcgccgacaccgaggccgtggtgtgcgtgggcaccgcctgctacaccgcccacagcggcaagctgagcgccgccgaggcccagaaccactgcaaccagaacggcggcaacctggccaccgtgaagagcaaggaggaggcccagcacgtgcagagagtgctggcccagctgctgagaagagaggccgccctgaccgccagaatgagcaagttctggatcggcctgcagagagagaagggcaagtgcctggaccccagcctgcccctgaagggcttcagctgggtgggcggcggcgaggacaccccctacagcaactggcacaaggagctgagaaacagctgcatcagcaagagatgcgtgagcctgctgctggacctgagccagcccctgctgcccagcagactgcccaagtggagcgagggcccctgcggcagccccggcagccccggcagcaacatcgagggcttcgtgtgcaagttcagcttcaagggcatgtgcagacccctggccctgggcggccccggccaggtgacctacaccacccccttccagaccaccagcagcagcctggaggccgtgcccttcgccagcgccgccaacgtggcctgcggcgagggcgacaaggacgagacccagagccactacttcctgtgcaaggagaaggcccccgacgtgttcgactggggcagcagcggccccctgtgcgtgagccccaagtacggctgcaacttcaacaacggcggctgccaccaggactgcttcgagggcggcgacggcagcttcctgtgcggctgcagacccggcttcagactgctggacgacctggtgacctgcgccagcagaaacccctgcagcagcagcccctgcagaggcggcgccacctgcgccctgggcccccacggcaagaactacacctgcagatgcccccagggctaccagctggacagcagccagctggactgcgtggacgtggacgagtgccaggacagcccctgcgcccaggagtgcgtgaacacccccggcggcttcagatgcgagtgctgggtgggctacgagcccggcggccccggcgagggcgcctgccaggacgtggacgagtgcgccctgggcagaagcccctgcgcccagggctgcaccaacaccgacggcagcttccactgcagctgcgaggagggctacgtgctggccggcgaggacggcacccagtgccaggacgtggacgagtgcgtgggccccggcggccccctgtgcgacagcctgtgcttcaacacccagggcagcttccactgcggctgcctgcccggctgggtgctggcccccaacggcgtgagctgcaccatgggccccgtgagcctgggcccccccagcggcccccccgacgaggaggacaagggcgagaaggagggcagcaccgtgcccagagccgccaccgccagccccaccagaggccccgagggcacccccaaggccacccccaccaccagcagacccagcctgagcagcgacgcccccatcaccagcgcccccctgaagatgctggcccccagcggcagcagcggcgtgtggagagagcccagcatccaccacgccaccgccgccagcggcccccaggagcccgccggcggcgacagcagcgtggccacccagaacaacgacggcaccgacggccagaagctgctgctgttctacatcctgggcaccgtggtggccatcctgctgctgctggccctggccctgggcctgctggtgtacagaaagagaagagccaagagagaggagaagaaggagaagaagccccagaacgccgccgacagctacagctgggtgcccgagagagccgagagcagagccatggagaaccagtacagccccacccccggcaccgactgctga

SEQ ID NO: 8037 - RNA, 1959 nt, synthetic construct
  misc_feature 1..1959: note = derived and/or modified sequence opt5 fromcomplement_system_component_C1qR__Homo_sapiens__CAC8272 0
  source 1..1959: mol_type = other RNA
atggccaccagcatgggcctgctcctgcttctgctcctgcttctgacacagcccggggctggaacgggcgccgacaccgaggcggtggtctgcgttgggacagcttgttacaccgcccactccggaaagctctctgccgctgaagcccaaaaccattgcaatcagaacggcgggaatctggctacagtgaaaagcaaggaggaagcccagcacgtgcagagagtcctggcgcaactcctgcggcgcgaggccgctcttaccgccagaatgtccaaattctggatcggactgcagcgggaaaagggcaaatgtctcgatccttctctgccgcttaagggctttagctgggtgggaggaggcgaggacacaccctattccaactggcataaggagctgcgcaattcttgcattagcaaaagatgtgtttccctcctgctggatctcagccagcctctgcttccctctcggctgcctaagtggtccgaagggccctgcggaagccctggctctccggggtccaacatcgagggattcgtgtgtaaatttagcttcaagggcatgtgccgccccctcgctctgggcgggcctggacaggtcacctacacgaccccctttcaaacaacctcttccagccttgaagccgtgcctttcgcgtccgccgctaatgttgcctgtggcgagggggacaaagatgagacacagtctcactattttctgtgcaaggaaaaggctcccgacgtgttcgattggggaagctccggcccgctctgtgtcagccctaaatacgggtgcaactttaataacggaggctgccatcaggactgtttcgagggcggggatggatcttttctgtgcggctgtagacccgggttccggctgctcgacgatctggtgacctgcgcctcccgcaatccttgtagctctagcccctgcagaggaggcgccacgtgtgctcttgggccccacggcaagaactatacatgccggtgtcctcagggataccaactggactcctctcagctcgattgcgtggacgtcgacgaatgtcaggatagcccgtgcgcgcaagagtgcgttaatacccccggcgggtttcgctgtgaatgctgggtgggatatgagcctggcgggcccggagagggcgcctgtcaggacgtggatgaatgcgctctggggagatccccttgtgcccagggctgcacaaacaccgacgggagcttccactgttcttgcgaggaaggctacgtccttgccggggaggatggaacccagtgtcaagacgtggatgaatgcgttggccccgggggaccgctgtgtgactccctctgcttcaatacacagggcagctttcattgcgggtgtctgcctggctgggtgctggctcccaacggagtctcttgcacgatgggccctgtgtccctcgggccccctagcggacccccggatgaggaggacaaaggcgaaaaggaggggtccaccgttcctcgggccgcgacagcttctcccacccgcggacccgaaggcacacctaaagccaccccgacgacaagcagaccctccctgtctagcgatgcccctattacctccgctccccttaagatgctggcccctagcgggtcttccggcgtgtggcgggagcccagcatccaccatgctaccgccgcgtctggacctcaggaacccgccggcggggactccagcgtcgctacacagaacaatgacggaaccgatggccaaaaactcctgctgttctacattcttgggacagtggtcgccatcctcctgctgctcgctctggcccttggactgctcgtgtatagaaagcgccgggcgaagagagaggagaaaaaggagaaaaagccgcagaacgccgctgactcttacagctgggttcctgaacgcgccgaatcccgggctatggagaatcagtatagccccacgcctggcaccgattgttga

SEQ ID NO: 8038 - protein, 688 aa, synthetic construct
  REGION 1..688: note = complement_system_component_C1s__Homo_sapiens__P09871
MWCIVLFSLLAWVYAEPTMYGEILSPNYPQAYPSEVEKSWDIEVPEGYGIHLYFTHLDIELSENCAYDSVQIISGDTEEGRLCGQRSSNNPHSPIVEEFQVPYNKLQVIFKSDFSNEERFTGFAAYYVATDINECTDFVDVPCSHFCNNFIGGYFCSCPPEYFLHDDMKNCGVNCSGDVFTALIGEIASPNYPKPYPENSRCEYQIRLEKGFQVVVTLRREDFDVEAADSAGNCLDSLVFVAGDRQFGPYCGHGFPGPLNIETKSNALDIIFQTDLTGQKKGWKLRYHGDPMPCPKEDTPNSVWEPAKAKYVFRDVVQITCLDGFEVVEGRVGATSFYSTCQSNGKWSNSKLKCQPVDCGIPESIENGKVEDPESTLFGSVIRYTCEEPYYYMENGGGGEYHCAGNGSWVNEVLGPELPKCVPVCGVPREPFEEKQRIIGGSDADIKNFPWQVFFDNPWAGGALINEYWVLTAAHVVEGNREPTMYVGSTSVQTSRLAKSKMLTPEHVFIHPGWKLLEVPEGRTNFDNDIALVRLKDPVKMGPTVSPICLPGTSSDYNLMDGDLGLISGWGRTEKRDRAVRLKAARLPVAPLRKCKEVKVEKPTADAEAYVFTPNMICAGGEKGMDSCKGDSGGAFAVQDPNDKTKFYAAGLVSWGPQCGTYGLYTRVKNYVDWIMKTMQENSTPRED

SEQ ID NO: 8039 - RNA, 2067 nt, synthetic construct
  misc_feature 1..2067: note complement_system_component_C1s__Homo_sapiens__AAA51852
  source 1..2067: mol_type = other RNA
atgtggtgcattgtcctgttttcacttttggcatgggtttatgctgagcctaccatgtatggggagatcctgtcccctaactatcctcaggcatatcccagtgaggtagagaaatcttgggacatagaagttcctgaagggtatgggattcacctctacttcacccatctggacattgagctgtcagagaactgtgcgtatgactcagtgcagataatctcaggagacactgaagaagggaggctctgtggacagaggagcagtaacaatccccactctccaattgtggaagagttccaagtcccatacaacaaactccaggtgatctttaagtcagacttttccaatgaagagcgttttacggggtttgctgcatactatgttgccacagacataaatgaatgcacagattttgtagatgtcccttgtagccacttctgcaacaatttcattggtggttacttctgctcctgccccccggaatatttcctccatgatgacatgaagaattgcggagttaattgcagtggggatgtattcactgcactgattggggagattgcaagtcccaattatcccaaaccatatccagagaactcaaggtgtgaataccagatccggttggagaaagggttccaagtggtggtgaccttgcggagagaagattttgatgtggaagcagctgactcagcgggaaactgccttgacagtttagtttttgttgcaggagatcggcaatttggtccttactgtggtcatggattccctgggcctctaaatattgaaaccaagagtaatgctcttgatatcatcttccaaactgatctaacagggcaaaaaaagggctggaaacttcgctatcatggagatccaatgccctgccctaaggaagacactcccaattctgtttgggagcctgcgaaggcaaaatatgtctttagagatgtggtgcagataacctgtctggatgggtttgaagttgtggagggacgtgttggtgcaacatctttctattcgacttgtcaaagcaatggaaagtggagtaattccaaactgaaatgtcaacctgtggactgtggcattcctgaatccattgagaatggtaaagttgaagacccagagagcactttgtttggttctgtcatccgctacacttgtgaggagccatattactacatggaaaatggaggaggtggggagtatcactgtgctggtaacgggagctgggtgaatgaggtgctgggcccggagctgccgaaatgtgttccagtctgtggagtccccagagaaccctttgaagaaaaacagaggataattggaggatccgatgcagatattaaaaacttcccctggcaagtcttctttgacaacccatgggctggtggagcgctcattaatgagtactgggtgctgacggctgctcatgttgtggagggaaacagggagccaacaatgtatgttgggtccacctcagtgcagacctcacggctggcaaaatccaagatgctcactcctgagcatgtgtttattcatccgggatggaagctgctggaagtcccagaaggacgaaccaattttgataatgacattgcactggtgcggctgaaagacccagtgaaaatgggacccaccgtctctcccatctgcctaccaggcacctcttccgactacaacctcatggatggggacctgggactgatctcaggctggggccgaacagagaagagagatcgtgctgttcgcctcaaggcggcaaggttacctgtagctcctttaagaaaatgcaaagaagtgaaagtggagaaacccacagcagatgcagaggcctatgttttcactcctaacatgatctgtgctggaggagagaagggcatggatagctgtaaaggggacagtggtggggcctttgctgtacaggatcccaatgacaagaccaaattctacgcagctggcctggtgtcctgggggccccagtgtgggacctatgggctctacacacgggtaaagaactatgttgactggataatgaagactatgcaggaaaatagcaccccccgtgaggactaa

SEQ ID NO: 8040 - RNA, 2067 nt, synthetic construct
  misc_feature 1..2067: note = derived and/or modified sequence opt1 fromcomplement_system_component_C1s__Homo_sapiens__AAA51852
  source 1..2067: mol_type = other RNA
atgtggtgcatcgtgctgttcagcctcctggcctgggtctacgccgagcccaccatgtacggcgagatcctgtccccgaactacccccaggcgtaccccagcgaggtggagaagtcctgggacatcgaggtgcccgaggggtacggcatccacctctacttcacccacctggacatcgagctgagcgagaactgcgcctacgactccgtccagatcatcagcggggacacggaggagggccgcctctgcgggcagcggtccagcaacaacccgcactcccccatcgtggaggagttccaggtgccctacaacaagctgcaggtcatcttcaagagcgacttctccaacgaggagcgcttcaccggcttcgccgcctactacgtggccaccgacatcaacgagtgcaccgacttcgtggacgtcccctgcagccacttctgcaacaacttcatcggcgggtacttctgctcctgcccgcccgagtacttcctgcacgacgacatgaagaactgcggcgtgaactgcagcggggacgtgttcacggcgctcatcggcgagatcgcctcccccaactaccccaagccgtaccccgagaacagccggtgcgagtaccagatccgcctggagaaggggttccaggtcgtggtgaccctgcggcgcgaggacttcgacgtcgaggccgccgactccgcgggcaactgcctcgacagcctggtgttcgtggccggcgaccggcagttcgggccctactgcggccacgggttccccggcccgctgaacatcgagaccaagtccaacgccctcgacatcatcttccagaccgacctgacgggccagaagaaggggtggaagctgcgctaccacggcgaccccatgccctgccccaaggaggacaccccgaacagcgtctgggagcccgccaaggccaagtacgtgttccgggacgtggtccagatcacctgcctcgacgggttcgaggtggtggagggccgcgtcggggcgaccagcttctactccacgtgccagagcaacggcaagtggtccaacagcaagctgaagtgccagcccgtggactgcggcatccccgagtccatcgagaacgggaaggtcgaggacccggagagcaccctgttcggctccgtgatccggtacacctgcgaggagccctactactacatggagaacgggggcgggggcgagtaccactgcgccggcaacgggagctgggtgaacgaggtcctcggccccgagctgcccaagtgcgtgccggtgtgcggggtcccccgcgagcccttcgaggagaagcagcggatcatcggcgggtccgacgccgacatcaagaacttcccgtggcaggtgttcttcgacaacccctgggccggcggcgccctgatcaacgagtactgggtgctcaccgcggcccacgtcgtggaggggaaccgcgagcccacgatgtacgtgggcagcacctccgtccagaccagccggctggccaagtccaagatgctgacccccgagcacgtgttcatccacccggggtggaagctcctggaggtgcccgagggccgcacgaacttcgacaacgacatcgccctggtccggctcaaggaccccgtgaagatgggccccaccgtgagcccgatctgcctgcccgggacctccagcgactacaacctgatggacggcgacctcgggctgatctccggctgggggcgcaccgagaagcgggaccgcgccgtccggctgaaggcggcccgcctccccgtggcccccctgcgcaagtgcaaggaggtgaaggtcgagaagccgacggccgacgccgaggcgtacgtgttcacccccaacatgatctgcgccggcggcgagaaggggatggacagctgcaagggcgactccgggggcgccttcgccgtgcaggaccccaacgacaagaccaagttctacgcggccgggctggtcagctggggcccccagtgcggcacctacgggctctacacgcgggtgaagaactacgtggactggatcatgaagaccatgcaggagaacagcaccccgcgcgaggactga

SEQ ID NO: 8041 - RNA, 2067 nt, synthetic construct
  misc_feature 1..2067: note = derived and/or modified sequence opt2 fromcomplement_system_component_C1s__Homo_sapiens__AAA51852
  source 1..2067: mol_type = other RNA
atgtggtgcatcgtcctcttctccctcctcgcctgggtctacgccgagcccaccatgtacggcgagatcctctcccccaactacccccaggcctacccctccgaggtcgagaagtcctgggacatcgaggtccccgagggctacggcatccacctctacttcacccacctcgacatcgagctctccgagaactgcgcctacgactccgtccagatcatctccggcgacaccgaggagggccgcctctgcggccagcgctcctccaacaacccccactcccccatcgtcgaggagttccaggtcccctacaacaagctccaggtcatcttcaagtccgacttctccaacgaggagcgcttcaccggcttcgccgcctactacgtcgccaccgacatcaacgagtgcaccgacttcgtcgacgtcccctgctcccacttctgcaacaacttcatcggcggctacttctgctcctgcccccccgagtacttcctccacgacgacatgaagaactgcggcgtcaactgctccggcgacgtcttcaccgccctcatcggcgagatcgcctcccccaactaccccaagccctaccccgagaactcccgctgcgagtaccagatccgcctcgagaagggcttccaggtcgtcgtcaccctccgccgcgaggacttcgacgtcgaggccgccgactccgccggcaactgcctcgactccctcgtcttcgtcgccggcgaccgccagttcggcccctactgcggccacggcttccccggccccctcaacatcgagaccaagtccaacgccctcgacatcatcttccagaccgacctcaccggccagaagaagggctggaagctccgctaccacggcgaccccatgccctgccccaaggaggacacccccaactccgtctgggagcccgccaaggccaagtacgtcttccgcgacgtcgtccagatcacctgcctcgacggcttcgaggtcgtcgagggccgcgtcggcgccacctccttctactccacctgccagtccaacggcaagtggtccaactccaagctcaagtgccagcccgtcgactgcggcatccccgagtccatcgagaacggcaaggtcgaggaccccgagtccaccctcttcggctccgtcatccgctacacctgcgaggagccctactactacatggagaacggcggcggcggcgagtaccactgcgccggcaacggctcctgggtcaacgaggtcctcggccccgagctccccaagtgcgtccccgtctgcggcgtcccccgcgagcccttcgaggagaagcagcgcatcatcggcggctccgacgccgacatcaagaacttcccctggcaggtcttcttcgacaacccctgggccggcggcgccctcatcaacgagtactgggtcctcaccgccgcccacgtcgtcgagggcaaccgcgagcccaccatgtacgtcggctccacctccgtccagacctcccgcctcgccaagtccaagatgctcacccccgagcacgtcttcatccaccccggctggaagctcctcgaggtccccgagggccgcaccaacttcgacaacgacatcgccctcgtccgcctcaaggaccccgtcaagatgggccccaccgtctcccccatctgcctccccggcacctcctccgactacaacctcatggacggcgacctcggcctcatctccggctggggccgcaccgagaagcgcgaccgcgccgtccgcctcaaggccgcccgcctccccgtcgcccccctccgcaagtgcaaggaggtcaaggtcgagaagcccaccgccgacgccgaggcctacgtcttcacccccaacatgatctgcgccggcggcgagaagggcatggactcctgcaagggcgactccggcggcgccttcgccgtccaggaccccaacgacaagaccaagttctacgccgccggcctcgtctcctggggcccccagtgcggcacctacggcctctacacccgcgtcaagaactacgtcgactggatcatgaagaccatgcaggagaactccaccccccgcgaggactga

SEQ ID NO: 8042 - RNA, 2067 nt, synthetic construct
  misc_feature 1..2067: note = derived and/or modified sequence opt3 fromcomplement_system_component_C1s__Homo_sapiens__AAA51852
  source 1..2067: mol_type = other RNA
atgtggtgcatcgtgctgttcagcctccttgcctgggtctacgctgagcccaccatgtatggcgaaattctgtcccctaactacccacaggcatatccgtctgaggttgaaaagtcatgggacatagaggtgcccgaagggtacggaatccacttgtattttacacatttagatattgagctgagtgagaattgtgcctacgacagcgtacaaatcatttccggtgatactgaagagggcagactatgcgggcagaggtcttcgaacaatcctcactcaccaatcgtggaagagttccaggtcccctataacaaactccaggtgatatttaagagcgacttcagtaatgaggaacggtttacgggattcgcggcttactacgttgccaccgatatcaacgagtgtacagactttgtggatgtcccttgctcccatttctgtaataactttattggcggttatttctgctcttgtccacccgaatactttctgcacgacgatatgaaaaattgcggggtgaactgtagcggagacgtattcactgcacttatcggcgagattgcctcccctaattatccaaagccgtaccccgaaaactcacgctgcgagtatcaaatccgactggagaaaggctttcaggttgtggtcaccttgcgtagagaagatttcgacgtggaggctgcagatagtgccgggaattgtctcgacagcctggtgttcgtcgctggagacaggcagtttggtccttactgcggccatgggttcccaggacccctgaacatagaaacaaagtctaatgccctcgatattatctttcagaccgacttaactggccaaaagaaaggttggaagctgcggtatcacggggatcctatgccatgccccaaagaggacacaccgaactccgtttgggaacctgcgaaggcaaaatacgtgttccgcgatgtagtgcagattacctgtcttgacggatttgaggtcgtggagggcagagttggcgccacgtcattctacagcacttgccagagtaacgggaagtggtctaattccaagttgaaatgtcagcccgtggattgcggaatcccagaaagcatcgagaacggtaaggtcgaagaccctgagtcgaccctgtttggctctgtgattaggtatacatgtgaggaaccctactattacatggagaatgggggaggcggtgaatatcactgcgctgggaacggctcctgggtaaatgaggttctaggaccagaactccccaaatgtgtgcctgtctgcggcgtgccacgggagccgttcgaggaaaagcaacgcataatcgggggatcagatgccgacattaaaaactttccctggcaggtcttctttgataatccttgggctggtggcgcactgatcaacgagtactgggtgcttactgccgcgcatgttgtggaagggaatcgagagccaaccatgtatgtaggaagtacaagcgtccagacctccagactggccaagtctaaaatgttgacgcccgaacacgtgttcatacatcctggctggaagctcctggaggttccagagggtaggactaactttgacaatgacattgcattagtgcggctgaaggatcccgtcaaaatggggccgacagtgagccctatctgtctcccaggcacctcaagtgactacaaccttatggatggagacctgggcttgatctccgggtggggacgtactgaaaagcgcgatagagctgtaaggctaaaagccgctcggctgcccgtggcccctctccgaaagtgcaaagaggttaaggtcgaaaagcccacagcagacgccgaggcttacgtgttcaccccaaatatgatttgtgcgggtggcgaaaaagggatggatagctgcaagggagactctggcggtgcattcgccgtgcaagatcctaacgacaaaacgaagttttatgctgccgggctggtctcatggggcccccagtgcggaacctacggcctttatacacgcgttaaaaattacgtggattggatcatgaagactatgcaggagaacagtaccccaagagaggactga

SEQ ID NO: 8043 - RNA, 2067 nt, synthetic construct
  misc_feature 1..2067: note = derived and/or modified sequence opt4 fromcomplement_system_component_C1s__Homo_sapiens__AAA51852
  source 1..2067: mol_type = other RNA
atgtggtgcatcgtgctgttcagcctgctggcctgggtgtacgccgagcccaccatgtacggcgagatcctgagccccaactacccccaggcctaccccagcgaggtggagaagagctgggacatcgaggtgcccgagggctacggcatccacctgtacttcacccacctggacatcgagctgagcgagaactgcgcctacgacagcgtgcagatcatcagcggcgacaccgaggagggcagactgtgcggccagagaagcagcaacaacccccacagccccatcgtggaggagttccaggtgccctacaacaagctgcaggtgatcttcaagagcgacttcagcaacgaggagagattcaccggcttcgccgcctactacgtggccaccgacatcaacgagtgcaccgacttcgtggacgtgccctgcagccacttctgcaacaacttcatcggcggctacttctgcagctgcccccccgagtacttcctgcacgacgacatgaagaactgcggcgtgaactgcagcggcgacgtgttcaccgccctgatcggcgagatcgccagccccaactaccccaagccctaccccgagaacagcagatgcgagtaccagatcagactggagaagggcttccaggtggtggtgaccctgagaagagaggacttcgacgtggaggccgccgacagcgccggcaactgcctggacagcctggtgttcgtggccggcgacagacagttcggcccctactgcggccacggcttccccggccccctgaacatcgagaccaagagcaacgccctggacatcatcttccagaccgacctgaccggccagaagaagggctggaagctgagataccacggcgaccccatgccctgccccaaggaggacacccccaacagcgtgtgggagcccgccaaggccaagtacgtgttcagagacgtggtgcagatcacctgcctggacggcttcgaggtggtggagggcagagtgggcgccaccagcttctacagcacctgccagagcaacggcaagtggagcaacagcaagctgaagtgccagcccgtggactgcggcatccccgagagcatcgagaacggcaaggtggaggaccccgagagcaccctgttcggcagcgtgatcagatacacctgcgaggagccctactactacatggagaacggcggcggcggcgagtaccactgcgccggcaacggcagctgggtgaacgaggtgctgggccccgagctgcccaagtgcgtgcccgtgtgcggcgtgcccagagagcccttcgaggagaagcagagaatcatcggcggcagcgacgccgacatcaagaacttcccctggcaggtgttcttcgacaacccctgggccggcggcgccctgatcaacgagtactgggtgctgaccgccgcccacgtggtggagggcaacagagagcccaccatgtacgtgggcagcaccagcgtgcagaccagcagactggccaagagcaagatgctgacccccgagcacgtgttcatccaccccggctggaagctgctggaggtgcccgagggcagaaccaacttcgacaacgacatcgccctggtgagactgaaggaccccgtgaagatgggccccaccgtgagccccatctgcctgcccggcaccagcagcgactacaacctgatggacggcgacctgggcctgatcagcggctggggcagaaccgagaagagagacagagccgtgagactgaaggccgccagactgcccgtggcccccctgagaaagtgcaaggaggtgaaggtggagaagcccaccgccgacgccgaggcctacgtgttcacccccaacatgatctgcgccggcggcgagaagggcatggacagctgcaagggcgacagcggcggcgccttcgccgtgcaggaccccaacgacaagaccaagttctacgccgccggcctggtgagctggggcccccagtgcggcacctacggcctgtacaccagagtgaagaactacgtggactggatcatgaagaccatgcaggagaacagcacccccagagaggactga

SEQ ID NO: 8044 - RNA, 2067 nt, synthetic construct
  misc_feature 1..2067: note = derived and/or modified sequence opt5 fromcomplement_system_component_C1s__Homo_sapiens__AAA51852
  source 1..2067: mol_type = other RNA
atgtggtgcatcgtgctgttcagcctcctggcctgggtctacgctgagcccaccatgtatggcgaaattctttcccctaactacccgcaggcctatccctctgaggttgaaaagagctgggacatcgaggtgcctgaagggtacggcattcacctgtattttacacatctcgatatcgagctgtccgagaattgtgcgtacgactctgtgcaaattatcagcggagatacggaagaggggagactttgcggacagcggtcctctaacaatccccacagccctatcgtcgaagagttccaggtgccctataacaaactgcaggttatttttaagtccgacttcagcaatgaggaacgctttaccggcttcgctgcctactacgtggccacagatatcaacgagtgtaccgactttgtcgatgtgccttgctctcatttctgtaataactttattgggggatatttctgctcctgtccgcccgaatactttctccacgacgatatgaaaaattgcggcgttaactgtagcggcgacgtgttcacagctctgatcggggagattgcctctcctaattatcccaagccttaccccgaaaactccagatgcgagtatcaaatccggctggagaaaggatttcaggtcgtggtgaccctccgcagagaagatttcgacgtcgaggctgccgatagcgcgggcaattgtctggactctcttgttttcgtggccggggaccggcagtttggaccgtactgcggccatgggttccctggacccctgaacattgaaacaaagtccaatgctctcgatatcatctttcagaccgacctgacgggccaaaagaaaggctggaaacttcgctatcacggggatcctatgccctgccccaaggaggacacccctaacagcgtgtgggaaccggccaaggctaaatacgtcttcagagatgtggttcagattacatgtctggacggatttgaggtggtcgagggccgggtgggggccacctccttctactctacatgccagagcaacggaaagtggtccaatagcaagctcaaatgtcagcccgttgattgcggcatccctgaatctattgagaacgggaaggtggaagaccccgagtccaccctgtttggaagcgtcatccgctatacgtgtgaggaaccttactattacatggagaatggcggcgggggagaatatcactgcgcgggcaacgggtcttgggtgaatgaggtcctgggacccgaactcccgaaatgtgtgcctgtttgcggcgtgcccagagagcctttcgaggaaaagcaacggattatcgggggcagcgatgccgacatcaaaaactttccctggcaggtcttctttgataatccttgggctggaggcgccctgattaacgagtactgggtgcttacagctgcccatgttgtggaagggaatcgcgagcccaccatgtatgtcggatccacatctgtgcagaccagcagactggccaagtccaaaatgctcaccccggaacacgtgttcatccatcctggctggaagctgcttgaggttcccgaggggcggacaaactttgacaatgacattgctctggtccgcctcaaggatcccgtgaaaatgggacctacggtgagcccgatctgtctgcccggcacctcttccgactacaacctgatggatggggacctcggcctgattagcggatggggcagaacagaaaagcgggatagagcggtccgccttaaagccgctcggctgcctgtggcgcccctcagaaagtgcaaagaggttaaggtggaaaagcctaccgccgacgctgaggcctacgtcttcacacccaatatgatctgtgccgggggagaaaaaggcatggattcttgcaagggggactccggaggcgctttcgccgtgcaagatcctaacgacaaaaccaagttttatgccgctgggctggttagctggggcccccagtgcggaacgtacggcctttatacacgcgtgaaaaattacgtcgattggatcatgaagaccatgcaggagaactccaccccgcgggaggactga

SEQ ID NO: 8045 - protein, 597 aa, synthetic construct
  REGION 1..597: note complement_system_component_C4bp__Homo_sapiens__P04003
MHPPKTPSGALHRKRKMAAWPFSRLWKVSDPILFQMTLIAALLPAVLGNCGPPPTLSFAAPMDITLTETRFKTGTTLKYTCLPGYVRSHSTQTLTCNSDGEWVYNTFCIYKRCRHPGELRNGQVEIKTDLSFGSQIEFSCSEGFFLIGSTTSRCEVQDRGVGWSHPLPQCEIVKCKPPPDIRNGRHSGEENFYAYGFSVTYSCDPRFSLLGHASISCTVENETIGVWRPSPPTCEKITCRKPDVSHGEMVSGFGPIYNYKDTIVFKCQKGFVLRGSSVIHCDADSKWNPSPPACEPNSCINLPDIPHASWETYPRPTKEDVYVVGTVLRYRCHPGYKPTTDEPTTVICQKNLRWTPYQGCEALCCPEPKLNNGEITQHRKSRPANHCVYFYGDEISFSCHETSRFSAICQGDGTWSPRTPSCGDICNFPPKIAHGHYKQSSSYSFFKEEIIYECDKGYILVGQAKLSCSYSHWSAPAPQCKALCRKPELVNGRLSVDKDQYVEPENVTIQCDSGYGVVGPQSITCSGNRTWYPEVPKCEWETPEGCEQVLTGKRLMQCLPNPEDVKMALEVYKLSLEIEQLELQRDSARQSTLDKEL

SEQ ID NO: 8046 - RNA, 1794 nt, synthetic construct
  misc_feature 1..1794: note complement_system_component_C4bp__Homo_sapiens__AAA36506
  source 1..1794: mol_type = other RNA
atgcaccccccaaaaactccatctggggctcttcatagaaaaaggaaaatggcagcctggcccttctccaggctgtggaaagtctctgatccaattctcttccaaatgaccttgatcgctgctctgttgcctgctgttcttggcaattgtggtcctccacccactttatcatttgctgccccgatggatattacgttgactgagacacgcttcaaaactggaactactctgaaatacacctgcctccctggctacgtcagatcccattcaactcagacgcttacctgtaattctgatggcgaatgggtgtataacaccttctgtatctacaaacgatgcagacacccaggagagttacgtaatgggcaagtagagattaagacagatttatcttttggatcacaaatagaattcagctgttcagaaggatttttcttaattggctcaaccactagtcgttgtgaagtccaagatagaggagttggctggagtcatcctctcccacaatgtgaaattgtcaagtgtaagcctcctccagacatcaggaatggaaggcacagcggtgaagaaaatttctacgcatacggcttttctgtcacctacagctgtgacccccgcttctcactcttgggccatgcctccatttcttgcactgtggagaatgaaacaataggcgtttggagaccaagccctcctacctgtgaaaaaatcacctgtcgcaagccagatgtttcacatggggaaatggtctctggatttggacccatctataattacaaagacactattgtgtttaagtgccaaaaaggttttgttctcagaggcagcagtgtaattcattgtgatgctgatagcaaatggaatccttctcctcctgcttgtgagcccaatagttgtattaatttaccagacattccacatgcttcctgggaaacatatcctaggccgacaaaagaggatgtgtatgttgttgggactgtgttaaggtaccgctgtcatcctggctacaaacccactacagatgagcctacgactgtgatttgtcagaaaaatttgagatggaccccataccaaggatgtgaggcgttatgttgccctgaaccaaagctaaataatggtgaaatcactcaacacaggaaaagtcgtcctgccaatcactgtgtttatttctatggagatgagatttcattttcatgtcatgagaccagtaggttttcagctatatgccaaggagatggcacgtggagtccccgaacaccatcatgtggagacatttgcaattttcctcctaaaattgcccatgggcattataaacaatctagttcatacagctttttcaaagaagagattatatatgaatgtgataaaggctacattctggtcggacaggcgaaactctcctgcagttattcacactggtcagctccagcccctcaatgtaaagctctgtgtcggaaaccagaattagtgaatggaaggttgtctgtggataaggatcagtatgttgagcctgaaaatgtcaccatccaatgtgattctggctatggtgtggttggtccccaaagtatcacttgctctgggaacagaacctggtacccagaggtgcccaagtgtgagtgggagacccccgaaggctgtgaacaagtgctcacaggcaaaagactcatgcagtgtctcccaaacccagaggatgtgaaaatggccctggaggtatataagctgtctctggaaattgaacaactggaactacagagagacagcgcaagacaatccactttggataaagaactataa

SEQ ID NO: 8047 - RNA, 1794 nt, synthetic construct
  misc_feature 1..1794: note = derived and/or modified sequence opt1 fromcomplement_system_component_C4bp__Homo_sapiens__AAA3650 6
  source 1..1794: mol_type = other RNA
atgcacccgcccaagacccccagcggcgccctgcaccgcaagcggaagatggccgcgtggcccttctcccgcctctggaaggtgagcgaccccatcctgttccagatgaccctgatcgccgccctcctgccggccgtcctggggaactgcggcccgccgcccacgctctccttcgccgcgcccatggacatcaccctgaccgagacccggttcaagacggggaccaccctgaagtacacgtgcctccccggctacgtgcgcagccactccacgcagaccctgacctgcaacagcgacggggagtgggtgtacaacaccttctgcatctacaagcggtgccgccaccccggcgagctgcggaacggccaggtcgagatcaagacggacctctccttcgggagccagatcgagttctcctgcagcgagggcttcttcctgatcgggtccaccaccagccgctgcgaggtgcaggaccggggcgtggggtggtcccaccccctgccccagtgcgagatcgtcaagtgcaagcccccgcccgacatccgcaacggccggcacagcggcgaggagaacttctacgcctacgggttctccgtgacctacagctgcgacccccgcttctccctcctgggccacgccagcatctcctgcaccgtggagaacgagaccatcggggtctggcggcccagcccgcccacgtgcgagaagatcacgtgccgcaagcccgacgtgagccacggcgagatggtgtccggcttcgggcccatctacaactacaaggacaccatcgtcttcaagtgccagaagggcttcgtgctgcgggggagctccgtgatccactgcgacgccgacagcaagtggaaccccagcccgcccgcgtgcgagcccaactcctgcatcaacctccccgacatcccccacgcctcctgggagacctacccgcgccccaccaaggaggacgtctacgtggtgggcaccgtcctgcggtaccgctgccaccccgggtacaagccgaccaccgacgagcccaccaccgtgatctgccagaagaacctgcggtggacgccctaccagggctgcgaggccctctgctgccccgagccgaagctgaacaacggcgagatcacccagcaccgcaagagccggcccgccaaccactgcgtgtacttctacggggacgagatctccttcagctgccacgagacctcccgcttcagcgccatctgccagggcgacgggacctggagcccccgcacgccctcctgcggcgacatctgcaacttcccgcccaagatcgcgcacgggcactacaagcagtccagctcctacagcttcttcaaggaggagatcatctacgagtgcgacaagggctacatcctggtcggccaggccaagctctcctgcagctacagccactggtccgcccccgcgccccagtgcaaggccctgtgccggaagccggagctggtgaacgggcgcctcagcgtggacaaggaccagtacgtcgagcccgagaacgtgaccatccagtgcgactccggctacggggtcgtgggcccccagagcatcacgtgctccgggaaccggacctggtaccccgaggtgccgaagtgcgagtgggagacccccgagggctgcgagcaggtcctgaccggcaagcgcctgatgcagtgcctccccaaccccgaggacgtgaagatggccctggaggtgtacaagctgagcctcgagatcgagcagctggagctgcagcgggactccgcccgccagagcaccctcgacaaggagctgtga

SEQ ID NO: 8048 - RNA, 1794 nt, synthetic construct
  misc_feature 1..1794: note = derived and/or modified sequence opt2 fromcomplement_system_component_C4bp__Homo_sapiens__AAA3650 6
  source 1..1794: mol_type = other RNA
atgcacccccccaagaccccctccggcgccctccaccgcaagcgcaagatggccgcctggcccttctcccgcctctggaaggtctccgaccccatcctcttccagatgaccctcatcgccgccctcctccccgccgtcctcggcaactgcggccccccccccaccctctccttcgccgcccccatggacatcaccctcaccgagacccgcttcaagaccggcaccaccctcaagtacacctgcctccccggctacgtccgctcccactccacccagaccctcacctgcaactccgacggcgagtgggtctacaacaccttctgcatctacaagcgctgccgccaccccggcgagctccgcaacggccaggtcgagatcaagaccgacctctccttcggctcccagatcgagttctcctgctccgagggcttcttcctcatcggctccaccacctcccgctgcgaggtccaggaccgcggcgtcggctggtcccaccccctcccccagtgcgagatcgtcaagtgcaagcccccccccgacatccgcaacggccgccactccggcgaggagaacttctacgcctacggcttctccgtcacctactcctgcgacccccgcttctccctcctcggccacgcctccatctcctgcaccgtcgagaacgagaccatcggcgtctggcgcccctccccccccacctgcgagaagatcacctgccgcaagcccgacgtctcccacggcgagatggtctccggcttcggccccatctacaactacaaggacaccatcgtcttcaagtgccagaagggcttcgtcctccgcggctcctccgtcatccactgcgacgccgactccaagtggaacccctccccccccgcctgcgagcccaactcctgcatcaacctccccgacatcccccacgcctcctgggagacctacccccgccccaccaaggaggacgtctacgtcgtcggcaccgtcctccgctaccgctgccaccccggctacaagcccaccaccgacgagcccaccaccgtcatctgccagaagaacctccgctggaccccctaccagggctgcgaggccctctgctgccccgagcccaagctcaacaacggcgagatcacccagcaccgcaagtcccgccccgccaaccactgcgtctacttctacggcgacgagatctccttctcctgccacgagacctcccgcttctccgccatctgccagggcgacggcacctggtccccccgcaccccctcctgcggcgacatctgcaacttcccccccaagatcgcccacggccactacaagcagtcctcctcctactccttcttcaaggaggagatcatctacgagtgcgacaagggctacatcctcgtcggccaggccaagctctcctgctcctactcccactggtccgcccccgccccccagtgcaaggccctctgccgcaagcccgagctcgtcaacggccgcctctccgtcgacaaggaccagtacgtcgagcccgagaacgtcaccatccagtgcgactccggctacggcgtcgtcggcccccagtccatcacctgctccggcaaccgcacctggtaccccgaggtccccaagtgcgagtgggagacccccgagggctgcgagcaggtcctcaccggcaagcgcctcatgcagtgcctccccaaccccgaggacgtcaagatggccctcgaggtctacaagctctccctcgagatcgagcagctcgagctccagcgcgactccgcccgccagtccaccctcgacaaggagctctga

SEQ ID NO: 8049 - RNA, 1794 nt, synthetic construct
  misc_feature 1..1794: note = derived and/or modified sequence opt3 fromcomplement_system_component_C4bp__Homo_sapiens__AAA3650 6
  source 1..1794: mol_type = other RNA
atgcaccctcctaagaccccaagcggcgccctgcatagaaaaaggaagatggctgcatggccgttctcccggctctggaaagtgtctgaccccatcctttttcagatgacactgattgccgcgttgttacctgctgtcctggggaactgcggaccaccccctactctatcattcgccgcaccaatggatataacgctcaccgagacacgctttaagactggtaccacactgaaatacacctgtcttcccggctatgttcgaagtcacagcactcaaacactgacctgcaattccgacggggaatgggtgtacaacacgttctgtatctataagcgttgcagacatcctggagagttgaggaatggccaggtagaaattaagactgatctctcttttggttcgcagatcgagttctcatgtagcgaagggtttttcctgattggaagtaccacatcccggtgcgaggtgcaggaccgcggcgtcggctggtctcacccactgccgcaatgtgagatcgtgaaatgcaagccccctccagatataagaaacgggaggcatagcggagaagagaatttttacgcctatggtttctccgttacttactcatgtgacccccggtttagtctcttaggccacgctagcatctcttgcaccgtggaaaacgagacaattggggtctggcgcccttccccacccacctgtgagaaaatcacgtgccgaaagccggatgtgtcacacggagaaatggtaagcggcttcggtcctatttataattacaaagacactatcgtttttaagtgccagaaggggttcgtgctgagaggaagttctgtcatacattgtgatgcagactccaaatggaaccccagcccacccgcctgcgagcccaattcgtgtattaaccttccagatatcccccacgcttcttgggaaacataccctaggccaaccaaggaggacgtgtatgtggtcggcactgttttgcggtaccgttgccatccgggctataaacccacaaccgatgaacctacgaccgtgatttgtcagaagaatctgcgctggacaccataccaggggtgcgaggccctatgttgccccgagcctaaactcaacaatggagaaatcactcaacacagaaagtccaggccagcgaaccactgtgtatatttctacggtgacgagatctcatttagttgccatgaaaccagccggttctccgcaatttgtcagggcgacgggacatggtctccccgaactccgagctgcggagatatatgcaattttcctccaaaaatcgcccacggccattataagcagtcaagttcctacagcttctttaaggaggaaattatctacgagtgtgacaaaggttatatactggtggggcaggctaaactttcttgctcatacagtcactggagcgcccccgcacctcaatgtaaggctctgtgccgcaagcccgagttggtcaacggcagactctccgtggataaagaccagtatgttgaaccagagaacgtgaccattcagtgtgattctggatacggcgtcgtggggcctcaatcgatcacatgcagcggaaataggacctggtatcccgaagtaccaaagtgtgagtgggaaactccggagggttgcgagcaggttctgacgggcaagcggttaatgcagtgtctgcctaaccccgaagacgtgaaaatggccctcgaggtctacaaactttccctggaaatcgagcagttggagctacaacgcgattcagcgagacagagtacactggacaaggaactctga

SEQ ID NO: 8050 - RNA, 1794 nt, synthetic construct
  misc_feature 1..1794: note = derived and/or modified sequence opt4 fromcomplement_system_component_C4bp__Homo_sapiens__AAA3650 6
  source 1..1794: mol_type = other RNA
atgcacccccccaagacccccagcggcgccctgcacagaaagagaaagatggccgcctggcccttcagcagactgtggaaggtgagcgaccccatcctgttccagatgaccctgatcgccgccctgctgcccgccgtgctgggcaactgcggccccccccccaccctgagcttcgccgcccccatggacatcaccctgaccgagaccagattcaagaccggcaccaccctgaagtacacctgcctgcccggctacgtgagaagccacagcacccagaccctgacctgcaacagcgacggcgagtgggtgtacaacaccttctgcatctacaagagatgcagacaccccggcgagctgagaaacggccaggtggagatcaagaccgacctgagcttcggcagccagatcgagttcagctgcagcgagggcttcttcctgatcggcagcaccaccagcagatgcgaggtgcaggacagaggcgtgggctggagccaccccctgccccagtgcgagatcgtgaagtgcaagcccccccccgacatcagaaacggcagacacagcggcgaggagaacttctacgcctacggcttcagcgtgacctacagctgcgaccccagattcagcctgctgggccacgccagcatcagctgcaccgtggagaacgagaccatcggcgtgtggagacccagcccccccacctgcgagaagatcacctgcagaaagcccgacgtgagccacggcgagatggtgagcggcttcggccccatctacaactacaaggacaccatcgtgttcaagtgccagaagggcttcgtgctgagaggcagcagcgtgatccactgcgacgccgacagcaagtggaaccccagcccccccgcctgcgagcccaacagctgcatcaacctgcccgacatcccccacgccagctgggagacctaccccagacccaccaaggaggacgtgtacgtggtgggcaccgtgctgagatacagatgccaccccggctacaagcccaccaccgacgagcccaccaccgtgatctgccagaagaacctgagatggaccccctaccagggctgcgaggccctgtgctgccccgagcccaagctgaacaacggcgagatcacccagcacagaaagagcagacccgccaaccactgcgtgtacttctacggcgacgagatcagcttcagctgccacgagaccagcagattcagcgccatctgccagggcgacggcacctggagccccagaacccccagctgcggcgacatctgcaacttcccccccaagatcgcccacggccactacaagcagagcagcagctacagcttcttcaaggaggagatcatctacgagtgcgacaagggctacatcctggtgggccaggccaagctgagctgcagctacagccactggagcgcccccgccccccagtgcaaggccctgtgcagaaagcccgagctggtgaacggcagactgagcgtggacaaggaccagtacgtggagcccgagaacgtgaccatccagtgcgacagcggctacggcgtggtgggcccccagagcatcacctgcagcggcaacagaacctggtaccccgaggtgcccaagtgcgagtgggagacccccgagggctgcgagcaggtgctgaccggcaagagactgatgcagtgcctgcccaaccccgaggacgtgaagatggccctggaggtgtacaagctgagcctggagatcgagcagctggagctgcagagagacagcgccagacagagcaccctggacaaggagctgtga

SEQ ID NO: 8051 - RNA, 1794 nt, synthetic construct
  misc_feature 1..1794: note = derived and/or modified sequence opt5 fromcomplement_system_component_C4bp__Homo_sapiens__AAA3650 6
  source 1..1794: mol_type = other RNA
atgcatccccctaagaccccgagcggcgccctgcacagaaaacggaagatggctgcctggcccttctcccgcctctggaaagtgtctgaccctatcctgtttcagatgacacttattgcggctctgctccccgccgtcctggggaactgcggacctccccctacgcttagcttcgccgctccgatggatatcaccctgacagagaccagatttaagacaggcaccacactcaaatacacctgtctgcccgggtatgttcggtcccactctacgcaaaccctgacatgcaatagcgacggagaatgggtgtacaacaccttctgtatttataagcgctgcagacatcctggcgagctccggaatggacaggtggaaatcaagacagatctgtcctttgggtctcagattgagttcagctgttccgaaggctttttccttatcggcagcaccacgtctcgctgcgaggtccaggacagaggggtgggatggtcccaccccctgcctcaatgtgagatcgttaaatgcaagcccccgcctgatattcggaacggccgccatagcggggaagagaatttttacgcctatggattctctgtgacatactcctgtgaccccagatttagcctcctgggccacgcttctatctcctgcaccgtcgaaaacgagacaattggggtgtggcggcctagccctcccacctgtgagaaaattacctgccgcaagcccgatgtttcccacggagaaatggtgtctggcttcggcccgatctataattacaaagacacaatcgtctttaagtgccagaaggggttcgtgcttagaggaagctccgtgattcattgtgatgccgacagcaaatggaacccctctcctcccgcgtgcgagcctaattcctgtatcaacctgcccgatatcccgcacgccagctgggaaacgtaccctcggcccaccaaggaggacgtctatgttgtgggcacagtgctccgctacagatgccatcctgggtataaacccaccacagatgaacctaccacggtcatttgtcagaagaatctgcggtggacaccctaccagggatgcgaggctctgtgttgcccggagcctaaactcaacaatggcgaaatcacccaacacagaaagtctcgccccgccaaccactgtgtgtatttctacggggacgagattagcttttcctgccatgaaacctctcggttcagcgctatctgtcagggagacggcacatggtcccccagaacccctagctgcggcgatatttgcaattttccgcccaaaatcgcccacgggcattataagcagtcttccagctactctttctttaaggaggaaatcatttacgagtgtgacaaaggatatatcctggttggccaggcgaaactttcctgcagctactcccactggtctgcccctgctccccaatgtaaggccctgtgccgcaagcctgagctcgtgaacgggcggctgagcgtcgataaagaccagtatgtggaacccgagaacgttacaattcagtgtgattccggatacggcgtggtcgggcctcaatctatcacgtgcagcggcaatagaacctggtatcccgaagtgccgaagtgtgagtgggaaacacctgagggatgcgagcaggtccttaccggcaagcgcctgatgcagtgtctccccaaccctgaagacgtgaaaatggctctggaggtttacaagctgtccctcgaaattgagcagctggagcttcaacgggatagcgccagacagtctacactggacaaagaactctga

SEQ ID NO: 8052 - protein, 934 aa, synthetic construct
  REGION 1..934: note = complement_system_component_C6__Homo_sapiens__P13671
MARRSVLYFILLNALINKGQACFCDHYAWTQWTSCSKTCNSGTQSRHRQIVVDKYYQENFCEQICSKQETRECNWQRCPINCLLGDFGPWSDCDPCIEKQSKVRSVLRPSQFGGQPCTAPLVAFQPCIPSKLCKIEEADCKNKFRCDSGRCIARKLECNGENDCGDNSDERDCGRTKAVCTRKYNPIPSVQLMGNGFHFLAGEPRGEVLDNSFTGGICKTVKSSRTSNPYRVPANLENVGFEVQTAEDDLKTDFYKDLTSLGHNENQQGSFSSQGGSSFSVPIFYSSKRSENINHNSAFKQAIQASHKKDSSFIRIHKVMKVLNFTTKAKDLHLSDVFLKALNHLPLEYNSALYSRIFDDFGTHYFTSGSLGGVYDLLYQFSSEELKNSGLTEEEAKHCVRIETKKRVLFAKKTKVEHRCTTNKLSEKHEGSFIQGAEKSISLIRGGRSEYGAALAWEKGSSGLEEKTFSEWLESVKENPAVIDFELAPIVDLVRNIPCAVTKRNNLRKALQEYAAKFDPCQCAPCPNNGRPTLSGTECLCVCQSGTYGENCEKQSPDYKSNAVDGQWGCWSSWSTCDATYKRSRTRECNNPAPQRGGKRCEGEKRQEEDCTFSIMENNGQPCINDDEEMKEVDLPEIEADSGCPQPVPPENGFIRNEKQLYLVGEDVEISCLTGFETVGYQYFRCLPDGTWRQGDVECQRTECIKPVVQEVLTITPFQRLYRIGESIELTCPKGFVVAGPSRYTCQGNSWTPPISNSLTCEKDTLTKLKGHCQLGQKQSGSECICMSPEEDCSHHSEDLCVFDTDSNDYFTSPACKFLAEKCLNNQQLHFLHIGSCQDGRQLEWGLERTRLSSNSTKKESCGYDTCYDWEKCSASTSKCVCLLPPQCFKGGNQLYCVKMGSSTSEKTLNICEVGTIRCANRKMEILHPGKCLA

SEQ ID NO: 8053 - RNA, 2805 nt, synthetic construct
  misc_feature 1..2805: note complement_system_component_C6__Homo_sapiens__AAA51860
  source 1..2805: mol_type = other RNA
atggccagacgctctgtcttgtacttcatcctgctgaatgctctgatcaacaagggccaagcctgcttctgtgatcactatgcatggactcagtggaccagctgctcaaaaacttgcaattctggaacccagagcagacacagacaaatagtagtagataagtactaccaggaaaacttttgtgaacagatttgcagcaagcaggagactagagaatgtaactggcaaagatgccccatcaactgcctcctgggagattttggaccatggtcagactgtgacccttgtattgaaaaacagtctaaagttagatctgtcttgcgtcccagtcagtttgggggacagccatgcactgcgcctctggtagcctttcaaccatgcattccatctaagctctgcaaaattgaagaggctgactgcaagaataaatttcgctgtgacagtggccgctgcattgccagaaagttagaatgcaatggagaaaatgactgtggagacaattcagatgaaagggactgtgggaggacaaaggcagtatgcacacggaagtataatcccatccctagtgtacagttgatgggcaatgggtttcattttctggcaggagagcccagaggagaagtccttgataactctttcactggaggaatatgtaaaactgtcaaaagcagtaggacaagtaatccataccgtgttccggccaatctggaaaatgtcggctttgaggtacaaactgcagaagatgacttgaaaacagatttctacaaggatttaacttctcttggacacaatgaaaatcaacaaggctcattctcaagtcagggggggagctctttcagtgtaccaattttttattcctcaaagagaagtgaaaatatcaaccataattctgccttcaaacaagccattcaagcctctcacaaaaaggattctagttttattaggatccataaagtgatgaaagtcttaaacttcacaacgaaagctaaagatctgcacctttctgatgtctttttgaaagcacttaaccatctgcctctagaatacaactctgctttgtacagccgaatattcgatgactttgggactcattacttcacctctggctccctgggaggcgtgtatgaccttctctatcagtttagcagtgaggaactaaagaactcaggtttaaccgaggaagaagccaaacactgtgtcaggattgaaacaaagaaacgcgttttatttgctaagaaaacaaaagtggaacataggtgcaccaccaacaagctgtcagagaaacatgaaggttcatttatacagggagcagagaaatccatatccctgattcgaggtggaaggagtgaatatggagcagctttggcatgggagaaagggagctctggtctggaggagaagacattttctgagtggttagaatcagtgaaggaaaatcctgctgtgattgactttgagcttgcccccatcgtggacttggtaagaaacatcccctgtgcagtgacaaaacggaacaacctcaggaaagctttgcaagagtatgcagccaagttcgatccttgccagtgtgctccatgccctaataatggccgacccaccctctcagggactgaatgtctgtgtgtgtgtcagagtggcacctatggtgagaactgtgagaaacagtctccagattataaatccaatgcagtagacggacagtggggttgttggtcttcctggagtacctgtgatgctacttataagagatcgagaacccgagaatgcaataatcctgccccccaacgaggagggaaacgctgtgagggggagaagcgacaagaggaagactgcacattttcaatcatggaaaacaatggacaaccatgtatcaatgatgatgaagaaatgaaagaggtcgatcttcctgagatagaagcagattccgggtgtcctcagccagttcctccagaaaatggatttatccggaatgaaaagcaactatacttggttggagaagatgttgaaatttcatgccttactggctttgaaactgttggataccagtacttcagatgcttaccagacgggacctggagacaaggggatgtggaatgccaacggacggagtgcatcaagccagttgtgcaggaagtcctgacaattacaccatttcagagattgtatagaattggtgaatccattgagctaacttgccccaaaggctttgttgttgctgggccatcaaggtacacatgccaggggaattcctggacaccacccatttcaaactctctcacctgtgaaaaagatactctaacaaaattaaaaggccattgtcagctgggacagaaacaatcaggatctgaatgcatttgtatgtctccagaagaagactgtagccatcattcagaagatctctgtgtgtttgacacagactccaacgattactttacttcacccgcttgtaagtttttggctgagaaatgtttaaataatcagcaactccattttctacatattggttcctgccaagacggccgccagttagaatggggtcttgaaaggacaagactttcatccaacagcacaaagaaagaatcctgtggctatgacacctgctatgactgggaaaaatgttcagcctccacttccaaatgtgtctgcctattgcccccacagtgcttcaagggtggaaaccaactctactgtgtcaaaatgggatcatcaacaagtgagaaaacattgaacatctgtgaagtgggaactataagatgtgcaaacaggaagatggaaatactgcatcctggaaagtgtttggcctag

SEQ ID NO: 8054 - RNA, 2805 nt, synthetic construct
  misc_feature 1..2805: note = derived and/or modified sequence opt1 fromcomplement_system_component_C6__Homo_sapiens__AAA51860
  source 1..2805: mol_type = other RNA
atggcccgccggagcgtgctgtacttcatcctcctgaacgccctgatcaacaagggccaggcgtgcttctgcgaccactacgcctggacccagtggacctcctgcagcaagacgtgcaactccgggacccagagccgccaccggcagatcgtcgtggacaagtactaccaggagaacttctgcgagcagatctgctccaagcaggagacccgcgagtgcaactggcagcggtgccccatcaactgcctcctgggcgacttcgggccgtggagcgactgcgacccctgcatcgagaagcagtccaaggtgcgcagcgtcctgcggccctcccagttcggcgggcagccctgcaccgccccgctcgtggccttccagccctgcatccccagcaagctgtgcaagatcgaggaggccgactgcaagaacaagttccgctgcgactccggccggtgcatcgcgcgcaagctggagtgcaacggcgagaacgactgcggggacaacagcgacgagcgggactgcggccgcacgaaggccgtgtgcacccggaagtacaaccccatcccgtccgtccagctcatggggaacggcttccacttcctggccggggagccccgcggcgaggtgctggacaacagcttcaccggcgggatctgcaagaccgtgaagtccagccggacgtccaacccctaccgcgtccccgccaacctcgagaacgtgggcttcgaggtgcagaccgcggaggacgacctgaagaccgacttctacaaggacctgaccagcctcgggcacaacgagaaccagcagggctccttcagcagccagggcgggtccagcttctccgtcccgatcttctacagctccaagcggagcgagaacatcaaccacaactccgccttcaagcaggccatccaggccagccacaagaaggactccagcttcatccgcatccacaaggtgatgaaggtgctgaacttcacgaccaaggccaaggacctgcacctctccgacgtcttcctgaaggcgctgaaccacctccccctggagtacaacagcgccctgtactcccggatcttcgacgacttcggcacccactacttcaccagcgggtccctcggcggggtgtacgacctgctgtaccagttcagctccgaggagctcaagaacagcggcctgacggaggaggaggccaagcactgcgtgcgcatcgagaccaagaagcgggtcctgttcgccaagaagaccaaggtggagcaccgctgcaccacgaacaagctctccgagaagcacgagggcagcttcatccagggggccgagaagtccatcagcctgatccgcggcgggcggagcgagtacggcgcggccctggcctgggagaaggggtccagcggcctcgaggagaagaccttctccgagtggctggagagcgtgaaggagaaccccgccgtcatcgacttcgagctggcccccatcgtggacctcgtgcgcaacatcccgtgcgcggtcaccaagcggaacaacctgcgcaaggccctgcaggagtacgccgccaagttcgacccctgccagtgcgccccctgccccaacaacggccggccgaccctctccgggacggagtgcctgtgcgtgtgccagagcggcacctacggggagaactgcgagaagcagtcccccgactacaagagcaacgcggtcgacggccagtgggggtgctggtccagctggtccacgtgcgacgccacctacaagcgcagccggacccgcgagtgcaacaaccccgcgccccagcggggcggcaagcgctgcgagggggagaagcggcaggaggaggactgcaccttctccatcatggagaacaacggccagccgtgcatcaacgacgacgaggagatgaaggaggtggacctgcccgagatcgaggccgacagcgggtgcccccagcccgtgccgcccgagaacggcttcatccgcaacgagaagcagctctacctggtcggcgaggacgtggagatctcctgcctgaccgggttcgagaccgtgggctaccagtacttccggtgcctccccgacgggacgtggcgccagggcgacgtcgagtgccagcggaccgagtgcatcaagccggtggtgcaggaggtcctgaccatcacccccttccagcgcctgtaccggatcggggagagcatcgagctcacgtgccccaagggcttcgtggtggccggccccagccgctacacgtgccaggggaactcctggaccccgcccatcagcaactccctgacctgcgagaaggacaccctgaccaagctgaagggccactgccagctcgggcagaagcagagcggctccgagtgcatctgcatgagccccgaggaggactgctcccaccacagcgaggacctgtgcgtcttcgacaccgactccaacgactacttcaccagccccgcctgcaagttcctggccgagaagtgcctcaacaaccagcagctgcacttcctgcacatcgggtcctgccaggacggccggcagctcgagtggggcctggagcgcacccgcctgagctccaacagcacgaagaaggagtcctgcgggtacgacacgtgctacgactgggagaagtgcagcgcctccaccagcaagtgcgtgtgcctcctgccgccccagtgcttcaagggcgggaaccagctgtactgcgtgaagatgggctccagcaccagcgagaagaccctcaacatctgcgaggtcgggaccatccggtgcgccaaccgcaagatggagatcctgcaccccggcaagtgcctggcgtga

SEQ ID NO: 8055 - RNA, 2805 nt, synthetic construct
  misc_feature 1..2805: note = derived and/or modified sequence opt2 fromcomplement_system_component_C6__Homo_sapiens__AAA51860
  source 1..2805: mol_type = other RNA
atggcccgccgctccgtcctctacttcatcctcctcaacgccctcatcaacaagggccaggcctgcttctgcgaccactacgcctggacccagtggacctcctgctccaagacctgcaactccggcacccagtcccgccaccgccagatcgtcgtcgacaagtactaccaggagaacttctgcgagcagatctgctccaagcaggagacccgcgagtgcaactggcagcgctgccccatcaactgcctcctcggcgacttcggcccctggtccgactgcgacccctgcatcgagaagcagtccaaggtccgctccgtcctccgcccctcccagttcggcggccagccctgcaccgcccccctcgtcgccttccagccctgcatcccctccaagctctgcaagatcgaggaggccgactgcaagaacaagttccgctgcgactccggccgctgcatcgcccgcaagctcgagtgcaacggcgagaacgactgcggcgacaactccgacgagcgcgactgcggccgcaccaaggccgtctgcacccgcaagtacaaccccatcccctccgtccagctcatgggcaacggcttccacttcctcgccggcgagccccgcggcgaggtcctcgacaactccttcaccggcggcatctgcaagaccgtcaagtcctcccgcacctccaacccctaccgcgtccccgccaacctcgagaacgtcggcttcgaggtccagaccgccgaggacgacctcaagaccgacttctacaaggacctcacctccctcggccacaacgagaaccagcagggctccttctcctcccagggcggctcctccttctccgtccccatcttctactcctccaagcgctccgagaacatcaaccacaactccgccttcaagcaggccatccaggcctcccacaagaaggactcctccttcatccgcatccacaaggtcatgaaggtcctcaacttcaccaccaaggccaaggacctccacctctccgacgtcttcctcaaggccctcaaccacctccccctcgagtacaactccgccctctactcccgcatcttcgacgacttcggcacccactacttcacctccggctccctcggcggcgtctacgacctcctctaccagttctcctccgaggagctcaagaactccggcctcaccgaggaggaggccaagcactgcgtccgcatcgagaccaagaagcgcgtcctcttcgccaagaagaccaaggtcgagcaccgctgcaccaccaacaagctctccgagaagcacgagggctccttcatccagggcgccgagaagtccatctccctcatccgcggcggccgctccgagtacggcgccgccctcgcctgggagaagggctcctccggcctcgaggagaagaccttctccgagtggctcgagtccgtcaaggagaaccccgccgtcatcgacttcgagctcgcccccatcgtcgacctcgtccgcaacatcccctgcgccgtcaccaagcgcaacaacctccgcaaggccctccaggagtacgccgccaagttcgacccctgccagtgcgccccctgccccaacaacggccgccccaccctctccggcaccgagtgcctctgcgtctgccagtccggcacctacggcgagaactgcgagaagcagtcccccgactacaagtccaacgccgtcgacggccagtggggctgctggtcctcctggtccacctgcgacgccacctacaagcgctcccgcacccgcgagtgcaacaaccccgccccccagcgcggcggcaagcgctgcgagggcgagaagcgccaggaggaggactgcaccttctccatcatggagaacaacggccagccctgcatcaacgacgacgaggagatgaaggaggtcgacctccccgagatcgaggccgactccggctgcccccagcccgtcccccccgagaacggcttcatccgcaacgagaagcagctctacctcgtcggcgaggacgtcgagatctcctgcctcaccggcttcgagaccgtcggctaccagtacttccgctgcctccccgacggcacctggcgccagggcgacgtcgagtgccagcgcaccgagtgcatcaagcccgtcgtccaggaggtcctcaccatcacccccttccagcgcctctaccgcatcggcgagtccatcgagctcacctgccccaagggcttcgtcgtcgccggcccctcccgctacacctgccagggcaactcctggaccccccccatctccaactccctcacctgcgagaaggacaccctcaccaagctcaagggccactgccagctcggccagaagcagtccggctccgagtgcatctgcatgtcccccgaggaggactgctcccaccactccgaggacctctgcgtcttcgacaccgactccaacgactacttcacctcccccgcctgcaagttcctcgccgagaagtgcctcaacaaccagcagctccacttcctccacatcggctcctgccaggacggccgccagctcgagtggggcctcgagcgcacccgcctctcctccaactccaccaagaaggagtcctgcggctacgacacctgctacgactgggagaagtgctccgcctccacctccaagtgcgtctgcctcctccccccccagtgcttcaagggcggcaaccagctctactgcgtcaagatgggctcctccacctccgagaagaccctcaacatctgcgaggtcggcaccatccgctgcgccaaccgcaagatggagatcctccaccccggcaagtgcctcgcctga

SEQ ID NO: 8056 - RNA, 2805 nt, synthetic construct
  misc_feature 1..2805: note = derived and/or modified sequence opt3 fromcomplement_system_component_C6__Homo_sapiens__AAA51860
  source 1..2805: mol_type = other RNA
atggccagaaggagcgtgctgtacttcatcctccttaacgctctgattaataagggccaggcatgcttttgtgaccactatgcctggacccaatggacatcctgctctaaaacttgtaactcagggacgcagagtcggcatcgccagatagtcgttgataagtactatcaggagaatttctgcgaacaaatctgtagcaaacaggagacccgagaatgcaactggcagcgttgtcccattaattgcttgttaggagactttggtccttggtccgattgtgacccatgcatcgagaagcagtctaaagtgagatcggtactgaggccgtcacaattcggcgggcagccctgtacagcgcctctagtggcttttcagccatgcattcccagcaagctctgcaagatcgaagaggccgattgtaaaaacaagttccggtgcgacagtggacgctgtatagcaagaaaactggagtgcaatggcgaaaacgattgtggtgacaattccgatgagagggactgcgggcggactaaggccgtctgtacccgcaaatacaaccctatcccatctgtgcagcttatgggaaatggctttcacttcctggctggcgaaccccgaggggaggttttggataacagctttacaggaggtatttgcaagaccgtgaagtcctcaagaacaagtaatccttatagggtcccagcaaacctcgagaatgtgggcttcgaagtacaaacagccgaggacgatctgaaaaccgacttttacaaggacctgacgagcctcgggcataacgaaaaccagcagggatctttctcctcacaaggcggtagcagtttttctgttccgatcttctattccagcaaacggtcggagaatattaaccacaattctgctttcaagcaggccatccaggcgtcccataaaaaggattcaagttttatacgtattcacaaagtgatgaaggtcttaaacttcactaccaaggcaaaagacctgcaccttagcgatgtgtttttgaaggccctgaatcatctacccctcgaatacaactccgctctgtactctcgcatcttcgacgattttgggacacactatttcactagcggatcacttggcggcgtgtacgacctgttgtatcagtttagttccgaggagctcaaaaatagcgggctgaccgaagaggaagccaagcattgtgtcagaattgagactaaaaagagggttttattcgcaaagaaaaccaaggtggaacaccggtgcacgactaacaaactgtctgagaagcacgagggatcatttatccaaggtgctgagaaaagtatcagcctcattcgaggcgggcgctccgaatacggagccgcgcttgcctgggaaaaggggtcttcgggtctggaggaaaagacattcagcgagtggttggagtccgtaaaagaaaatcctgcagtgatagattttgagctagctccaatcgtcgacctggtgagaaacattccctgtgccgttaccaagaggaataacctccggaaagctctgcaggaatatgccgcaaagttcgatccttgccagtgcgccccatgtcccaataacgggcgcccgactctttcaggcacagagtgcctgtgtgtgtgccagagtggaacctacggcgagaattgtgaaaaacaatctcctgactataagagcaacgctgtcgatgggcagtggggatgctggtcctcatggagcacgtgtgacgcgacctacaagagatctaggacacgtgagtgcaacaatcccgcaccacagcggggtggcaaacgatgtgaaggggagaagagacaggaagaggactgcactttttccatcatggagaacaatggacaaccttgtataaacgatgacgaagagatgaaagaagtggatttgcccgagattgaagccgacagtggctgcccacagcccgtacctccagagaatggtttcatcaggaacgagaagcagctctacctggttggggaagatgtggagatcagctgcttaaccggcttcgaaacagtcggatatcagtactttcgctgtctgccggacggcacttggcggcaaggggatgtggagtgccagagaaccgaatgtattaaacccgtcgtgcaggaggttctaacaatcacccctttccaaaggctctatcgcattggagagtctatagaactgacttgcccaaagggttttgtggtagctggcccctcccgatacacgtgtcagggcaattcatggacacctccaatcagtaacagccttacctgcgagaaagacactttgaccaagctgaagggacattgtcagctcggccagaaacaatcgggttccgaatgcatttgtatgtctcccgaggaggattgcagccaccattcagaagacctgtgtgtcttcgatacagacagtaatgattattttacctccccggcctgcaagttccttgcagagaaatgcctgaacaatcagcagttgcactttctccatatcgggtcttgtcaggacggccggcaactggaatggggattagagcgtactagactgagctccaactcaacaaagaaagaaagctgcggctacgacacgtgttatgattgggagaagtgcagtgcctctacctccaagtgtgtgtgcctactccctccacagtgtttcaaagggggaaatcagctgtactgcgttaagatgggcagctcgacttcagagaaaacacttaacatctgtgaagtgggtaccattaggtgcgctaatcgcaagatggagatattgcaccccgggaaatgtctggcctga

SEQ ID NO: 8057 - RNA, 2805 nt, synthetic construct
  misc_feature 1..2805: note = derived and/or modified sequence opt4 fromcomplement_system_component_C6__Homo_sapiens__AAA51860
  source 1..2805: mol_type = other RNA
atggccagaagaagcgtgctgtacttcatcctgctgaacgccctgatcaacaagggccaggcctgcttctgcgaccactacgcctggacccagtggaccagctgcagcaagacctgcaacagcggcacccagagcagacacagacagatcgtggtggacaagtactaccaggagaacttctgcgagcagatctgcagcaagcaggagaccagagagtgcaactggcagagatgccccatcaactgcctgctgggcgacttcggcccctggagcgactgcgacccctgcatcgagaagcagagcaaggtgagaagcgtgctgagacccagccagttcggcggccagccctgcaccgcccccctggtggccttccagccctgcatccccagcaagctgtgcaagatcgaggaggccgactgcaagaacaagttcagatgcgacagcggcagatgcatcgccagaaagctggagtgcaacggcgagaacgactgcggcgacaacagcgacgagagagactgcggcagaaccaaggccgtgtgcaccagaaagtacaaccccatccccagcgtgcagctgatgggcaacggcttccacttcctggccggcgagcccagaggcgaggtgctggacaacagcttcaccggcggcatctgcaagaccgtgaagagcagcagaaccagcaacccctacagagtgcccgccaacctggagaacgtgggcttcgaggtgcagaccgccgaggacgacctgaagaccgacttctacaaggacctgaccagcctgggccacaacgagaaccagcagggcagcttcagcagccagggcggcagcagcttcagcgtgcccatcttctacagcagcaagagaagcgagaacatcaaccacaacagcgccttcaagcaggccatccaggccagccacaagaaggacagcagcttcatcagaatccacaaggtgatgaaggtgctgaacttcaccaccaaggccaaggacctgcacctgagcgacgtgttcctgaaggccctgaaccacctgcccctggagtacaacagcgccctgtacagcagaatcttcgacgacttcggcacccactacttcaccagcggcagcctgggcggcgtgtacgacctgctgtaccagttcagcagcgaggagctgaagaacagcggcctgaccgaggaggaggccaagcactgcgtgagaatcgagaccaagaagagagtgctgttcgccaagaagaccaaggtggagcacagatgcaccaccaacaagctgagcgagaagcacgagggcagcttcatccagggcgccgagaagagcatcagcctgatcagaggcggcagaagcgagtacggcgccgccctggcctgggagaagggcagcagcggcctggaggagaagaccttcagcgagtggctggagagcgtgaaggagaaccccgccgtgatcgacttcgagctggcccccatcgtggacctggtgagaaacatcccctgcgccgtgaccaagagaaacaacctgagaaaggccctgcaggagtacgccgccaagttcgacccctgccagtgcgccccctgccccaacaacggcagacccaccctgagcggcaccgagtgcctgtgcgtgtgccagagcggcacctacggcgagaactgcgagaagcagagccccgactacaagagcaacgccgtggacggccagtggggctgctggagcagctggagcacctgcgacgccacctacaagagaagcagaaccagagagtgcaacaaccccgccccccagagaggcggcaagagatgcgagggcgagaagagacaggaggaggactgcaccttcagcatcatggagaacaacggccagccctgcatcaacgacgacgaggagatgaaggaggtggacctgcccgagatcgaggccgacagcggctgcccccagcccgtgccccccgagaacggcttcatcagaaacgagaagcagctgtacctggtgggcgaggacgtggagatcagctgcctgaccggcttcgagaccgtgggctaccagtacttcagatgcctgcccgacggcacctggagacagggcgacgtggagtgccagagaaccgagtgcatcaagcccgtggtgcaggaggtgctgaccatcacccccttccagagactgtacagaatcggcgagagcatcgagctgacctgccccaagggcttcgtggtggccggccccagcagatacacctgccagggcaacagctggaccccccccatcagcaacagcctgacctgcgagaaggacaccctgaccaagctgaagggccactgccagctgggccagaagcagagcggcagcgagtgcatctgcatgagccccgaggaggactgcagccaccacagcgaggacctgtgcgtgttcgacaccgacagcaacgactacttcaccagccccgcctgcaagttcctggccgagaagtgcctgaacaaccagcagctgcacttcctgcacatcggcagctgccaggacggcagacagctggagtggggcctggagagaaccagactgagcagcaacagcaccaagaaggagagctgcggctacgacacctgctacgactgggagaagtgcagcgccagcaccagcaagtgcgtgtgcctgctgcccccccagtgcttcaagggcggcaaccagctgtactgcgtgaagatgggcagcagcaccagcgagaagaccctgaacatctgcgaggtgggcaccatcagatgcgccaacagaaagatggagatcctgcaccccggcaagtgcctggcctga

SEQ ID NO: 8058 - RNA, 2805 nt, synthetic construct
  misc_feature 1..2805: note = derived and/or modified sequence opt5 fromcomplement_system_component_C6__Homo_sapiens__AAA51860
  source 1..2805: mol_type = other RNA
atggccagacggagcgtgctgtacttcatcctcctgaacgctcttattaataagggccaggcctgcttttgtgaccactatgcgtggacccaatggacatcctgctctaaaacgtgtaacagcgggacccagtcccgccatagacagatcgtcgttgataagtactatcaggagaatttctgcgaacaaatttgttctaaacaggagacacgggaatgcaactggcagcgctgtcccatcaattgcctgctcggagactttggcccttggagcgattgtgacccgtgcattgagaagcagtccaaagtgagatctgtgctgcggcccagccaattcgggggacagccttgtaccgctccccttgtcgcctttcagccttgcatcccctccaagctgtgcaagatcgaagaggccgattgtaaaaacaagttccgctgcgacagcggcagatgtattgctcggaaactcgagtgcaatggggaaaacgattgtggagacaattctgatgagcgcgactgcggcagaacaaaggccgtgtgtacccggaaatacaaccctatcccgtccgttcagctgatgggcaatgggtttcacttcctggctggagaaccccgcggcgaggtgctcgataacagctttacagggggaatttgcaagaccgtcaagtcttccagaacgagcaatccttatcgggtgcccgccaacctggagaatgttggcttcgaagtgcaaaccgcggaggacgatcttaaaacagacttttacaaggacctgacctctctcgggcataacgaaaaccagcagggatccttcagctcccaaggcggctctagcttttccgtccctatcttctatagctctaaacgctccgagaatattaaccacaatagcgccttcaagcaggctatccaggcctctcataaaaaggatagctcctttattagaatccacaaagtgatgaaggtgctgaacttcacaaccaaggctaaagaccttcacctgtctgatgtctttctcaaggccctgaatcatctgcccctcgaatacaacagcgcgctgtactcccggatcttcgacgattttgggacgcactatttcacaagcggatctcttggcggggtttacgacctgctctatcagttttccagcgaggagctgaaaaattctggacttaccgaagaggaagccaagcattgtgtgagaattgagacaaagaagcgcgtgctgttcgctaagaaaaccaaggtcgaacaccggtgcaccacaaacaaactctccgagaagcacgagggcagctttatccaaggggccgaaaaatccatttctctgatcagaggaggccgcagcgagtacggcgctgccctggcctgggaaaaggggtcctctggactcgaggaaaagacgttcagcgagtggctggagtccgtgaaagaaaatccggctgttattgattttgagcttgcgcctatcgtggacctggtccggaacatcccctgtgccgtgaccaagagaaataacctccgcaaagctctgcaggaatatgccgccaagttcgatccttgccagtgcgctccctgtcccaataacggccggcctacacttagcgggaccgagtgcctgtgtgtttgccagtctggaacatacggcgagaattgtgaaaaacaatccccggactataagagcaacgccgtggatgggcagtggggctgctggtcttcctggagcacctgtgacgcgacgtacaagagatctcgcacacgggagtgcaacaatcccgctcctcagagaggaggcaaacgctgtgaaggggagaagcggcaggaagaggactgcacctttagcattatggagaacaatggacaaccctgtatcaacgatgacgaagagatgaaagaagtcgatctccctgagattgaagccgactccggctgcccccagccggtgcctcccgagaatgggttcatcagaaacgagaagcagctgtacctggtcggagaagatgtggagattagctgcctcaccggcttcgaaacagttgggtatcagtactttcggtgtctgcctgacggcacctggcgccaaggagatgtggagtgccagagaacagaatgtatcaaacccgtcgtgcaggaggttcttacgatcacccctttccaacggctgtatagaattggcgagtctatcgaactcacatgccccaaggggtttgtggtcgccggaccgtcccgctacacctgtcagggcaatagctggacacctcccatttccaactctctgacctgcgagaaagacacgctgaccaaacttaaggggcattgtcagctcggacagaaacaaagcggctccgaatgcatctgtatgtctcccgaggaggattgcagccaccattccgaagacctgtgtgtgttcgatacagactctaatgattattttaccagccctgcttgcaagttcctggccgagaaatgcctcaacaatcagcagctgcactttcttcatattgggtcctgtcaggacggccggcaactggaatggggactcgagagaacacgcctgagctctaactccaccaagaaagaaagctgcggctacgacacgtgttatgattgggagaagtgctctgcttccacaagcaagtgtgtgtgcctgcttccgccccagtgtttcaaagggggaaatcagctctactgcgttaagatggggtcttccaccagcgagaaaacactgaacatctgtgaagtcggcaccattagatgcgccaatcggaagatggagatcctgcaccctggaaaatgtctcgcgtga

SEQ ID NO: 8059 - protein, 843 aa, synthetic construct
  REGION 1..843: note = complement_system_component_C7__Homo_sapiens__P10643
MKVISLFILVGFIGEFQSFSSASSPVNCQWDFYAPWSECNGCTKTQTRRRSVAVYGQYGGQPCVGNAFETQSCEPTRGCPTEEGCGERFRCFSGQCISKSLVCNGDSDCDEDSADEDRCEDSERRPSCDIDKPPPNIELTGNGYNELTGQFRNRVINTKSFGGQCRKVFSGDGKDFYRLSGNVLSYTFQVKINNDFNYEFYNSTWSYVKHTSTEHTSSSRKRSFFRSSSSSSRSYTSHTNEIHKGKSYQLLVVENTVEVAQFINNNPEFLQLAEPFWKELSHLPSLYDYSAYRRLIDQYGTHYLQSGSLGGEYRVLFYVDSEKLKQNDFNSVEEKKCKSSGWHFVVKFSSHGCKELENALKAASGTQNNVLRGEPFIRGGGAGFISGLSYLELDNPAGNKRRYSAWAESVTNLPQVIKQKLTPLYELVKEVPCASVKKLYLKWALEEYLDEFDPCHCRPCQNGGLATVEGTHCLCHCKPYTFGAACEQGVLVGNQAGGVDGGWSCWSSWSPCVQGKKTRSRECNNPPPSGGGRSCVGETTESTQCEDEELEHLRLLEPHCFPLSLVPTEFCPSPPALKDGFVQDEGTMFPVGKNVVYTCNEGYSLIGNPVARCGEDLRWLVGEMHCQKIACVLPVLMDGIQSHPQKPFYTVGEKVTVSCSGGMSLEGPSAFLCGSSLKWSPEMKNARCVQKENPLTQAVPKCQRWEKLQNSRCVCKMPYECGPSLDVCAQDERSKRILPLTVCKMHVLHCQGRNYTLTGRDSCTLPASAEKACGACPLWGKCDAESSKCVCREASECEEEGFSICVEVNGKEQTMSECEAGALRCRGQSISVTSIRPCAAETQ

SEQ ID NO: 8060 - RNA, 2532 nt, synthetic construct
  misc_feature 1..2532: note complement_system_component_C7__Homo_sapiens__AAH63851
  source 1..2532: mol_type = other RNA
atgaaggtgataagcttattcattttggtgggatttataggagagttccaaagtttttcaagtgcctcctctccagtcaactgccagtgggacttctatgccccttggtcagaatgcaatggctgtaccaagactcagactcgcaggcggtcagttgctgtgtatgggcagtatggaggccagccttgtgttggaaatgcttttgaaacacagtcctgtgaacctacaagaggatgtccaacagaggagggatgtggagagcgtttcaggtgcttttcaggtcagtgcatcagcaaatcattggtttgcaatggggattctgactgtgatgaagacagtgctgatgaagacagatgtgaggactcagaaaggagaccttcctgtgatatcgataaacctcctcctaacatagaacttactggaaatggttacaatgaactcactggccagtttaggaacagagtcatcaataccaaaagttttggtggtcaatgtagaaaggtgtttagtggggatggaaaagatttctacaggctgagtggaaatgtcctgtcctatacattccaggtgaaaataaataatgattttaattatgaattttacaatagtacttggtcttatgtaaaacatacgtcgacagaacacacatcatctagtcggaagcgctccttttttagatcttcatcatcttcttcacgcagttatacttcacataccaatgaaatccataaaggaaagagttaccaactgctggttgttgagaacactgttgaagtggctcagttcattaataacaatccagaatttttacaacttgctgagccattctggaaggagctttcccacctcccctctctgtatgactacagtgcctaccgaagattaatcgaccagtacgggacacattatctgcaatctgggtcgttaggaggagaatacagagttctattttatgtggactcagaaaaattaaaacaaaatgattttaattcagtcgaagaaaagaaatgtaaatcctcaggttggcattttgtcgttaaattttcaagtcatggatgcaaggaactggaaaacgctttaaaagctgcttcaggaacccagaacaatgtattgcgaggagaaccgttcatcagagggggaggtgcaggcttcatatctggccttagttacctagagctggacaatcctgctggaaacaaaaggcgatattctgcctgggcagaatctgtgactaatcttcctcaagtcataaaacaaaagctgacacctttatatgagctggtaaaggaagtaccttgtgcctctgtgaaaaaactatacctgaaatgggctcttgaagagtatctggatgaatttgacccctgtcattgccggccttgtcaaaatggtggtttggctactgttgaggggacccattgtctgtgccattgcaaaccgtacacatttggtgcggcgtgtgagcaaggagtcctcgtagggaatcaagcaggaggggttgatggaggttggagttgctggtcctcttggagcccctgtgtccaagggaagaaaacaagaagccgtgaatgcaataacccacctcccagtgggggtgggagatcctgcgttggagaaacgacagaaagcacacaatgcgaagatgaggagctggagcacttgaggttgcttgaaccacattgctttcctttgtctttggttccaacagaattctgtccatcacctcctgccttgaaagatggatttgttcaagatgaaggtacaatgtttcctgtggggaaaaatgtagtgtacacttgcaatgaaggatactctcttattggaaacccagtggccagatgtggagaagatttacggtggcttgttggggaaatgcattgtcagaaaattgcctgtgttctacctgtactgatggatggcatacagagtcacccccaaaaacctttctacacagttggtgagaaggtgactgtttcctgttcaggtggcatgtccttagaaggtccttcagcatttctctgtggctccagccttaagtggagtcctgagatgaagaatgcccgctgtgtacaaaaagaaaatccgttaacacaggcagtgcctaaatgtcagcgctgggagaaactgcagaattcaagatgtgtttgtaaaatgccctacgaatgtggaccttccttggatgtatgtgctcaagatgagagaagcaaaaggatactgcctctgacagtttgcaagatgcatgttctccactgtcagggtagaaattacacccttactggtagggacagctgtactctgcctgcctcagctgagaaagcttgtggtgcctgcccactgtggggaaaatgtgatgctgagagcagcaaatgtgtctgccgagaagcatcggagtgcgaggaagaagggtttagcatttgtgtggaagtgaacggcaaggagcagacgatgtctgagtgtgaggcgggcgctctgagatgcagagggcagagcatctctgtcaccagcataaggccttgtgctgcggaaacccagtag

SEQ ID NO: 8061 - RNA, 2532 nt, synthetic construct
  misc_feature 1..2532: note = derived and/or modified sequence opt1 fromcomplement_system_component_C7__Homo_sapiens__AAH63851
  source 1..2532: mol_type = other RNA
atgaaggtgatcagcctgttcatcctcgtcggcttcatcggggagttccagtccttcagctccgccagctcccccgtgaactgccagtgggacttctacgccccgtggagcgagtgcaacggctgcaccaagacccagacgcgccggcgctccgtggcggtctacgggcagtacggcgggcagccctgcgtgggcaacgccttcgagacccagagctgcgagcccacccggggctgccccaccgaggaggggtgcggcgagcgcttccggtgcttctccgggcagtgcatcagcaagtccctggtgtgcaacggcgacagcgactgcgacgaggactccgccgacgaggaccgctgcgaggacagcgagcggcgcccgtcctgcgacatcgacaagcccccgcccaacatcgagctgacggggaacggctacaacgagctcaccggccagttccggaaccgcgtcatcaacaccaagagcttcgggggccagtgccggaaggtgttctccggggacggcaaggacttctaccgcctgagcggcaacgtgctgtcctacaccttccaggtcaagatcaacaacgacttcaactacgagttctacaacagcacgtggagctacgtgaagcacacctccaccgagcacaccagctccagccggaagcgctccttcttccggagctccagctccagctcccgcagctacacgtcccacaccaacgagatccacaagggcaagagctaccagctcctggtggtcgagaacaccgtggaggtggcccagttcatcaacaacaaccccgagttcctgcagctcgccgagcccttctggaaggagctgtcccacctccccagcctgtacgactactccgcgtaccggcgcctgatcgaccagtacgggacccactacctgcagagcgggtccctcggcggggagtaccgggtcctgttctacgtggacagcgagaagctgaagcagaacgacttcaacagcgtggaggagaagaagtgcaagtccagcggctggcacttcgtcgtgaagttctccagccacggctgcaaggagctcgagaacgccctgaaggccgcctccgggacgcagaacaacgtgctgcgcggcgagcccttcatccgcgggggcggggcgggcttcatcagcggcctctcctacctggagctggacaacccggccgggaacaagcggcgctacagcgcctgggccgagtccgtcaccaacctcccccaggtgatcaagcagaagctgacgcccctgtacgagctcgtgaaggaggtcccctgcgccagcgtgaagaagctgtacctgaagtgggcgctcgaggagtacctggacgagttcgacccgtgccactgccggccctgccagaacggcgggctggccaccgtcgagggcacccactgcctctgccactgcaagccctacaccttcggggccgcctgcgagcagggcgtgctggtgggcaaccaggccgggggcgtcgacgggggctggtcctgctggagctcctggagcccctgcgtgcagggcaagaagacccgctcccgggagtgcaacaacccgccgcccagcgggggcgggcgctcctgcgtgggcgagaccacggagagcacccagtgcgaggacgaggagctggagcacctccggctgctggagccccactgcttccccctcagcctggtccccaccgagttctgcccctccccgcccgcgctgaaggacgggttcgtgcaggacgagggcaccatgttccccgtgggcaagaacgtcgtgtacacgtgcaacgaggggtacagcctcatcggcaaccccgtggcccgctgcggggaggacctgcggtggctggtcggcgagatgcactgccagaagatcgcctgcgtgctcccggtgctgatggacgggatccagtcccacccccagaagcccttctacaccgtcggcgagaaggtgaccgtgagctgctccggcgggatgagcctggagggcccctccgccttcctctgcgggagctccctgaagtggagcccggagatgaagaacgcccgctgcgtccagaaggagaaccccctgacccaggcggtgcccaagtgccagcggtgggagaagctgcagaactcccgctgcgtgtgcaagatgccctacgagtgcggcccgagcctcgacgtctgcgcccaggacgagcggtccaagcgcatcctgcccctgacggtgtgcaagatgcacgtgctccactgccaggggcggaactacaccctgaccggccgcgacagctgcaccctgcccgcctccgccgagaaggcctgcggcgcgtgccccctctgggggaagtgcgacgccgagagctccaagtgcgtctgccgggaggccagcgagtgcgaggaggagggcttctccatctgcgtggaggtgaacgggaaggagcagacgatgagcgagtgcgaggccggcgcgctgcgctgccgggggcagagcatctccgtcaccagcatccgcccgtgcgccgccgagacccagtga

SEQ ID NO: 8062 - RNA, 2532 nt, synthetic construct
  misc_feature 1..2532: note = derived and/or modified sequence opt2 fromcomplement_system_component_C7__Homo_sapiens__AAH63851
  source 1..2532: mol_type = other RNA
atgaaggtcatctccctcttcatcctcgtcggcttcatcggcgagttccagtccttctcctccgcctcctcccccgtcaactgccagtgggacttctacgccccctggtccgagtgcaacggctgcaccaagacccagacccgccgccgctccgtcgccgtctacggccagtacggcggccagccctgcgtcggcaacgccttcgagacccagtcctgcgagcccacccgcggctgccccaccgaggagggctgcggcgagcgcttccgctgcttctccggccagtgcatctccaagtccctcgtctgcaacggcgactccgactgcgacgaggactccgccgacgaggaccgctgcgaggactccgagcgccgcccctcctgcgacatcgacaagcccccccccaacatcgagctcaccggcaacggctacaacgagctcaccggccagttccgcaaccgcgtcatcaacaccaagtccttcggcggccagtgccgcaaggtcttctccggcgacggcaaggacttctaccgcctctccggcaacgtcctctcctacaccttccaggtcaagatcaacaacgacttcaactacgagttctacaactccacctggtcctacgtcaagcacacctccaccgagcacacctcctcctcccgcaagcgctccttcttccgctcctcctcctcctcctcccgctcctacacctcccacaccaacgagatccacaagggcaagtcctaccagctcctcgtcgtcgagaacaccgtcgaggtcgcccagttcatcaacaacaaccccgagttcctccagctcgccgagcccttctggaaggagctctcccacctcccctccctctacgactactccgcctaccgccgcctcatcgaccagtacggcacccactacctccagtccggctccctcggcggcgagtaccgcgtcctcttctacgtcgactccgagaagctcaagcagaacgacttcaactccgtcgaggagaagaagtgcaagtcctccggctggcacttcgtcgtcaagttctcctcccacggctgcaaggagctcgagaacgccctcaaggccgcctccggcacccagaacaacgtcctccgcggcgagcccttcatccgcggcggcggcgccggcttcatctccggcctctcctacctcgagctcgacaaccccgccggcaacaagcgccgctactccgcctgggccgagtccgtcaccaacctcccccaggtcatcaagcagaagctcacccccctctacgagctcgtcaaggaggtcccctgcgcctccgtcaagaagctctacctcaagtgggccctcgaggagtacctcgacgagttcgacccctgccactgccgcccctgccagaacggcggcctcgccaccgtcgagggcacccactgcctctgccactgcaagccctacaccttcggcgccgcctgcgagcagggcgtcctcgtcggcaaccaggccggcggcgtcgacggcggctggtcctgctggtcctcctggtccccctgcgtccagggcaagaagacccgctcccgcgagtgcaacaacccccccccctccggcggcggccgctcctgcgtcggcgagaccaccgagtccacccagtgcgaggacgaggagctcgagcacctccgcctcctcgagccccactgcttccccctctccctcgtccccaccgagttctgcccctccccccccgccctcaaggacggcttcgtccaggacgagggcaccatgttccccgtcggcaagaacgtcgtctacacctgcaacgagggctactccctcatcggcaaccccgtcgcccgctgcggcgaggacctccgctggctcgtcggcgagatgcactgccagaagatcgcctgcgtcctccccgtcctcatggacggcatccagtcccacccccagaagcccttctacaccgtcggcgagaaggtcaccgtctcctgctccggcggcatgtccctcgagggcccctccgccttcctctgcggctcctccctcaagtggtcccccgagatgaagaacgcccgctgcgtccagaaggagaaccccctcacccaggccgtccccaagtgccagcgctgggagaagctccagaactcccgctgcgtctgcaagatgccctacgagtgcggcccctccctcgacgtctgcgcccaggacgagcgctccaagcgcatcctccccctcaccgtctgcaagatgcacgtcctccactgccagggccgcaactacaccctcaccggccgcgactcctgcaccctccccgcctccgccgagaaggcctgcggcgcctgccccctctggggcaagtgcgacgccgagtcctccaagtgcgtctgccgcgaggcctccgagtgcgaggaggagggcttctccatctgcgtcgaggtcaacggcaaggagcagaccatgtccgagtgcgaggccggcgccctccgctgccgcggccagtccatctccgtcacctccatccgcccctgcgccgccgagacccagtga

SEQ ID NO: 8063 - RNA, 2532 nt, synthetic construct
  misc_feature 1..2532: note = derived and/or modified sequence opt3 fromcomplement_system_component_C7__Homo_sapiens__AAH63851
  source 1..2532: mol_type = other RNA
atgaaggtgatcagcctgttcattctcgtcggctttataggggagttccagtccttttcttcagccagtagccccgttaactgccaatgggacttctacgctccttggtccgaatgtaatggatgcaccaaaacacagactagaaggcggtctgtggcagtatatggtcagtacggcgggcagccatgtgtgggaaacgcctttgagacgcaatcgtgcgaaccgacccgcggctgtcccacagaggaaggttgcggggagcgattccgttgtttttcaggacagtgcatcagcaagagtcttgtctgtaatggcgattccgactgcgatgaggactctgcggatgaagacagatgtgaggatagcgaaaggcggccttcctgcgacattgataaaccaccccctaacatcgagctgactggcaatgggtataacgagttgaccggacagttccgcaatagagtgattaacacaaagtcatttggtggccagtgcaggaaagttttcagtggggacggaaaggatttttaccggttaagcggcaatgtgctgtcttataccttccaagtcaagatcaacaatgactttaactacgagttctataattccacttggtcatacgtgaaacacacaagcaccgagcatacgagttcttcccgcaagaggagcttctttagatcgtcttcctcaagtagcaggtcctacacttctcacaccaacgaaatacataaaggtaagagctatcagctactcgtagttgagaatacagtggaagtcgctcagttcatcaacaacaatccagagtttctgcagcttgccgagcccttctggaaagaactgtcacacttgcctagtctctacgattattccgcataccggcgtctgattgaccaatatgggactcattacctgcagagcggatctctcggcggcgagtatcgcgtgttattttacgtggactcagaaaagctgaagcagaacgatttcaatagtgtcgaggagaaaaagtgtaaaagctccgggtggcactttgttgtgaagttctcttcgcacggatgcaaagaacttgagaacgccttgaaggctgcaagcggtacccaaaataacgtactgagaggcgaaccatttatccgagggggaggcgccggtttcatttccgggctatcatacctcgagctggacaatccggctggcaacaaacggcgatatagtgcctgggcggaatctgtgacaaatcttccccaggtcatcaagcagaagctgacccctttgtacgagctcgtgaaagaagttccatgtgcaagcgtgaagaaactgtatttaaagtgggccctggaggagtacctcgatgaatttgacccctgccattgtcgcccttgccagaacggaggccttgctacggtcgaggggactcactgtctgtgccattgtaaaccatatacattcggagccgcatgcgaacaaggtgtgttggtaggcaatcaggctgggggagttgatggcggttggtcctgttggtcaagctggtctccctgcgtgcaggggaagaagaccagatccagggagtgcaacaatccgcctcccagtggcggaggccggagctgtgtcggggagactacagaatctacccagtgcgaggacgaagaactagaacatctgcgcctcctggagccacactgttttcctctttccctggtgcccacggagttctgcccatcaccccctgccttgaaagatggattcgtccaagacgaaggtaccatgtttccagtgggcaagaacgttgtgtacacatgtaatgaggggtatagtctcataggaaacccggtagcgagatgcggcgaagatctgaggtggttagtcggtgagatgcactgtcagaaaattgcctgcgtgctgcccgttctaatggacgggatccagagccaccctcagaagccattctacactgtgggcgaaaaagtcaccgtgtcgtgttccggaggcatgtctctcgaggggcccagcgcatttctgtgcggatcaagtcttaagtggtcccctgagatgaagaacgctcgttgtgtacaaaaagaaaatccattgacacaggccgtgcccaagtgccagcggtgggagaaactgcagaactctcgatgcgtttgtaagatgccgtacgaatgcggccctagcctcgatgtctgtgctcaagacgagagatccaaaaggattctgccacttactgtgtgcaagatgcatgtgctgcactgtcagggtcgcaattataccttgacagggcgggactcatgcaccctccccgccagcgcagaaaaggcctgtggagcttgccctctgtggggcaaatgtgatgcggagagttctaagtgcgtctgtagagaggcatccgaatgcgaggaagagggtttcagcatctgcgttgaggtgaacggcaaagaacagactatgtcggagtgtgaagccggggctttaaggtgccgcggacaatcaatctctgtgacgagtattcgaccctgtgccgcagagacacagtga

SEQ ID NO: 8064 - RNA, 2532 nt, synthetic construct
  misc_feature 1..2532: note = derived and/or modified sequence opt4 fromcomplement_system_component_C7__Homo_sapiens__AAH63851
  source 1..2532: mol_type = other RNA
atgaaggtgatcagcctgttcatcctggtgggcttcatcggcgagttccagagcttcagcagcgccagcagccccgtgaactgccagtgggacttctacgccccctggagcgagtgcaacggctgcaccaagacccagaccagaagaagaagcgtggccgtgtacggccagtacggcggccagccctgcgtgggcaacgccttcgagacccagagctgcgagcccaccagaggctgccccaccgaggagggctgcggcgagagattcagatgcttcagcggccagtgcatcagcaagagcctggtgtgcaacggcgacagcgactgcgacgaggacagcgccgacgaggacagatgcgaggacagcgagagaagacccagctgcgacatcgacaagcccccccccaacatcgagctgaccggcaacggctacaacgagctgaccggccagttcagaaacagagtgatcaacaccaagagcttcggcggccagtgcagaaaggtgttcagcggcgacggcaaggacttctacagactgagcggcaacgtgctgagctacaccttccaggtgaagatcaacaacgacttcaactacgagttctacaacagcacctggagctacgtgaagcacaccagcaccgagcacaccagcagcagcagaaagagaagcttcttcagaagcagcagcagcagcagcagaagctacaccagccacaccaacgagatccacaagggcaagagctaccagctgctggtggtggagaacaccgtggaggtggcccagttcatcaacaacaaccccgagttcctgcagctggccgagcccttctggaaggagctgagccacctgcccagcctgtacgactacagcgcctacagaagactgatcgaccagtacggcacccactacctgcagagcggcagcctgggcggcgagtacagagtgctgttctacgtggacagcgagaagctgaagcagaacgacttcaacagcgtggaggagaagaagtgcaagagcagcggctggcacttcgtggtgaagttcagcagccacggctgcaaggagctggagaacgccctgaaggccgccagcggcacccagaacaacgtgctgagaggcgagcccttcatcagaggcggcggcgccggcttcatcagcggcctgagctacctggagctggacaaccccgccggcaacaagagaagatacagcgcctgggccgagagcgtgaccaacctgccccaggtgatcaagcagaagctgacccccctgtacgagctggtgaaggaggtgccctgcgccagcgtgaagaagctgtacctgaagtgggccctggaggagtacctggacgagttcgacccctgccactgcagaccctgccagaacggcggcctggccaccgtggagggcacccactgcctgtgccactgcaagccctacaccttcggcgccgcctgcgagcagggcgtgctggtgggcaaccaggccggcggcgtggacggcggctggagctgctggagcagctggagcccctgcgtgcagggcaagaagaccagaagcagagagtgcaacaaccccccccccagcggcggcggcagaagctgcgtgggcgagaccaccgagagcacccagtgcgaggacgaggagctggagcacctgagactgctggagccccactgcttccccctgagcctggtgcccaccgagttctgccccagcccccccgccctgaaggacggcttcgtgcaggacgagggcaccatgttccccgtgggcaagaacgtggtgtacacctgcaacgagggctacagcctgatcggcaaccccgtggccagatgcggcgaggacctgagatggctggtgggcgagatgcactgccagaagatcgcctgcgtgctgcccgtgctgatggacggcatccagagccacccccagaagcccttctacaccgtgggcgagaaggtgaccgtgagctgcagcggcggcatgagcctggagggccccagcgccttcctgtgcggcagcagcctgaagtggagccccgagatgaagaacgccagatgcgtgcagaaggagaaccccctgacccaggccgtgcccaagtgccagagatgggagaagctgcagaacagcagatgcgtgtgcaagatgccctacgagtgcggccccagcctggacgtgtgcgcccaggacgagagaagcaagagaatcctgcccctgaccgtgtgcaagatgcacgtgctgcactgccagggcagaaactacaccctgaccggcagagacagctgcaccctgcccgccagcgccgagaaggcctgcggcgcctgccccctgtggggcaagtgcgacgccgagagcagcaagtgcgtgtgcagagaggccagcgagtgcgaggaggagggcttcagcatctgcgtggaggtgaacggcaaggagcagaccatgagcgagtgcgaggccggcgccctgagatgcagaggccagagcatcagcgtgaccagcatcagaccctgcgccgccgagacccagtga

SEQ ID NO: 8065 - RNA, 2532 nt, synthetic construct
  misc_feature 1..2532: note = derived and/or modified sequence opt5 fromcomplement_system_component_C7__Homo_sapiens__AAH63851
  source 1..2532: mol_type = other RNA
atgaaggtgatcagcctgttcattctcgtcggctttatcggggagttccagtccttttctagcgcctcctctcccgttaactgccaatgggacttctacgctccttggagcgaatgtaatggatgcaccaaaacacagacgagacggcgctccgtggccgtgtatggccagtacgggggacagccgtgtgtcggcaacgcgtttgagacccaatcttgcgaacccacaagagggtgtcctaccgaggaaggatgcggcgagcggttccgctgttttagcggccagtgcatttccaagagcctggtgtgtaatggggattctgactgcgatgaggactccgctgatgaagacagatgtgaggatagcgaacggcgcccctcttgcgacatcgataaacctccccctaacattgagcttacaggaaatggctataacgagctgaccgggcagttcagaaatcgggttatcaacacaaagtcctttggaggccagtgccgcaaagtgttcagcggggacggaaaggatttttacagactctctggcaatgtcctgtcctataccttccaagtgaagatcaacaatgactttaactacgagttctataatagcacgtggtcctacgttaaacacacctctacagagcataccagctccagccggaagcgctctttctttagatccagctctagctcctctcggagctacacatcccacaccaacgaaattcataaaggcaagagctatcagcttctggtggtcgagaatacggtggaagtggcccagttcatcaacaacaatccggagtttctccagctggccgagcccttctggaaagaactgtctcacctcccttccctgtacgattatagcgcttaccgcagacttattgaccaatatgggacacattacctgcagtctggatccctcggcggggagtatcgggtcctgttttacgttgacagcgaaaaacttaagcagaacgatttcaattccgtggaggaaaagaagtgtaaatctagcggatggcactttgtggtcaagttctcctctcacggctgcaaagagctggagaacgccctcaaggctgccagcgggacccaaaataacgtgctgagaggagaaccctttatccgcggcggcggggcgggattcatttccggcctgagctacctcgagctggacaatcctgccgggaacaaacggagatattctgcttgggccgaatccgttacaaatcttccccaggtgatcaagcagaagctgaccccgctctacgagctggtcaaagaagtgccttgtgctagcgttaagaaactttatctgaagtgggccctcgaggagtacctggatgaatttgacccctgccattgtcgcccttgccagaacggaggcctggcgaccgtggaggggacacactgtctctgccattgtaaaccctatacgttcggcgccgcttgcgaacaaggagtcctggtgggcaatcaggccgggggagtcgatggcgggtggtcttgttggtccagctggtctccctgcgtgcagggaaagaagacccggagcagagagtgcaacaatcctccgccctccggcgggggccgcagctgtgttggagagacaaccgaatctacacagtgcgaggacgaagaacttgaacatctgcggctcctggagcctcactgttttcccctttccctggtgcctaccgagttctgccccagcccgcctgctctcaaagatggcttcgtccaagacgaagggacgatgtttcccgtgggaaagaacgttgtgtacacatgtaatgagggctattccctgattgggaaccctgtcgccagatgcggagaagatctgcgctggctcgtgggcgagatgcactgtcagaaaatcgcctgcgtgctgcccgttcttatggacgggatccagtctcaccctcagaagcccttctacaccgtcggcgaaaaagtgaccgtgagctgttccggaggcatgtctctggaggggccgagcgcttttctctgcggatcctctctgaagtggagccctgagatgaagaacgcgcggtgtgtccaaaaagaaaatcccctgacacaggccgtgcccaagtgccagagatgggagaaacttcagaactcccgctgcgtttgtaagatgccttacgaatgcggcccgagcctcgatgtgtgtgctcaagacgagcggtctaaacggattctgcccctgaccgtctgcaagatgcatgtgctccactgtcaggggagaaattatacactgacgggacgcgactcctgcacccttcctgccagcgccgaaaaggcttgtggcgcctgccccctgtgggggaaatgtgatgcggagtcttccaagtgcgtttgtagagaggctagcgaatgcgaggaagagggcttctctatctgcgtggaggtcaacggaaaagaacagacaatgtccgagtgtgaagccggcgccctccggtgcagagggcaaagcatttccgtgaccagcatccgcccttgtgctgccgagacacagtga

SEQ ID NO: 8066 - protein, 268 aa, synthetic construct
  REGION 1..268: note = complement_system_component_C8__Homo_sapiens__Q99618
MGSAKSVPVTPARPPPHNKHLARVADPRSPSAGILRTPIQVESSPQPGLPAGEQLEGLKHAQDSDPRSPTLGIARTPMKTSSGDPPSPLVKQLSEVFETEDSKSNLPPEPVLPPEAPLSSELDLPLGTQLSVEEQMPPWNQTEFPSKQVFSKEEARQPTETPVASQSSDKPSRDPETPRSSGSMRNRWKPNSSKVLGRSPLTILQDDNSPGTLTLRQGKRPSPLSENVSELKEGAILGTGRLLKTGGRAWEQGQDHDKENQHFPLVES

SEQ ID NO: 8067 - RNA, 807 nt, synthetic construct
  misc_feature 1..807: note complement_system_component_C8__Homo_sapiens__AAB51327
  source 1..807: mol_type = other RNA
atgggctcagccaagagcgtcccagtcacaccagcgcggcctccgccgcacaacaagcatctggctcgagtggcggacccccgttcacctagtgctggcatcctgcgcactcccatccaggtggagagctctccacagccaggcctaccagcaggggagcaactggagggtcttaaacatgcccaggactcagatccccgctctcctactcttggtattgcacggacacctatgaagaccagcagtggagaccccccaagcccactggtgaaacagctgagtgaagtatttgaaactgaagactctaaatcaaatcttcccccagagcctgttctgcccccagaggcacctttatcttctgaattggacttgcctctgggtacccagttatctgttgaggaacagatgccaccttggaaccagactgagttcccctccaaacaggtgttttccaaggaggaagcaagacagcccacagaaacccctgtggccagccagagctccgacaagccctcaagggaccctgagactcccagatcttcaggttctatgcgcaatagatggaaaccaaacagcagcaaggtactagggagatcccccctcaccatcctgcaggatgacaactcccctggcaccctgacactacgacagggtaagcggccttcacccctaagtgaaaatgttagtgaactaaaggaaggagccattcttggaactggacgacttctgaaaactggaggacgagcatgggagcaaggccaggaccatgacaaggaaaatcagcactttcccttggtggagagctag

SEQ ID NO: 8068 - RNA, 807 nt, synthetic construct
  misc_feature 1..807: note = derived and/or modified sequence opt1 fromcomplement_system_component_C8__Homo_sapiens__AAB51327
  source 1..807: mol_type = other RNA
atgggcagcgccaagtccgtgcccgtcaccccggcccgcccgccgccccacaacaagcacctggcgcgggtggccgacccccgcagcccctccgccgggatcctccggacccccatccaggtggagagcagcccccagcccggcctgcccgccggggagcagctggagggcctcaagcacgcccaggactccgacccccgctcccccacgctggggatcgcgcggaccccgatgaagaccagctccggcgacccgcccagccccctggtcaagcagctctccgaggtgttcgagaccgaggacagcaagtccaacctgccgcccgagcccgtgctgccgcccgaggcgcccctcagctccgagctggacctgcccctcggcacgcagctgagcgtcgaggagcagatgccgccctggaaccagaccgagttcccctccaagcaggtcttcagcaaggaggaggcccgccagcccaccgagacccccgtggcctcccagagcagcgacaagccctcccgggaccccgagacgccccgcagctccgggagcatgcggaaccgctggaagccgaactccagcaaggtgctgggccggagccccctcaccatcctgcaggacgacaactcccccgggaccctgaccctccgccagggcaagcggccctccccgctgagcgagaacgtgtccgagctgaaggagggggccatcctcggcacgggccgcctgctgaagaccgggggccgggcctgggagcaggggcaggaccacgacaaggagaaccagcacttccccctcgtggagagctga

SEQ ID NO: 8069 - RNA, 807 nt, synthetic construct
  misc_feature 1..807: note = derived and/or modified sequence opt2 fromcomplement_system_component_C8__Homo_sapiens__AAB51327
  source 1..807: mol_type = other RNA
atgggctccgccaagtccgtccccgtcacccccgcccgcccccccccccacaacaagcacctcgcccgcgtcgccgacccccgctccccctccgccggcatcctccgcacccccatccaggtcgagtcctccccccagcccggcctccccgccggcgagcagctcgagggcctcaagcacgcccaggactccgacccccgctcccccaccctcggcatcgcccgcacccccatgaagacctcctccggcgaccccccctcccccctcgtcaagcagctctccgaggtcttcgagaccgaggactccaagtccaacctcccccccgagcccgtcctcccccccgaggcccccctctcctccgagctcgacctccccctcggcacccagctctccgtcgaggagcagatgcccccctggaaccagaccgagttcccctccaagcaggtcttctccaaggaggaggcccgccagcccaccgagacccccgtcgcctcccagtcctccgacaagccctcccgcgaccccgagaccccccgctcctccggctccatgcgcaaccgctggaagcccaactcctccaaggtcctcggccgctcccccctcaccatcctccaggacgacaactcccccggcaccctcaccctccgccagggcaagcgcccctcccccctctccgagaacgtctccgagctcaaggagggcgccatcctcggcaccggccgcctcctcaagaccggcggccgcgcctgggagcagggccaggaccacgacaaggagaaccagcacttccccctcgtcgagtcctga

SEQ ID NO: 8070 - RNA, 807 nt, synthetic construct
  misc_feature 1..807: note = derived and/or modified sequence opt3 fromcomplement_system_component_C8__Homo_sapiens__AAB51327
  source 1..807: mol_type = other RNA
atgggcagcgccaagtccgtgcccgtcacccctgctagaccaccgccccacaacaaacatctggcaagggttgccgaccctcggtctccatcagcggggatcctccgcacacccattcaggtggagagtagccctcaaccaggacttcccgctggtgaacagctggagggcttgaagcacgcccaggattccgaccctcgatctccaactttagggatagcacgtacgccgatgaaaacctcgtcaggagatccccctagcccactggtaaagcagctaagtgaagtgttcgagacagaagactccaaatctaatctccctcccgagccagtcctgcccccggaggcccctcttagctccgaactggatttgcccctcggcactcaactgtcagtggaggaacagatgccaccttggaaccagaccgagtttcccagtaagcaggttttcagcaaggaggaagctagacaaccaacagagacccccgtggcatctcagtcctcagacaaacctagcagggatccagaaactccgcggagttctggttccatgcgcaatagatggaagcccaacagctcgaaagtcctggggaggtctcctctcacaatcttacaggacgataattccccaggaaccctgacgcttcggcagggcaagcgcccctcacctttgagtgagaacgtgagcgaactgaaagagggcgccattctagggactggacgactcctgaagaccggtggcagagcttgggagcaagggcaggaccatgataaggaaaatcagcactttccacttgtagagtcctga

SEQ ID NO: 8071 - RNA, 807 nt, synthetic construct
  misc_feature 1..807: note = derived and/or modified sequence opt4 fromcomplement_system_component_C8__Homo_sapiens__AAB51327
  source 1..807: mol_type = other RNA
atgggcagcgccaagagcgtgcccgtgacccccgccagaccccccccccacaacaagcacctggccagagtggccgaccccagaagccccagcgccggcatcctgagaacccccatccaggtggagagcagcccccagcccggcctgcccgccggcgagcagctggagggcctgaagcacgcccaggacagcgaccccagaagccccaccctgggcatcgccagaacccccatgaagaccagcagcggcgacccccccagccccctggtgaagcagctgagcgaggtgttcgagaccgaggacagcaagagcaacctgccccccgagcccgtgctgccccccgaggcccccctgagcagcgagctggacctgcccctgggcacccagctgagcgtggaggagcagatgcccccctggaaccagaccgagttccccagcaagcaggtgttcagcaaggaggaggccagacagcccaccgagacccccgtggccagccagagcagcgacaagcccagcagagaccccgagacccccagaagcagcggcagcatgagaaacagatggaagcccaacagcagcaaggtgctgggcagaagccccctgaccatcctgcaggacgacaacagccccggcaccctgaccctgagacagggcaagagacccagccccctgagcgagaacgtgagcgagctgaaggagggcgccatcctgggcaccggcagactgctgaagaccggcggcagagcctgggagcagggccaggaccacgacaaggagaaccagcacttccccctggtggagagctga

SEQ ID NO: 8072 - RNA, 807 nt, synthetic construct
  misc_feature 1..807: note = derived and/or modified sequence opt5 fromcomplement_system_component_C8__Homo_sapiens__AAB51327
  source 1..807: mol_type = other RNA
atgggcagcgccaagtccgtgcccgtcacccctgctagaccgccccctcacaacaaacatctggcccgggttgcggacccccgctctcctagcgctgggatcctcagaacacccattcaggtggagtcctctcctcaaccgggactgcccgccggcgaacagcttgaggggctgaagcacgcccaggatagcgaccctcggtcccccacgctcggaatcgctcgcacccctatgaaaacatctagcggcgatcccccgtcccctctggtgaagcagcttagcgaagtcttcgagaccgaagactctaaatccaatctgccccctgagcccgtgctgccccctgaggccccgctcagctctgaactggatctccccctggggacacaactttccgttgaggaacagatgcctccctggaaccagaccgagtttcctagcaaacaggtgttctctaaggaggaagctagacaacccacagagaccccggtcgcctcccagagctccgacaagccttctcgggatcccgaaacgcctcgcagctccggaagcatgagaaatcggtggaagcccaactcttccaaagtgctgggccgcagccctctcaccattctgcaggacgataattctcccggcacacttaccctgagacaggggaagcggccgagccctctctccgagaacgtttctgaactgaaagagggagcgatcctgggcacagggcgcctcctgaagaccggaggcagagcctgggagcaagggcaggaccatgataaggaaaatcagcactttccccttgtggagagctga

SEQ ID NO: 8073 - protein, 559 aa, synthetic construct [sequence omitted]

SEQ ID NO: 8074 - RNA, 1680 nt, synthetic construct
  misc_feature 1..1680: note complement_system_component_C9__Homo_sapiens__EAW55986
  source 1..1680: mol_type = other RNA
atgtcagcctgctggagctttgcagttgcaatctgcattttagaaataagcatcctcacagcacagtacacgaccagttatgacccagagctaacagaaagcagtggctctgcatcacacatagactgcagaatgagcccctggagtgaatggtcacaatgcgatccttgtctcagacaaatgtttcgttcaagaagcattgaggtctttggacaatttaatgggaaaagatgcaccgacgctgtgggagacagacgacagtgtgtgcccacagagccctgtgaggatgctgaggatgactgcggaaatgactttcaatgcagtacaggcagatgcataaagatgcgacttcggtgtaatggtgacaatgactgcggagacttttcagatgaggatgattgtgaaagtgagccccgtcccccctgcagagacagagtggtagaagagtctgagctggcacgaacagcaggctatgggatcaacattttagggatggatcccctaagcacaccttttgacaatgagttctacaatggactctgtaaccgggatcgggatggaaacactctgacatactaccgaagaccttggaacgtggcttctttgatctatgaaaccaaaggcgagaaaaatttcagaaccgaacattacgaagaacaaattgaagcatttaaaagtatcatccaagagaagacatcaaattttaatgcagctatatctctaaaatttacacccactgaaacaaataaagctgaacaatgttgtgaggaaacagcctcctcaatttctttacatggcaagggtagttttcggttttcatattccaaaaatgaaacttaccaactatttttgtcatattcttcaaagaaggaaaaaatgtttctgcatgtgaaaggagaaattcatctgggaagatttgtaatgagaaatcgcgatgttgtgctcacaacaacttttgtggatgatataaaagctttgccaactacctatgaaaagggagaatattttgcctttttggaaacctatggaactcactacagtagctctgggtctctaggaggactctatgaactaatatatgttttggataaagcttccatgaagcggaaaggtgttgaactaaaagacataaagagatgccttgggtatcatctggatgtatctctggctttctctgaaatctctgttggagctgaatttaataaagatgattgtgtaaagaggggagagggtagagctgtaaacatcaccagtgaaaacctcatagatgatgttgtttcactcataagaggtggaaccagaaaatatgcatttgaactgaaagaaaagcttctccgaggaaccgtgattgatgtgactgactttgtcaactgggcctcttccataaatgatgctcctgttctcattagtcaaaaactgtctcctatatataatctggttccagtgaaaatgaaaaatgcacacctaaagaaacaaaacttggaaagagccattgaagactatatcaatgaatttagtgtaagaaaatgccacacatgccaaaatggaggtacagtgattctaatggatggaaagtgtttgtgtgcctgcccattcaaatttgagggaattgcctgtgaaatcagtaaacaaaaaatttctgaaggattgccagccctagagttccccaatgaaaaatag

SEQ ID NO: 8075 - RNA, 1680 nt, synthetic construct
  misc_feature 1..1680: note = derived and/or modified sequence opt1 fromcomplement_system_component_C9__Homo_sapiens__EAW55986
  source 1..1680: mol_type = other RNA
atgagcgcctgctggtccttcgccgtggcgatctgcatcctggagatcagcatcctcaccgcccagtacaccacgtcctacgaccccgagctgaccgagagctccggcagcgcctcccacatcgactgccgcatgagcccgtggtccgagtggagccagtgcgacccctgcctgcggcagatgttccgctcccggagcatcgaggtcttcgggcagttcaacggcaagcgctgcaccgacgccgtgggggaccggcgccagtgcgtgcccaccgagccctgcgaggacgccgaggacgactgcggcaacgacttccagtgctccacggggcggtgcatcaagatgcgcctccggtgcaacggcgacaacgactgcggcgacttcagcgacgaggacgactgcgagtccgagccgcgcccgccctgccgggaccgcgtcgtggaggagagcgagctggcgcggaccgccgggtacggcatcaacatcctggggatggaccccctctccacccccttcgacaacgagttctacaacggcctgtgcaaccgcgaccgggacgggaacaccctgacgtactaccgccggccctggaacgtggccagcctcatctacgagaccaagggcgagaagaacttccgcaccgagcactacgaggagcagatcgaggccttcaagtccatcatccaggagaagaccagcaacttcaacgcggccatcagcctgaagttcacgcccaccgagaccaacaaggccgagcagtgctgcgaggagaccgcctccagcatctccctgcacggcaaggggagcttccggttctcctacagcaagaacgagacgtaccagctgttcctctcctacagctccaagaaggagaagatgttcctgcacgtcaagggcgagatccacctcgggcgcttcgtgatgcggaaccgcgacgtggtcctgaccaccaccttcgtggacgacatcaaggccctgcccacgacctacgagaagggcgagtacttcgcgttcctcgagacctacggcacccactacagctccagcgggtccctgggcgggctgtacgagctcatctacgtgctggacaaggccagcatgaagcgcaagggcgtcgagctgaaggacatcaagcggtgcctcgggtaccacctggacgtgtccctggccttcagcgagatctccgtgggcgccgagttcaacaaggacgactgcgtcaagcgcggcgaggggcgggccgtgaacatcacgagcgagaacctcatcgacgacgtggtctccctgatccgcggcgggacccggaagtacgcgttcgagctgaaggagaagctcctgcgcggcaccgtgatcgacgtgaccgacttcgtcaactgggccagcagcatcaacgacgccccggtgctgatctcccagaagctcagccccatctacaacctggtgcccgtcaagatgaagaacgcccacctgaagaagcagaacctcgagcgggccatcgaggactacatcaacgagttctccgtgcgcaagtgccacacgtgccagaacgggggcaccgtcatcctgatggacggcaagtgcctgtgcgcgtgccccttcaagttcgaggggatcgcctgcgagatcagcaagcagaagatctccgagggcctcccggccctggagttccccaacgagaagtga

SEQ ID NO: 8076 - RNA, 1680 nt, synthetic construct
  misc_feature 1..1680: note = derived and/or modified sequence opt2 fromcomplement_system_component_C9__Homo_sapiens__EAW55986
  source 1..1680: mol_type = other RNA
atgtccgcctgctggtccttcgccgtcgccatctgcatcctcgagatctccatcctcaccgcccagtacaccacctcctacgaccccgagctcaccgagtcctccggctccgcctcccacatcgactgccgcatgtccccctggtccgagtggtcccagtgcgacccctgcctccgccagatgttccgctcccgctccatcgaggtcttcggccagttcaacggcaagcgctgcaccgacgccgtcggcgaccgccgccagtgcgtccccaccgagccctgcgaggacgccgaggacgactgcggcaacgacttccagtgctccaccggccgctgcatcaagatgcgcctccgctgcaacggcgacaacgactgcggcgacttctccgacgaggacgactgcgagtccgagccccgccccccctgccgcgaccgcgtcgtcgaggagtccgagctcgcccgcaccgccggctacggcatcaacatcctcggcatggaccccctctccacccccttcgacaacgagttctacaacggcctctgcaaccgcgaccgcgacggcaacaccctcacctactaccgccgcccctggaacgtcgcctccctcatctacgagaccaagggcgagaagaacttccgcaccgagcactacgaggagcagatcgaggccttcaagtccatcatccaggagaagacctccaacttcaacgccgccatctccctcaagttcacccccaccgagaccaacaaggccgagcagtgctgcgaggagaccgcctcctccatctccctccacggcaagggctccttccgcttctcctactccaagaacgagacctaccagctcttcctctcctactcctccaagaaggagaagatgttcctccacgtcaagggcgagatccacctcggccgcttcgtcatgcgcaaccgcgacgtcgtcctcaccaccaccttcgtcgacgacatcaaggccctccccaccacctacgagaagggcgagtacttcgccttcctcgagacctacggcacccactactcctcctccggctccctcggcggcctctacgagctcatctacgtcctcgacaaggcctccatgaagcgcaagggcgtcgagctcaaggacatcaagcgctgcctcggctaccacctcgacgtctccctcgccttctccgagatctccgtcggcgccgagttcaacaaggacgactgcgtcaagcgcggcgagggccgcgccgtcaacatcacctccgagaacctcatcgacgacgtcgtctccctcatccgcggcggcacccgcaagtacgccttcgagctcaaggagaagctcctccgcggcaccgtcatcgacgtcaccgacttcgtcaactgggcctcctccatcaacgacgcccccgtcctcatctcccagaagctctcccccatctacaacctcgtccccgtcaagatgaagaacgcccacctcaagaagcagaacctcgagcgcgccatcgaggactacatcaacgagttctccgtccgcaagtgccacacctgccagaacggcggcaccgtcatcctcatggacggcaagtgcctctgcgcctgccccttcaagttcgagggcatcgcctgcgagatctccaagcagaagatctccgagggcctccccgccctcgagttccccaacgagaagtga

SEQ ID NO: 8077 - RNA, 1680 nt, synthetic construct
  misc_feature 1..1680: note = derived and/or modified sequence opt3 fromcomplement_system_component_C9__Homo_sapiens__EAW55986
  source 1..1680: mol_type = other RNA
atgagcgcctgctggtccttcgctgtggcaatctgtattctggagatatctatcctcaccgcccaatacacaacttcatatgaccccgaacttacggagagtagcggctccgcgtctcacattgattgcagaatgtcgccttggtcagaatggagccaatgtgacccatgcctgaggcagatgtttcggagtcgctccatcgaggtcttcgggcagtttaacggaaagcgatgtaccgatgctgttggtgaccgtagacagtgcgtgccgacagaaccctgtgaggatgccgaggacgattgcggcaatgacttccaatgttctactgggaggtgcattaaaatgcggttgcgctgtaacggagataatgactgcggcgattttagcgacgaagatgactgcgagtccgaacctagaccaccctgtagggaccgggtagtggaggagtcagaattagcacgcaccgccggttacgggatcaacatactgggaatggatcctctaagtacaccattcgacaatgagttttataacggcctctgcaatcgagatagagacggcaacaccctgacttactataggcggccctggaatgtcgctagccttatctacgaaacaaagggggagaaaaacttccgtaccgaacattatgaggagcagattgaagcatttaagtctatcattcaggagaaaacgtccaatttcaacgccgctatctcactgaagtttactcctaccgaaacaaataaggccgagcagtgttgcgaagagactgcgagcagtatatctttgcacggaaaaggttccttccgctttagctactcgaagaacgagacctaccaactcttcctgtcttattccagtaaaaaggagaaaatgttcctgcatgtgaagggcgaaattcacctcgggagatttgttatgaggaatcgggatgtggtcttaacaaccacgttcgtggacgatatcaaggcactgccaactacatacgaaaaaggagagtattttgccttccttgaaacctacggcactcattattcaagctccggttctttgggagggctgtacgagctaatttatgtactcgacaaggctagcatgaaacgaaagggcgttgagctgaaagatatcaagcgctgtcttggctaccacctggacgtgtcattggcctttagtgaaatctccgtcggggcagagttcaacaaagatgactgcgtgaagagaggagaaggtagggctgtgaacattacaagcgagaatctcatagacgatgtcgtttctctgatccggggcgggacccgcaagtacgcctttgagttaaaagaaaagctgctcagaggaacggtgattgacgtaaccgatttcgtgaactgggcgtcaagtatcaatgacgccccggtccttataagccagaaactgtcccccatttataacttggtgcctgttaagatgaaaaatgcacacctaaagaagcagaacctggagagggctatcgaagattacatcaatgagttttctgtgcgtaaatgtcatacatgccagaacggcggtactgtcattctcatggacgggaagtgtctgtgcgcctgtccattcaaatttgaaggcatcgcttgcgagatttcgaagcagaaaataagcgagggacttcccgccctggagttccctaatgaaaagtga

SEQ ID NO: 8078 - RNA, 1680 nt, synthetic construct
  misc_feature 1..1680: note = derived and/or modified sequence opt4 fromcomplement_system_component_C9__Homo_sapiens__EAW55986
  source 1..1680: mol_type = other RNA
atgagcgcctgctggagcttcgccgtggccatctgcatcctggagatcagcatcctgaccgcccagtacaccaccagctacgaccccgagctgaccgagagcagcggcagcgccagccacatcgactgcagaatgagcccctggagcgagtggagccagtgcgacccctgcctgagacagatgttcagaagcagaagcatcgaggtgttcggccagttcaacggcaagagatgcaccgacgccgtgggcgacagaagacagtgcgtgcccaccgagccctgcgaggacgccgaggacgactgcggcaacgacttccagtgcagcaccggcagatgcatcaagatgagactgagatgcaacggcgacaacgactgcggcgacttcagcgacgaggacgactgcgagagcgagcccagacccccctgcagagacagagtggtggaggagagcgagctggccagaaccgccggctacggcatcaacatcctgggcatggaccccctgagcacccccttcgacaacgagttctacaacggcctgtgcaacagagacagagacggcaacaccctgacctactacagaagaccctggaacgtggccagcctgatctacgagaccaagggcgagaagaacttcagaaccgagcactacgaggagcagatcgaggccttcaagagcatcatccaggagaagaccagcaacttcaacgccgccatcagcctgaagttcacccccaccgagaccaacaaggccgagcagtgctgcgaggagaccgccagcagcatcagcctgcacggcaagggcagcttcagattcagctacagcaagaacgagacctaccagctgttcctgagctacagcagcaagaaggagaagatgttcctgcacgtgaagggcgagatccacctgggcagattcgtgatgagaaacagagacgtggtgctgaccaccaccttcgtggacgacatcaaggccctgcccaccacctacgagaagggcgagtacttcgccttcctggagacctacggcacccactacagcagcagcggcagcctgggcggcctgtacgagctgatctacgtgctggacaaggccagcatgaagagaaagggcgtggagctgaaggacatcaagagatgcctgggctaccacctggacgtgagcctggccttcagcgagatcagcgtgggcgccgagttcaacaaggacgactgcgtgaagagaggcgagggcagagccgtgaacatcaccagcgagaacctgatcgacgacgtggtgagcctgatcagaggcggcaccagaaagtacgccttcgagctgaaggagaagctgctgagaggcaccgtgatcgacgtgaccgacttcgtgaactgggccagcagcatcaacgacgcccccgtgctgatcagccagaagctgagccccatctacaacctggtgcccgtgaagatgaagaacgcccacctgaagaagcagaacctggagagagccatcgaggactacatcaacgagttcagcgtgagaaagtgccacacctgccagaacggcggcaccgtgatcctgatggacggcaagtgcctgtgcgcctgccccttcaagttcgagggcatcgcctgcgagatcagcaagcagaagatcagcgagggcctgcccgccctggagttccccaacgagaagtga

SEQ ID NO: 8079 - RNA, 1680 nt, synthetic construct
  misc_feature 1..1680: note = derived and/or modified sequence opt5 fromcomplement_system_component_C9__Homo_sapiens__EAW55986
  source 1..1680: mol_type = other RNA
atgagcgcctgctggtccttcgctgtggccatctgtattctggagatctctattctcaccgcgcaatacacaacgagctatgaccccgaactgaccgagtcctctggcagcgcttcccacatcgattgcagaatgtctccttggagcgaatggtcccaatgtgacccgtgccttcggcagatgtttcgcagcagatctattgaggtcttcgggcagtttaacggaaagcggtgtacagatgccgttggcgaccgcagacagtgcgtgcccaccgaaccttgtgaggatgccgaggacgattgcgggaatgacttccaatgttccacaggacggtgcatcaaaatgcgcctgagatgtaacggcgataatgactgcggggattttagcgacgaagatgactgcgagtctgaaccccggcctccctgtcgcgacagagtggtcgaggagtccgaactcgctcggaccgccggatacggcatcaacattctgggcatggatcctcttagcacaccgttcgacaatgagttttataacgggctgtgcaatcgcgatagagacggaaacaccctcacgtactatcggcgcccctggaatgtggcttctctgatctacgaaaccaagggcgagaaaaacttcagaacagaacattatgaggagcagattgaagcctttaagtccatcattcaggagaaaaccagcaatttcaacgcggccatctccctgaagtttacacctaccgaaacgaataaggctgagcagtgttgcgaagagacagcctctagcatttccctccacgggaaaggcagcttccggttttcttactccaagaacgagacctaccaactgttccttagctattctagcaaaaaggagaaaatgttcctgcatgttaagggagaaatccacctcgggagatttgtgatgcgcaatcgggatgtcgtgctgacaaccaccttcgttgacgatatcaaggcccttcccacaacgtacgaaaaaggagagtattttgctttcctggaaacctacggcacacattattcctctagcggctccctcgggggactgtacgagctgatttatgtgctcgacaaggcgagcatgaaaagaaagggcgtcgagctgaaagatatcaagcgctgtcttgggtaccacctggacgtgtctctcgccttttccgaaattagcgtgggagctgagttcaacaaagatgactgcgtcaagcggggcgaagggagagccgttaacatcacctctgagaatctgattgacgatgtggtgtcccttatccgcggaggcacacggaagtacgcttttgagctgaaagaaaagctcctgagaggcaccgtcatcgacgtgacggatttcgttaactgggccagctccattaatgacgcccctgtgctgatctctcagaaactcagccccatttataacctggtcccggtgaagatgaaaaatgctcaccttaagaagcagaacctggagcgcgcgatcgaagattacattaatgagttttccgttcggaaatgtcatacatgccagaacgggggaaccgtgatcctcatggacggcaagtgtctgtgcgcctgtcctttcaaatttgaagggatcgcttgcgagatttctaagcagaaaatcagcgagggacttcccgccctggagttccctaatgaaaagtga

SEQ ID NO: 8080 - protein, 559 aa, synthetic construct
  REGION 1..559: note = complement_system_component_C9__Homo_sapiens__P02748
MSACRSFAVAICILEISILTAQYTTSYDPELTESSGSASHIDCRMSPWSEWSQCDPCLRQMFRSRSIEVFGQFNGKRCTDAVGDRRQCVPTEPCEDAEDDCGNDFQCSTGRCIKMRLRCNGDNDCGDFSDEDDCESEPRPPCRDRVVEESELARTAGYGINILGMDPLSTPFDNEFYNGLCNRDRDGNTLTYYRRPWNVASLIYETKGEKNFRTEHYEEQIEAFKSIIQEKTSNFNAAISLKFTPTETNKAEQCCEETASSISLHGKGSFRFSYSKNETYQLFLSYSSKKEKMFLHVKGEIHLGRFVMRNRDVVLTTTFVDDIKALPTTYEKGEYFAFLETYGTHYSSSGSLGGLYELIYVLDKASMKRKGVELKDIKRCLGYHLDVSLAFSEISVGAEFNKDDCVKRGEGRAVNITSENLIDDVVSLIRGGTRKYAFELKEKLLRGTVIDVTDFVNWASSINDAPVLISQKLSPIYNLVPVKMKNAHLKKQNLERAIEDYINEFSVRKCHTCQNGGTVILMDGKCLCACPFKFEGIACEISKQKISEGLPALEFPNEK

SEQ ID NO: 8081 - RNA, 1680 nt, synthetic construct
  misc_feature 1..1680: note complement_system_component_C9__Homo_sapiens__AAH20721
  source 1..1680: mol_type = other RNA
atgtcagcctgccggagctttgcagttgcaatctgcattttagaaataagcatcctcacagcacagtacacgaccagttatgacccagagctaacagaaagcagtggctctgcatcacacatagactgcagaatgagcccctggagtgaatggtcacaatgcgatccttgtctcagacaaatgtttcgttcaagaagcattgaggtctttggacaatttaatgggaaaagatgcaccgacgctgtgggagacagacgacagtgtgtgcccacagagccctgtgaggatgctgaggatgactgcggaaatgactttcaatgcagtacaggcagatgcataaagatgcgacttcggtgtaatggtgacaatgactgcggagacttttcagatgaggatgattgtgaaagtgagccccgtcccccctgcagagacagagtggtagaagagtctgagctggcacgaacagcaggctatgggatcaacattttagggatggatcccctaagcacaccttttgacaatgagttctacaatggactctgtaaccgggatcgggatggaaacactctgacatactaccgaagaccttggaacgtggcttctttgatctatgaaaccaaaggcgagaaaaatttcagaaccgaacattacgaagaacaaattgaagcatttaaaagtatcatccaagagaagacatcaaattttaatgcagctatatctctaaaatttacacccactgaaacaaataaagctgaacaatgttgtgaggaaacagcctcctcaatttctttacatggcaagggtagttttcggttttcatattccaaaaatgaaacttaccaactatttttgtcatattcttcaaagaaggaaaaaatgtttctgcatgtgaaaggagaaattcatctgggaagatttgtaatgagaaatcgcgatgttgtgctcacaacaacttttgtggatgatataaaagctttgccaactacctatgaaaagggagaatattttgcctttttggaaacctatggaactcactacagtagctctgggtctctaggaggactctatgaactaatatatgttttggataaagcttccatgaagcggaaaggtgttgaactaaaagacataaagagatgccttgggtatcatctggatgtatctctggctttctctgaaatctctgttggagctgaatttaataaagatgattgtgtaaagaggggagagggtagagctgtaaacatcaccagtgaaaacctcatagatgatgttgtttcactcataagaggtggaaccagaaaatatgcatttgaactgaaagaaaagcttctccgaggaaccgtgattgatgtgactgactttgtcaactgggcctcttccataaatgatgctcctgttctcattagtcaaaaactgtctcctatatataatctggttccagtgaaaatgaaaaatgcacacctaaagaaacaaaacttggaaagagccattgaagactatatcaatgaatttagtgtaagaaaatgccacacatgccaaaatggaggtacagtgattctaatggatggaaagtgtttgtgtgcctgcccattcaaatttgagggaattgcctgtgaaatcagtaaacaaaaaatttctgaaggattgccagccctagagttccccaatgaaaaatag

SEQ ID NO: 8082 - RNA, 1680 nt, synthetic construct
  misc_feature 1..1680: note = derived and/or modified sequence opt1 fromcomplement_system_component_C9__Homo_sapiens__AAH20721
  source 1..1680: mol_type = other RNA
atgagcgcctgccgctccttcgccgtggcgatctgcatcctggagatcagcatcctcaccgcccagtacaccacgtcctacgaccccgagctgaccgagagctccggcagcgcctcccacatcgactgccggatgagcccgtggtccgagtggagccagtgcgacccctgcctgcgccagatgttccggtcccgcagcatcgaggtcttcgggcagttcaacggcaagcggtgcaccgacgccgtgggggaccgccggcagtgcgtgcccaccgagccctgcgaggacgccgaggacgactgcggcaacgacttccagtgctccacggggcgctgcatcaagatgcggctccgctgcaacggcgacaacgactgcggcgacttcagcgacgaggacgactgcgagtccgagccgcggccgccctgccgcgaccgggtcgtggaggagagcgagctggcgcgcaccgccgggtacggcatcaacatcctggggatggaccccctctccacccccttcgacaacgagttctacaacggcctgtgcaaccgggaccgcgacgggaacaccctgacgtactaccggcgcccctggaacgtggccagcctcatctacgagaccaagggcgagaagaacttccggaccgagcactacgaggagcagatcgaggccttcaagtccatcatccaggagaagaccagcaacttcaacgcggccatcagcctgaagttcacgcccaccgagaccaacaaggccgagcagtgctgcgaggagaccgcctccagcatctccctgcacggcaaggggagcttccgcttctcctacagcaagaacgagacgtaccagctgttcctctcctacagctccaagaaggagaagatgttcctgcacgtcaagggcgagatccacctcgggcggttcgtgatgcgcaaccgcgacgtggtcctgaccaccaccttcgtggacgacatcaaggccctgcccacgacctacgagaagggcgagtacttcgcgttcctcgagacctacggcacccactacagctccagcgggtccctgggcgggctgtacgagctcatctacgtgctggacaaggccagcatgaagcggaagggcgtcgagctgaaggacatcaagcgctgcctcgggtaccacctggacgtgtccctggccttcagcgagatctccgtgggcgccgagttcaacaaggacgactgcgtcaagcggggcgaggggcgcgccgtgaacatcacgagcgagaacctcatcgacgacgtggtctccctgatccggggcgggacccgcaagtacgcgttcgagctgaaggagaagctcctgcggggcaccgtgatcgacgtgaccgacttcgtcaactgggccagcagcatcaacgacgccccggtgctgatctcccagaagctcagccccatctacaacctggtgcccgtcaagatgaagaacgcccacctgaagaagcagaacctcgagcgcgccatcgaggactacatcaacgagttctccgtgcggaagtgccacacgtgccagaacgggggcaccgtcatcctgatggacggcaagtgcctgtgcgcgtgccccttcaagttcgaggggatcgcctgcgagatcagcaagcagaagatctccgagggcctcccggccctggagttccccaacgagaagtga

SEQ ID NO: 8083 - RNA, 1680 nt, synthetic construct
  misc_feature 1..1680: note = derived and/or modified sequence opt2 fromcomplement_system_component_C9__Homo_sapiens__AAH20721
  source 1..1680: mol_type = other RNA
atgtccgcctgccgctccttcgccgtcgccatctgcatcctcgagatctccatcctcaccgcccagtacaccacctcctacgaccccgagctcaccgagtcctccggctccgcctcccacatcgactgccgcatgtccccctggtccgagtggtcccagtgcgacccctgcctccgccagatgttccgctcccgctccatcgaggtcttcggccagttcaacggcaagcgctgcaccgacgccgtcggcgaccgccgccagtgcgtccccaccgagccctgcgaggacgccgaggacgactgcggcaacgacttccagtgctccaccggccgctgcatcaagatgcgcctccgctgcaacggcgacaacgactgcggcgacttctccgacgaggacgactgcgagtccgagccccgccccccctgccgcgaccgcgtcgtcgaggagtccgagctcgcccgcaccgccggctacggcatcaacatcctcggcatggaccccctctccacccccttcgacaacgagttctacaacggcctctgcaaccgcgaccgcgacggcaacaccctcacctactaccgccgcccctggaacgtcgcctccctcatctacgagaccaagggcgagaagaacttccgcaccgagcactacgaggagcagatcgaggccttcaagtccatcatccaggagaagacctccaacttcaacgccgccatctccctcaagttcacccccaccgagaccaacaaggccgagcagtgctgcgaggagaccgcctcctccatctccctccacggcaagggctccttccgcttctcctactccaagaacgagacctaccagctcttcctctcctactcctccaagaaggagaagatgttcctccacgtcaagggcgagatccacctcggccgcttcgtcatgcgcaaccgcgacgtcgtcctcaccaccaccttcgtcgacgacatcaaggccctccccaccacctacgagaagggcgagtacttcgccttcctcgagacctacggcacccactactcctcctccggctccctcggcggcctctacgagctcatctacgtcctcgacaaggcctccatgaagcgcaagggcgtcgagctcaaggacatcaagcgctgcctcggctaccacctcgacgtctccctcgccttctccgagatctccgtcggcgccgagttcaacaaggacgactgcgtcaagcgcggcgagggccgcgccgtcaacatcacctccgagaacctcatcgacgacgtcgtctccctcatccgcggcggcacccgcaagtacgccttcgagctcaaggagaagctcctccgcggcaccgtcatcgacgtcaccgacttcgtcaactgggcctcctccatcaacgacgcccccgtcctcatctcccagaagctctcccccatctacaacctcgtccccgtcaagatgaagaacgcccacctcaagaagcagaacctcgagcgcgccatcgaggactacatcaacgagttctccgtccgcaagtgccacacctgccagaacggcggcaccgtcatcctcatggacggcaagtgcctctgcgcctgccccttcaagttcgagggcatcgcctgcgagatctccaagcagaagatctccgagggcctccccgccctcgagttccccaacgagaagtga

SEQ ID NO: 8084 - RNA, 1680 nt, synthetic construct
  misc_feature 1..1680: note = derived and/or modified sequence opt3 fromcomplement_system_component_C9__Homo_sapiens__AAH20721
  source 1..1680: mol_type = other RNA
atgagcgcctgcagatccttcgctgtggcaatctgtattctggagatatctatcctcaccgcccaatacacaacttcatatgaccccgaacttacggagagtagcggctccgcgtctcacattgattgcaggatgtcgccttggtcagaatggagccaatgtgacccatgcctgcggcagatgtttcgcagtcgatccatcgaggtcttcgggcagtttaacggaaagcgttgtaccgatgctgttggtgacagaaggcagtgcgtgccgacagaaccctgtgaggatgccgaggacgattgcggcaatgacttccaatgttctactgggcggtgcattaaaatgcgcttgagatgtaacggagataatgactgcggcgattttagcgacgaagatgactgcgagtccgaacctaggccaccctgtcgggaccgcgtagtggaggagtcagaattagcacgaaccgccggttacgggatcaacatactgggaatggatcctctaagtacaccattcgacaatgagttttataacggcctctgcaatagagatagggacggcaacaccctgacttactatcggcgtccctggaatgtcgctagccttatctacgaaacaaagggggagaaaaacttccgcaccgaacattatgaggagcagattgaagcatttaagtctatcattcaggagaaaacgtccaatttcaacgccgctatctcactgaagtttactcctaccgaaacaaataaggccgagcagtgttgcgaagagactgcgagcagtatatctttgcacggaaaaggttccttcagatttagctactcgaagaacgagacctaccaactcttcctgtcttattccagtaaaaaggagaaaatgttcctgcatgtgaagggcgaaattcacctcgggaggtttgttatgcggaatcgagatgtggtcttaacaaccacgttcgtggacgatatcaaggcactgccaactacatacgaaaaaggagagtattttgccttccttgaaacctacggcactcattattcaagctccggttctttgggagggctgtacgagctaatttatgtactcgacaaggctagcatgaaacgcaagggcgttgagctgaaagatatcaagagatgtcttggctaccacctggacgtgtcattggcctttagtgaaatctccgtcggggcagagttcaacaaagatgactgcgtgaagaggggagaaggtcgggctgtgaacattacaagcgagaatctcatagacgatgtcgtttctctgatccgcggcgggaccagaaagtacgcctttgagttaaaagaaaagctgctcaggggaacggtgattgacgtaaccgatttcgtgaactgggcgtcaagtatcaatgacgccccggtccttataagccagaaactgtcccccatttataacttggtgcctgttaagatgaaaaatgcacacctaaagaagcagaacctggagcgtgctatcgaagattacatcaatgagttttctgtgcggaaatgtcatacatgccagaacggcggtactgtcattctcatggacgggaagtgtctgtgcgcctgtccattcaaatttgaaggcatcgcttgcgagatttcgaagcagaaaataagcgagggacttcccgccctggagttccctaatgaaaagtga

SEQ ID NO: 8085 - RNA, 1680 nt, synthetic construct
  misc_feature 1..1680: note = derived and/or modified sequence opt4 fromcomplement_system_component_C9__Homo_sapiens__AAH20721
  source 1..1680: mol_type = other RNA
atgagcgcctgcagaagcttcgccgtggccatctgcatcctggagatcagcatcctgaccgcccagtacaccaccagctacgaccccgagctgaccgagagcagcggcagcgccagccacatcgactgcagaatgagcccctggagcgagtggagccagtgcgacccctgcctgagacagatgttcagaagcagaagcatcgaggtgttcggccagttcaacggcaagagatgcaccgacgccgtgggcgacagaagacagtgcgtgcccaccgagccctgcgaggacgccgaggacgactgcggcaacgacttccagtgcagcaccggcagatgcatcaagatgagactgagatgcaacggcgacaacgactgcggcgacttcagcgacgaggacgactgcgagagcgagcccagacccccctgcagagacagagtggtggaggagagcgagctggccagaaccgccggctacggcatcaacatcctgggcatggaccccctgagcacccccttcgacaacgagttctacaacggcctgtgcaacagagacagagacggcaacaccctgacctactacagaagaccctggaacgtggccagcctgatctacgagaccaagggcgagaagaacttcagaaccgagcactacgaggagcagatcgaggccttcaagagcatcatccaggagaagaccagcaacttcaacgccgccatcagcctgaagttcacccccaccgagaccaacaaggccgagcagtgctgcgaggagaccgccagcagcatcagcctgcacggcaagggcagcttcagattcagctacagcaagaacgagacctaccagctgttcctgagctacagcagcaagaaggagaagatgttcctgcacgtgaagggcgagatccacctgggcagattcgtgatgagaaacagagacgtggtgctgaccaccaccttcgtggacgacatcaaggccctgcccaccacctacgagaagggcgagtacttcgccttcctggagacctacggcacccactacagcagcagcggcagcctgggcggcctgtacgagctgatctacgtgctggacaaggccagcatgaagagaaagggcgtggagctgaaggacatcaagagatgcctgggctaccacctggacgtgagcctggccttcagcgagatcagcgtgggcgccgagttcaacaaggacgactgcgtgaagagaggcgagggcagagccgtgaacatcaccagcgagaacctgatcgacgacgtggtgagcctgatcagaggcggcaccagaaagtacgccttcgagctgaaggagaagctgctgagaggcaccgtgatcgacgtgaccgacttcgtgaactgggccagcagcatcaacgacgcccccgtgctgatcagccagaagctgagccccatctacaacctggtgcccgtgaagatgaagaacgcccacctgaagaagcagaacctggagagagccatcgaggactacatcaacgagttcagcgtgagaaagtgccacacctgccagaacggcggcaccgtgatcctgatggacggcaagtgcctgtgcgcctgccccttcaagttcgagggcatcgcctgcgagatcagcaagcagaagatcagcgagggcctgcccgccctggagttccccaacgagaagtga

SEQ ID NO: 8086 - RNA, 1680 nt, synthetic construct
  misc_feature 1..1680: note = derived and/or modified sequence opt5 fromcomplement_system_component_C9__Homo_sapiens__AAH20721
  source 1..1680: mol_type = other RNA
atgagcgcctgcagatccttcgctgtggccatctgtattctggagatctctattctcaccgcgcaatacacaacgagctatgaccccgaactgaccgagtcctctggcagcgcttcccacatcgattgccggatgtctccttggagcgaatggtcccaatgtgacccgtgccttcgccagatgtttagaagccggtctattgaggtcttcgggcagtttaacggaaagcgctgtacagatgccgttggcgacagacggcagtgcgtgcccaccgaaccttgtgaggatgccgaggacgattgcgggaatgacttccaatgttccacaggacgctgcatcaaaatgagactgcggtgtaacggcgataatgactgcggggattttagcgacgaagatgactgcgagtctgaaccccgccctccctgtagagaccgggtggtcgaggagtccgaactcgctcgcaccgccggatacggcatcaacattctgggcatggatcctcttagcacaccgttcgacaatgagttttataacgggctgtgcaatagagatcgggacggaaacaccctcacgtactatcgcagaccctggaatgtggcttctctgatctacgaaaccaagggcgagaaaaacttccggacagaacattatgaggagcagattgaagcctttaagtccatcattcaggagaaaaccagcaatttcaacgcggccatctccctgaagtttacacctaccgaaacgaataaggctgagcagtgttgcgaagagacagcctctagcatttccctccacgggaaaggcagcttcagattttcttactccaagaacgagacctaccaactgttccttagctattctagcaaaaaggagaaaatgttcctgcatgttaagggagaaatccacctcgggcgctttgtgatgcggaatagagatgtcgtgctgacaaccaccttcgttgacgatatcaaggcccttcccacaacgtacgaaaaaggagagtattttgctttcctggaaacctacggcacacattattcctctagcggctccctcgggggactgtacgagctgatttatgtgctcgacaaggcgagcatgaaacgcaagggcgtcgagctgaaagatatcaagcggtgtcttgggtaccacctggacgtgtctctcgccttttccgaaattagcgtgggagctgagttcaacaaagatgactgcgtcaagagaggcgaagggcgcgccgttaacatcacctctgagaatctgattgacgatgtggtgtcccttatccggggaggcacaagaaagtacgcttttgagctgaaagaaaagctcctgcgcggcaccgtcatcgacgtgacggatttcgttaactgggccagctccattaatgacgcccctgtgctgatctctcagaaactcagccccatttataacctggtcccggtgaagatgaaaaatgctcaccttaagaagcagaacctggagcgggcgatcgaagattacattaatgagttttccgttagaaaatgtcatacatgccagaacgggggaaccgtgatcctcatggacggcaagtgtctgtgcgcctgtcctttcaaatttgaagggatcgcttgcgagatttctaagcagaaaatcagcgagggacttcccgccctggagttccctaatgaaaagtga

SEQ ID NO: 8087 - protein, 1033 aa, synthetic construct
  REGION 1..1033: note = complement_system_component_CR2__Homo_sapiens__P20023
MGAAGLLGVFLALVAPGVLGISCGSPPPILNGRISYYSTPIAVGTVIRYSCSGTFRLIGEKSLLCITKDKVDGTWDKPAPKCEYFNKYSSCPEPIVPGGYKIRGSTPYRHGDSVTFACKTNFSMNGNKSVWCQANNMWGPTRLPTCVSVFPLECPALPMIHNGHHTSENVGSIAPGLSVTYSCESGYLLVGEKIINCLSSGKWSAVPPTCEEARCKSLGRFPNGKVKEPPILRVGVTANFFCDEGYRLQGPPSSRCVIAGQGVAWTKMPVCEEIFCPSPPPILNGRHIGNSLANVSYGSIVTYTCDPDPEEGVNFILIGESTLRCTVDSQKTGTWSGPAPRCELSTSAVQCPHPQILRGRMVSGQKDRYTYNDTVIFACMFGFTLKGSKQIRCNAQGTWEPSAPVCEKECQAPPNILNGQKEDRHMVRFDPGTSIKYSCNPGYVLVGEESIQCTSEGVWTPPVPQCKVAACEATGRQLLTKPQHQFVRPDVNSSCGEGYKLSGSVYQECQGTIPWFMEIRLCKEITCPPPPVIYNGAHTGSSLEDFPYGTTVTYTCNPGPERGVEFSLIGESTIRCTSNDQERGTWSGPAPLCKLSLLAVQCSHVHIANGYKISGKEAPYFYNDTVTFKCYSGFTLKGSSQIRCKADNTWDPEIPVCEKETCQHVRQSLQELPAGSRVELVNTSCQDGYQLTGHAYQMCQDAENGIWFKKIPLCKVIHCHPPPVIVNGKHTGMMAENFLYGNEVSYECDQGFYLLGEKKLQCRSDSKGHGSWSGPSPQCLRSPPVTRCPNPEVKHGYKLNKTHSAYSHNDIVYVDCNPGFIMNGSRVIRCHTDNTWVPGVPTCIKKAFIGCPPPPKTPNGNHTGGNIARFSPGMSILYSCDQGYLLVGEALLLCTHEGTWSQPAPHCKEVNCSSPADMDGIQKGLEPRKMYQYGAVVTLECEDGYMLEGSPQSQCQSDHQWNPPLAVCRSRSLAPVLCGIAAGLILLTFLIVITLYVISKHRARNYYTDTSQKEAFHLEAREVYSVDPYNPAS

SEQ ID NO: 8088 - RNA, 3102 nt, synthetic construct
  misc_feature 1..3102: note complement_system_component_CR2__Homo_sapiens__CCDS1478.1
  source 1..3102: mol_type = other RNA
atgggcgccgcgggcctgctcggggttttcttggctctcgtcgcaccgggggtcctcgggatttcttgtggctctcctccgcctatcctaaatggccggattagttattattctacccccattgctgttggtaccgtgataaggtacagttgttcaggtaccttccgcctcattggagaaaaaagtctattatgcataactaaagacaaagtggatggaacctgggataaacctgctcctaaatgtgaatatttcaataaatattcttcttgccctgagcccatagtaccaggaggatacaaaattagaggctctacaccctacagacatggtgattctgtgacatttgcctgtaaaaccaacttctccatgaacggaaacaagtctgtttggtgtcaagcaaataatatgtgggggccgacacgactaccaacctgtgtaagtgttttccctctcgagtgtccagcacttcctatgatccacaatggacatcacacaagtgagaatgttggctccattgctccaggattgtctgtgacttacagctgtgaatctggttacttgcttgttggagaaaagatcattaactgtttgtcttcgggaaaatggagtgctgtcccccccacatgtgaagaggcacgctgtaaatctctaggacgatttcccaatgggaaggtaaaggagcctccaattctccgggttggtgtaactgcaaactttttctgtgatgaagggtatcgactgcaaggcccaccttctagtcggtgtgtaattgctggacagggagttgcttggaccaaaatgccagtatgtgaagaaattttttgcccatcacctccccctattctcaatggaagacatataggcaactcactagcaaatgtctcatatggaagcatagtcacttacacttgtgacccggacccagaggaaggagtgaacttcatccttattggagagagcactctccgttgtacagttgatagtcagaagactgggacctggagtggccctgccccacgctgtgaactttctacttctgcggttcagtgtccacatccccagatcctaagaggccgaatggtatctgggcagaaagatcgatatacctataacgacactgtgatatttgcttgcatgtttggcttcaccttgaagggcagcaagcaaatccgatgcaatgcccaaggcacatgggagccatctgcaccagtctgtgaaaaggaatgccaggcccctcctaacatcctcaatgggcaaaaggaagatagacacatggtccgctttgaccctggaacatctataaaatatagctgtaaccctggctatgtgctggtgggagaagaatccatacagtgtacctctgagggggtgtggacaccccctgtaccccaatgcaaagtggcagcgtgtgaagctacaggaaggcaactcttgacaaaaccccagcaccaatttgttagaccagatgtcaactcttcttgtggtgaagggtacaagttaagtgggagtgtttatcaggagtgtcaaggcacaattccttggtttatggagattcgtctttgtaaagaaatcacctgcccaccaccccctgttatctacaatggggcacacaccgggagttccttagaagattttccatatggaaccacggtcacttacacatgtaaccctgggccagaaagaggagtggaattcagcctcattggagagagcaccatccgttgtacaagcaatgatcaagaaagaggcacctggagtggccctgctcccctgtgtaaactttccctccttgctgtccagtgctcacatgtccatattgcaaatggatacaagatatctggcaaggaagccccatatttctacaatgacactgtgacattcaagtgttatagtggatttactttgaagggcagtagtcagattcgttgcaaagctgataacacctgggatcctgaaataccagtttgtgaaaaagaaacatgccagcatgtgagacagagtcttcaagaacttccagctggttcacgtgtggagctagttaatacgtcctgccaagatgggtaccagttgactggacatgcttatcagatgtgtcaagatgctgaaaatggaatttggttcaaaaagattccactttgtaaagttattcactgtcaccctccaccagtgattgtcaatgggaagcacacaggcatgatggcagaaaactttctatatggaaatgaagtctcttatgaatgtgaccaaggattctatctcctgggagagaaaaaattgcagtgcagaagtgattctaaaggacatggatcttggagcgggccttccccacagtgcttacgatctcctcctgtgactcgctgccctaatccagaagtcaaacatgggtacaagctcaataaaacacattctgcatattcccacaatgacatagtgtatgttgactgcaatcctggcttcatcatgaatggtagtcgcgtgattaggtgtcatactgataacacatgggtgccaggtgtgccaacttgtatcaaaaaagccttcatagggtgtccacctccgcctaagacccctaacgggaaccatactggtggaaacatagctcgattttctcctggaatgtcaatcctgtacagctgtgaccaaggctacctgctggtgggagaggcactccttctttgcacacatgagggaacctggagccaacctgcccctcattgtaaagaggtaaactgtagctcaccagcagatatggatggaatccagaaagggctggaaccaaggaaaatgtatcagtatggagctgttgtaactctggagtgtgaagatgggtatatgctggaaggcagtccccagagccagtgccaatcggatcaccaatggaaccctcccctggcggtttgcagatcccgttcacttgctcctgtcctttgtggtattgctgcaggtttgatacttcttaccttcttgattgtcattaccttatacgtgatatcaaaacacagagcacgcaattattatacagatacaagccagaaagaagcttttcatttagaagcacgagaagtatattctgttgatccatacaacccagccagctga

SEQ ID NO: 8089 - RNA, 3102 nt, synthetic construct
  misc_feature 1..3102: note = derived and/or modified sequence opt1 fromcomplement_system_component_CR2__Homo_sapiens__CCDS1478 .1
  source 1..3102: mol_type = other RNA
atgggcgccgccgggctgctcggcgtgttcctggcgctggtcgcccccggggtgctcggcatcagctgcgggtccccgccccccatcctgaacggccgcatcagctactactccacccccatcgccgtgggcaccgtcatccggtacagctgctccgggacgttccgcctgatcggcgagaagagcctcctgtgcatcaccaaggacaaggtggacgggacctgggacaagccggcccccaagtgcgagtacttcaacaagtactccagctgccccgagcccatcgtgccgggcgggtacaagatccggggctccaccccctaccgccacggcgacagcgtcacgttcgcctgcaagaccaacttctccatgaacgggaacaagagcgtgtggtgccaggcgaacaacatgtggggccccacccggctgcccacctgcgtgtccgtcttcccgctcgagtgccccgccctgcccatgatccacaacgggcaccacacgagcgagaacgtgggctccatcgcccccggcctgagcgtgacctactcctgcgagagcgggtacctcctggtcggcgagaagatcatcaactgcctgtccagcgggaagtggagcgccgtgccgcccacctgcgaggaggcgcgctgcaagtccctcggccggttccccaacgggaaggtgaaggagcccccgatcctgcgcgtcggcgtgaccgccaacttcttctgcgacgagggctaccggctgcaggggccccccagctcccgctgcgtgatcgccggccagggggtcgcctggacgaagatgcccgtgtgcgaggagatcttctgcccgagccccccccccatcctcaacggccggcacatcgggaactccctggccaacgtgagctacggctccatcgtcacctacacctgcgacccggaccccgaggagggcgtgaacttcatcctgatcggggagagcaccctccgctgcacggtggactcccagaagaccggcacctggagcgggcccgcgccgcggtgcgagctgtccaccagcgccgtccagtgcccccacccccagatcctgcgcggccggatggtgtccgggcagaaggaccgctacacgtacaacgacaccgtcatcttcgcctgcatgttcggcttcaccctcaagggcagcaagcagatccggtgcaacgcccaggggacctgggagccctccgccccggtgtgcgagaaggagtgccaggcgccccccaacatcctgaacggccagaaggaggaccgccacatggtgcggttcgaccccgggacgagcatcaagtactcctgcaacccgggctacgtcctggtgggcgaggagagcatccagtgcacctccgagggggtgtggaccccccccgtcccccagtgcaaggtggccgcctgcgaggccaccggccgccagctcctgacgaagccgcagcaccagttcgtgcggcccgacgtcaacagcagctgcggggagggctacaagctgtccgggagcgtgtaccaggagtgccagggcaccatcccctggttcatggagatccgcctctgcaaggagatcacctgccccccgccccccgtgatctacaacggcgcccacaccgggtccagcctggaggacttcccctacggcacgaccgtcacctacacctgcaacccggggcccgagcgcggcgtggagttctccctgatcggggagagcacgatccggtgcacctccaacgaccaggagcgcggcacctggagcggccccgcgcccctctgcaagctgtccctgctcgccgtgcagtgcagccacgtccacatcgccaacgggtacaagatctccggcaaggaggccccgtacttctacaacgacaccgtgaccttcaagtgctacagcgggttcacgctgaagggctccagccagatccggtgcaaggccgacaacacctgggaccccgagatccccgtgtgcgagaaggagacctgccagcacgtccgccagtccctgcaggagctcccggcggggagccgggtggagctggtgaacacctcctgccaggacggctaccagctgacgggccacgcctaccagatgtgccaggacgccgagaacgggatctggttcaagaagatccccctctgcaaggtcatccactgccacccccccccggtgatcgtgaacggcaagcacaccgggatgatggccgagaacttcctgtacggcaacgaggtcagctacgagtgcgaccaggggttctacctgctcggcgagaagaagctgcagtgccgcagcgactccaagggccacgggagctggtccggccccagcccccagtgcctgcggtcccccccggtgacccgctgccccaaccccgaggtgaagcacgggtacaagctcaacaagacccacagcgcgtactcccacaacgacatcgtctacgtggactgcaaccccggcttcatcatgaacggcagccgggtgatccgctgccacacggacaacacctgggtcccgggggtgcccacctgcatcaagaaggccttcatcggctgcccccccccgcccaagacccccaacgggaaccacacgggcgggaacatcgcccggttctcccccggcatgagcatcctgtactcctgcgaccagggctacctgctggtgggggaggccctcctgctgtgcacccacgagggcacctggagccagccggccccccactgcaaggaggtcaactgctccagccccgcggacatggacgggatccagaagggcctcgagccccgcaagatgtaccagtacggggccgtggtgaccctggagtgcgaggacggctacatgctggagggctccccgcagagccagtgccagtccgaccaccagtggaacccccccctcgccgtctgccggagccgctccctggcccccgtgctgtgcgggatcgccgcgggcctcatcctgctgacgttcctcatcgtgatcaccctgtacgtcatcagcaagcaccgggcccgcaactactacaccgacaccagccagaaggaggccttccacctggaggcccgggaggtgtactccgtggacccgtacaaccccgccagctga

SEQ ID NO: 8090 - RNA, 3102 nt, synthetic construct
  misc_feature 1..3102: note = derived and/or modified sequence opt2 fromcomplement_system_component_CR2__Homo_sapiens__CCDS1478 .1
  source 1..3102: mol_type = other RNA
atgggcgccgccggcctcctcggcgtcttcctcgccctcgtcgcccccggcgtcctcggcatctcctgcggctcccccccccccatcctcaacggccgcatctcctactactccacccccatcgccgtcggcaccgtcatccgctactcctgctccggcaccttccgcctcatcggcgagaagtccctcctctgcatcaccaaggacaaggtcgacggcacctgggacaagcccgcccccaagtgcgagtacttcaacaagtactcctcctgccccgagcccatcgtccccggcggctacaagatccgcggctccaccccctaccgccacggcgactccgtcaccttcgcctgcaagaccaacttctccatgaacggcaacaagtccgtctggtgccaggccaacaacatgtggggccccacccgcctccccacctgcgtctccgtcttccccctcgagtgccccgccctccccatgatccacaacggccaccacacctccgagaacgtcggctccatcgcccccggcctctccgtcacctactcctgcgagtccggctacctcctcgtcggcgagaagatcatcaactgcctctcctccggcaagtggtccgccgtcccccccacctgcgaggaggcccgctgcaagtccctcggccgcttccccaacggcaaggtcaaggagccccccatcctccgcgtcggcgtcaccgccaacttcttctgcgacgagggctaccgcctccagggccccccctcctcccgctgcgtcatcgccggccagggcgtcgcctggaccaagatgcccgtctgcgaggagatcttctgcccctcccccccccccatcctcaacggccgccacatcggcaactccctcgccaacgtctcctacggctccatcgtcacctacacctgcgaccccgaccccgaggagggcgtcaacttcatcctcatcggcgagtccaccctccgctgcaccgtcgactcccagaagaccggcacctggtccggccccgccccccgctgcgagctctccacctccgccgtccagtgcccccacccccagatcctccgcggccgcatggtctccggccagaaggaccgctacacctacaacgacaccgtcatcttcgcctgcatgttcggcttcaccctcaagggctccaagcagatccgctgcaacgcccagggcacctgggagccctccgcccccgtctgcgagaaggagtgccaggccccccccaacatcctcaacggccagaaggaggaccgccacatggtccgcttcgaccccggcacctccatcaagtactcctgcaaccccggctacgtcctcgtcggcgaggagtccatccagtgcacctccgagggcgtctggaccccccccgtcccccagtgcaaggtcgccgcctgcgaggccaccggccgccagctcctcaccaagccccagcaccagttcgtccgccccgacgtcaactcctcctgcggcgagggctacaagctctccggctccgtctaccaggagtgccagggcaccatcccctggttcatggagatccgcctctgcaaggagatcacctgcccccccccccccgtcatctacaacggcgcccacaccggctcctccctcgaggacttcccctacggcaccaccgtcacctacacctgcaaccccggccccgagcgcggcgtcgagttctccctcatcggcgagtccaccatccgctgcacctccaacgaccaggagcgcggcacctggtccggccccgcccccctctgcaagctctccctcctcgccgtccagtgctcccacgtccacatcgccaacggctacaagatctccggcaaggaggccccctacttctacaacgacaccgtcaccttcaagtgctactccggcttcaccctcaagggctcctcccagatccgctgcaaggccgacaacacctgggaccccgagatccccgtctgcgagaaggagacctgccagcacgtccgccagtccctccaggagctccccgccggctcccgcgtcgagctcgtcaacacctcctgccaggacggctaccagctcaccggccacgcctaccagatgtgccaggacgccgagaacggcatctggttcaagaagatccccctctgcaaggtcatccactgccaccccccccccgtcatcgtcaacggcaagcacaccggcatgatggccgagaacttcctctacggcaacgaggtctcctacgagtgcgaccagggcttctacctcctcggcgagaagaagctccagtgccgctccgactccaagggccacggctcctggtccggcccctccccccagtgcctccgctccccccccgtcacccgctgccccaaccccgaggtcaagcacggctacaagctcaacaagacccactccgcctactcccacaacgacatcgtctacgtcgactgcaaccccggcttcatcatgaacggctcccgcgtcatccgctgccacaccgacaacacctgggtccccggcgtccccacctgcatcaagaaggccttcatcggctgcccccccccccccaagacccccaacggcaaccacaccggcggcaacatcgcccgcttctcccccggcatgtccatcctctactcctgcgaccagggctacctcctcgtcggcgaggccctcctcctctgcacccacgagggcacctggtcccagcccgccccccactgcaaggaggtcaactgctcctcccccgccgacatggacggcatccagaagggcctcgagccccgcaagatgtaccagtacggcgccgtcgtcaccctcgagtgcgaggacggctacatgctcgagggctccccccagtcccagtgccagtccgaccaccagtggaacccccccctcgccgtctgccgctcccgctccctcgcccccgtcctctgcggcatcgccgccggcctcatcctcctcaccttcctcatcgtcatcaccctctacgtcatctccaagcaccgcgcccgcaactactacaccgacacctcccagaaggaggccttccacctcgaggcccgcgaggtctactccgtcgacccctacaaccccgcctcctga

SEQ ID NO: 8091 - RNA, 3102 nt, synthetic construct
  misc_feature 1..3102: note = derived and/or modified sequence opt3 fromcomplement_system_component_CR2__Homo_sapiens__CCDS1478 .1
  source 1..3102: mol_type = other RNA
atgggcgccgctgggctgctcggagtgttccttgcactggtcgcccccggtgttttgggcatcagctgcgggtcccctccaccgattttaaacggaagaatatcttactattcaacccccatcgcggtgggcacagtaattaggtacagttgtagcggtacttttcggctgatcggggagaagtccctactctgcattacgaaagacaaggtggatggaacctgggacaaacctgctccaaagtgtgaatatttcaataaatactcttcgtgccccgagcctatcgtcccaggcggctataagatacgcgggtcaacaccctaccgacacggagatagcgtgacttttgcctgtaagaccaacttcagtatgaatggtaacaaatccgtttggtgccaggcaaataacatgtggggccctacacgtctgccaacctgtgtgtctgtctttccgcttgaatgccccgccctgcctatgatccataatgggcaccatactagcgagaacgtgggatccattgctccaggcttgtcagtaacatatagttgtgaaagcggttacctcctggttggggagaagatcattaattgcctgtcttccggaaaatggtcagcagtgccccctacctgtgaggaagccagatgcaagagcctcggcaggttcccaaacggcaaagtcaaggagcccccgatcttacgggtgggggtgacggctaactttttctgcgacgaaggataccgcctgcaaggtcctcccagttctagatgtgtcatagccggccagggggttgcgtggactaagatgccagtgtgcgaggagatcttttgtccttccccaccacccattcttaatggaaggcacattggcaatagcttggcaaacgtatcgtatggttctatcgtgacctacacatgcgatcctgacccagaagagggggtcaatttcatcctgattggcgaatccactctacggtgtaccgtggattcacagaaaacaggaacctggagtggcccggctccccgctgcgagctcagcacgtccgctgttcagtgtcctcatccacaaatactgcgagggagaatggtgtctggacagaaggacaggtatacttacaacgatacagtcatctttgcctgcatgttcggttttacccttaaaggcagcaagcagattcggtgtaacgcacaggggacttgggaaccctcagctcctgtgtgcgagaaagagtgtcaagccccacccaatatcctgaacggacagaaggaagaccgtcacatggtacgcttcgatccgggcacaagtataaaatattcctgcaatcctggttacgttttggtgggggaggaaagcattcagtgcacctctgagggcgtctggacgccacccgtgcctcagtgtaaggtcgcggcctgcgaagcaaccggaagacaactcctgacaaagccccagcaccagttcgtgaggccagacgttaactcaagttgtggcgaggggtataaattaagcggatccgtgtaccaagagtgccagggtactatcccttggtttatggaaatccggctgtgtaaggagattacctgcccacccccgcctgtaatctacaatggcgctcatacagggtcttcgctcgaagatttcccctatggaactaccgtcacatacacctgtaacccaggccccgagcgaggtgtggaatttagccttattggggagtccactatacgctgcacgtcaaatgaccaggagagaggcacatggagtggacctgccccactgtgtaaattgtctctactggctgttcagtgcagccacgtgcatatcgccaacggctataagatttccgggaaagaagcaccctacttctataatgacaccgtcacttttaagtgttactcaggattcaccctcaagggcagctctcaaatcaggtgcaaagccgataacacatgggaccctgagatcccggtgtgcgaaaaggagacctgtcagcacgtacggcagtccctgcaggagcttccagctggtagtcgcgtggaactggttaatactagctgccaagatgggtatcagttgacaggacacgcgtaccagatgtgtcaggacgcagagaacggcatttggtttaaaaagatacccctctgcaaagtcatccattgtcaccctccacccgtgattgtgaatggtaagcatacgggcatgatggccgaaaacttcctgtacgggaatgaggtctcttatgaatgcgatcaaggattttacttactgggcgagaagaaactacagtgtagatccgactcaaaggggcacggaagttggagcggcccttcgccgcagtgcctcaggtcccctcccgttacccgttgtcccaaccccgaggtgaaacatggttataagctgaacaaaactcactctgcttacagccacaatgatatcgtgtatgtagactgcaacccagggttcattatgaatggatcacgggtcatccgatgtcatacagataacacctgggtgcctggcgttcccacatgcataaagaaggcctttatcggttgcccaccgcctcccaaaactccaaatggcaaccacaccgggggaaatattgcaagattcagtcccggcatgtccatcctttactcttgtgaccaggggtatttgctggtgggagaagccctcctgctttgcacgcatgagggcacctggagccaacctgctccacactgtaaggaagtcaactgctcctcacccgccgatatggacggtattcagaaagggctggagcctaggaagatgtaccagtacggagcagtggttacattggaatgtgaggacggctatatgctcgagggtagcccgcaaagtcagtgccagtctgatcaccagtggaatccacccctggcggtgtgtcgctcccggagcttagctcctgtactgtgcggcatcgccgcagggctaatactcctgacttttcttattgtcatcaccttgtacgtgatttcgaaacatagagccaggaactattacacagacacttcacaaaaggaagccttccacctggaggcccgcgaagtgtattctgtcgatccctacaatccagcaagttga

SEQ ID NO: 8092 - RNA, 3102 nt, synthetic construct
  misc_feature 1..3102: note = derived and/or modified sequence opt4 fromcomplement_system_component_CR2__Homo_sapiens__CCDS1478 .1
  source 1..3102: mol_type = other RNA
atgggcgccgccggcctgctgggcgtgttcctggccctggtggcccccggcgtgctgggcatcagctgcggcagccccccccccatcctgaacggcagaatcagctactacagcacccccatcgccgtgggcaccgtgatcagatacagctgcagcggcaccttcagactgatcggcgagaagagcctgctgtgcatcaccaaggacaaggtggacggcacctgggacaagcccgcccccaagtgcgagtacttcaacaagtacagcagctgccccgagcccatcgtgcccggcggctacaagatcagaggcagcaccccctacagacacggcgacagcgtgaccttcgcctgcaagaccaacttcagcatgaacggcaacaagagcgtgtggtgccaggccaacaacatgtggggccccaccagactgcccacctgcgtgagcgtgttccccctggagtgccccgccctgcccatgatccacaacggccaccacaccagcgagaacgtgggcagcatcgcccccggcctgagcgtgacctacagctgcgagagcggctacctgctggtgggcgagaagatcatcaactgcctgagcagcggcaagtggagcgccgtgccccccacctgcgaggaggccagatgcaagagcctgggcagattccccaacggcaaggtgaaggagccccccatcctgagagtgggcgtgaccgccaacttcttctgcgacgagggctacagactgcagggcccccccagcagcagatgcgtgatcgccggccagggcgtggcctggaccaagatgcccgtgtgcgaggagatcttctgccccagccccccccccatcctgaacggcagacacatcggcaacagcctggccaacgtgagctacggcagcatcgtgacctacacctgcgaccccgaccccgaggagggcgtgaacttcatcctgatcggcgagagcaccctgagatgcaccgtggacagccagaagaccggcacctggagcggccccgcccccagatgcgagctgagcaccagcgccgtgcagtgcccccacccccagatcctgagaggcagaatggtgagcggccagaaggacagatacacctacaacgacaccgtgatcttcgcctgcatgttcggcttcaccctgaagggcagcaagcagatcagatgcaacgcccagggcacctgggagcccagcgcccccgtgtgcgagaaggagtgccaggccccccccaacatcctgaacggccagaaggaggacagacacatggtgagattcgaccccggcaccagcatcaagtacagctgcaaccccggctacgtgctggtgggcgaggagagcatccagtgcaccagcgagggcgtgtggaccccccccgtgccccagtgcaaggtggccgcctgcgaggccaccggcagacagctgctgaccaagccccagcaccagttcgtgagacccgacgtgaacagcagctgcggcgagggctacaagctgagcggcagcgtgtaccaggagtgccagggcaccatcccctggttcatggagatcagactgtgcaaggagatcacctgcccccccccccccgtgatctacaacggcgcccacaccggcagcagcctggaggacttcccctacggcaccaccgtgacctacacctgcaaccccggccccgagagaggcgtggagttcagcctgatcggcgagagcaccatcagatgcaccagcaacgaccaggagagaggcacctggagcggccccgcccccctgtgcaagctgagcctgctggccgtgcagtgcagccacgtgcacatcgccaacggctacaagatcagcggcaaggaggccccctacttctacaacgacaccgtgaccttcaagtgctacagcggcttcaccctgaagggcagcagccagatcagatgcaaggccgacaacacctgggaccccgagatccccgtgtgcgagaaggagacctgccagcacgtgagacagagcctgcaggagctgcccgccggcagcagagtggagctggtgaacaccagctgccaggacggctaccagctgaccggccacgcctaccagatgtgccaggacgccgagaacggcatctggttcaagaagatccccctgtgcaaggtgatccactgccaccccccccccgtgatcgtgaacggcaagcacaccggcatgatggccgagaacttcctgtacggcaacgaggtgagctacgagtgcgaccagggcttctacctgctgggcgagaagaagctgcagtgcagaagcgacagcaagggccacggcagctggagcggccccagcccccagtgcctgagaagcccccccgtgaccagatgccccaaccccgaggtgaagcacggctacaagctgaacaagacccacagcgcctacagccacaacgacatcgtgtacgtggactgcaaccccggcttcatcatgaacggcagcagagtgatcagatgccacaccgacaacacctgggtgcccggcgtgcccacctgcatcaagaaggccttcatcggctgcccccccccccccaagacccccaacggcaaccacaccggcggcaacatcgccagattcagccccggcatgagcatcctgtacagctgcgaccagggctacctgctggtgggcgaggccctgctgctgtgcacccacgagggcacctggagccagcccgccccccactgcaaggaggtgaactgcagcagccccgccgacatggacggcatccagaagggcctggagcccagaaagatgtaccagtacggcgccgtggtgaccctggagtgcgaggacggctacatgctggagggcagcccccagagccagtgccagagcgaccaccagtggaacccccccctggccgtgtgcagaagcagaagcctggcccccgtgctgtgcggcatcgccgccggcctgatcctgctgaccttcctgatcgtgatcaccctgtacgtgatcagcaagcacagagccagaaactactacaccgacaccagccagaaggaggccttccacctggaggccagagaggtgtacagcgtggacccctacaaccccgccagctga

SEQ ID NO: 8093 - RNA, 3102 nt, synthetic construct
  misc_feature 1..3102: note = derived and/or modified sequence opt5 fromcomplement_system_component_CR2__Homo_sapiens__CCDS1478 .1
  source 1..3102: mol_type = other RNA
atgggcgccgctgggctgctcggagtgttcctggcccttgtcgcgcccggcgttctggggatcagctgcggatcccctccgcccattctcaacggcagaatctcttactatagcacccctattgctgtggggacagtgatccggtactcctgttctggaacgtttcgcctgattggcgaaaagagccttctgtgcatcaccaaagacaaggtcgatggcacatgggacaaacccgcccctaagtgtgagtatttcaataaatactcctcttgccccgagcctatcgtgcccgggggatataagattagaggcagcaccccctaccggcacggggattccgttacatttgcctgtaagaccaacttcagcatgaatggaaacaaatctgtgtggtgccaggctaataacatgtggggccctacacgcctccccacctgtgtctccgtgtttcctctggaatgccccgccctgccgatgatccataatgggcaccatacgagcgagaacgttggatctattgctcctggcctctccgtgacctatagctgtgaatctggctacctgcttgtcggggagaagatcattaattgcctgtccagcggaaaatggtccgccgtgccccctacatgtgaggaagcgagatgcaagtctctcggccggttccccaacgggaaagtgaaggagccccctatcctgcgcgtcggagttaccgccaactttttctgcgacgaaggctacagacttcaagggccgcccagctcccggtgtgtgattgctggacagggcgtggcctggacaaagatgcctgtctgcgaggagatcttttgtcccagccctcccccgatcctgaatggccgccacattggaaattctctcgctaacgtgtcctatgggagcatcgttacctacacgtgcgatcctgaccccgaagagggcgtgaatttcattctgatcggggaatctacactgagatgtaccgtcgatagccagaaaacaggaacctggtccggccctgcgccccggtgcgagctctctaccagcgccgtgcagtgtcctcatccccaaattctgcgcgggagaatggtttccggccagaaggaccggtatacatacaacgatacggtgatctttgcctgcatgttcggatttacccttaaaggcagcaagcagatccgctgtaacgctcaggggacatgggaaccgtctgcccctgtctgcgagaaagagtgtcaagctccgcccaatattctgaacggacagaaggaagacagacacatggtgcggttcgatcctggcacctccatcaaatatagctgcaatccggggtacgtcctcgtgggagaggaatctattcagtgcacatccgagggcgtttggacgccccctgtgccccagtgtaaggtcgccgcctgcgaagctaccgggagacaactgcttacaaagcctcagcaccagttcgtgcgccccgacgttaacagctcctgtggcgagggatataaactgtctggcagcgtgtaccaagagtgccaggggaccatcccttggtttatggaaattcggctctgtaaggagattacctgcccgccccctcccgtcatctacaatggagcgcatacaggctcctctctggaagatttcccttatgggaccacagtgacgtacacctgtaaccccggaccggagagaggcgtggaatttagcctgatcggggagtccacaatccgctgcaccagcaatgaccaggagcggggcacatggtctggacctgctcccctctgtaaactgtcccttctggccgttcagtgcagccacgtccatattgccaacggctataagatctctgggaaagaagccccttacttctataatgacaccgtgacgtttaagtgttactccggattcaccctcaagggcagctctcaaattagatgcaaagctgataacacatgggaccccgagatccccgtgtgcgaaaaggagacctgtcagcacgtccgccagagcctgcaggagcttcctgccgggtcccgggtggaactggttaatacaagctgccaagatggatatcagctcaccggccacgcgtaccagatgtgtcaggacgctgagaacgggatttggtttaaaaagatcccgctgtgcaaagtgatccattgtcatccccctcccgtcattgtgaatggcaagcacacgggaatgatggccgaaaacttcctgtacggcaatgaggtttcttatgaatgcgatcaagggttttacctcctgggagagaagaaacttcagtgtagatccgacagcaagggccacgggtcctggtctggacctagcccccagtgcctgcgctcccctccggtgacacggtgtcccaaccctgaggtcaaacatggctataagctcaacaaaacccactctgcctacagccacaatgatatcgtgtatgttgactgcaaccccggcttcattatgaatgggtccagagtgatccgctgtcatacagataacacctgggtccctggagtgccgacctgcattaagaaggcttttatcggctgtccccctcctcccaaaacacccaatgggaaccacacgggaggcaatatcgcccggttctctcccgggatgagcattctgtactcctgcgaccagggatatctgcttgtgggcgaagctctcctgctgtgcacccatgagggcacatggagccaacctgccccgcactgtaaggaagtcaactgttcttcccccgcggatatggacgggatccagaaaggactcgagcctagaaagatgtaccagtacggcgccgttgtgaccctggaatgcgaggacgggtatatgcttgagggaagcccccaatctcagtgccagtccgatcaccagtggaatcctcccctggctgtgtgtcggagccgctctctcgccccggtcctgtgcggcattgctgccgggctgatccttctcacatttctgattgtgatcaccctgtacgttatctccaaacatagagcgcggaactattacacggacacaagccaaaaggaagccttccacctcgaggctagagaagtgtattccgtcgatccttacaatcccgccagctga

SEQ ID NO: 8094 - protein, 712 aa, synthetic construct
  REGION 1..712: note = complement_system_component_CR3__Homo_sapiens__D3DSM0
MLGLRPPLLALVGLLSLGCVLSQECTKFKVSSCRECIESGPGCTWCQKLNFTGPGDPDSIRCDTRPQLLMRGCAADDIMDPTSLAETQEDHNGGQKQLSPQKVTLYLRPGFGSFVDKTVLPFVNTHPDKLRNPCPNKEKECQPPFAFRHVLKLTNNSNQFQTEVGKQLISGNLDAPEGGLDAMMQVAACPEEIGWRNVTRLLVFATDDGFHFAGDGKLGAILTPNDGRCHLEDNLYKRSNEFDYPSVGQLAHKLAENNIQPIFAVTSRMVKTYEKLTEIIPKSAVGELSEDSSNVVHLIKNAYNKLSSRVFLDHNALPDTLKVTYDSFCSNGVTHRNQPRGDCDGVQINVPITFQVKVTATECIQEQSFVIRALGFTDIVTVQVLPQCECRCRDQSRDRSLCHGKGFLECGICRCDTGYIGKNCECQTQGRSSQELEGSCRKDNNSIICSGLGDCVCGQCLCHTSDVPGKLIYGQYCECDTINCERYNGQVCGGPGRGLCFCGKCRCHPGFEGSACQCERTTEGCLNPRRVECSGRGRCRCNVCECHSGYQLPLCQECPGCPSPCGKYISCAECLKFEKGPFGKNCSAACPGLQLSNNPVKGRTCKERDSEGCWVAYTLEQQDGMDRYLIYVDESRECVAGPNIAAIVGGTVAGIVLIGILLLVIWKALIHLSDLREYRRFEKEKLKSQWNNDNPLFKSATTTVMNPKFAES

SEQ ID NO: 8095 - RNA, 2139 nt, synthetic construct
  misc_feature 1..2139: note complement_system_component_CR3__Homo_sapiens__EAX09383
  source 1..2139: mol_type = other RNA
atgctgggcctgcgccccccactgctcgccctggtggggctgctctccctcgggtgcgtcctctctcaggagtgcacgaagttcaaggtcagcagctgccgggaatgcatcgagtcggggcccggctgcacctggtgccagaagctgaacttcacagggccgggggatcctgactccattcgctgcgacacccggccacagctgctcatgaggggctgtgcggctgacgacatcatggaccccacaagcctcgctgaaacccaggaagaccacaatgggggccagaagcagctgtccccacaaaaagtgacgctttacctgcgaccaggcttcgggtccttcgtggacaagaccgtgctgccgttcgtgaacacgcaccctgataagctgcgaaacccatgccccaacaaggagaaagagtgccagcccccgtttgccttcaggcacgtgctgaagctgaccaacaactccaaccagtttcagaccgaggtcgggaagcagctgatttccggaaacctggatgcacccgagggtgggctggacgccatgatgcaggtcgccgcctgcccggaggaaatcggctggcgcaacgtcacgcggctgctggtgtttgccactgatgacggcttccatttcgcgggcgacgggaagctgggcgccatcctgacccccaacgacggccgctgtcacctggaggacaacttgtacaagaggagcaacgaattcgactacccatcggtgggccagctggcgcacaagctggctgaaaacaacatccagcccatcttcgcggtgaccagtaggatggtgaagacctacgagaaactcaccgagatcatccccaagtcagccgtgggggagctgtctgaggactccagcaatgtggtccatctcattaagaatgcttacaataaactctcctccagggtcttcctggatcacaacgccctccccgacaccctgaaagtcacctacgactccttctgcagcaatggagtgacgcacaggaaccagcccagaggtgactgtgatggcgtgcagatcaatgtcccgatcaccttccaggtgaaggtcacggccacagagtgcatccaggagcagtcgtttgtcatccgggcgctgggcttcacggacatagtgaccgtgcaggtccttccccagtgtgagtgccggtgccgggaccagagcagagaccgcagcctctgccatggcaagggcttcttggagtgcggcatctgcaggtgtgacactggctacattgggaaaaactgtgagtgccagacacagggccggagcagccaggagctggaaggaagctgccggaaggacaacaactccatcatctgctcagggctgggggactgtgtctgcgggcagtgcctgtgccacaccagcgacgtccccggcaagctgatatacgggcagtactgcgagtgtgacaccatcaactgtgagcgctacaacggccaggtctgcggcggcccggggagggggctctgcttctgcgggaagtgccgctgccacccgggctttgagggctcagcgtgccagtgcgagaggaccactgagggctgcctgaacccgcggcgtgttgagtgtagtggtcgtggccggtgccgctgcaacgtatgcgagtgccattcaggctaccagctgcctctgtgccaggagtgccccggctgcccctcaccctgtggcaagtacatctcctgcgccgagtgcctgaagttcgaaaagggcccctttgggaagaactgcagcgcggcgtgtccgggcctgcagctgtcgaacaaccccgtgaagggcaggacctgcaaggagagggactcagagggctgctgggtggcctacacgctggagcagcaggacgggatggaccgctacctcatctatgtggatgagagccgagagtgtgtggcaggccccaacatcgccgccatcgtcgggggcaccgtggcaggcatcgtgctgatcggcattctcctgctggtcatctggaaggctctgatccacctgagcgacctccgggagtacaggcgctttgagaaggagaagctcaagtcccagtggaacaatgataatccccttttcaagagcgccaccacgacggtcatgaaccccaagtttgctgagagttag

SEQ ID NO: 8096 - RNA, 2139 nt, synthetic construct
  misc_feature 1..2139: note = derived and/or modified sequence opt1 fromcomplement_system_component_CR3__Homo_sapiens__EAX09383
  source 1..2139: mol_type = other RNA
atgctgggcctccggcccccgctgctggccctcgtggggctgctgagcctcggctgcgtcctgtcccaggagtgcaccaagttcaaggtgagctcctgccgcgagtgcatcgagagcgggcccggctgcacctggtgccagaagctgaacttcacggggcccggcgaccccgactccatccgctgcgacacccggccgcagctcctgatgcgcggctgcgccgcggacgacatcatggaccccaccagcctggccgagacccaggaggaccacaacgggggccagaagcagctcagcccccagaaggtgacgctgtacctgcggcccgggttcggctccttcgtcgacaagaccgtgctcccgttcgtgaacacccaccccgacaagctgcgcaacccctgccccaacaaggagaaggagtgccagccgcccttcgccttccggcacgtcctgaagctcaccaacaactccaaccagttccagacggaggtggggaagcagctgatcagcggcaacctggacgcccccgagggcgggctcgacgccatgatgcaggtcgcggcctgccccgaggagatcggctggcgcaacgtgacccggctgctggtgttcgccaccgacgacgggttccacttcgccggcgacggcaagctcggggcgatcctgaccccgaacgacggccgctgccacctggaggacaacctctacaagcggtccaacgagttcgactaccccagcgtggggcagctggcccacaagctggccgagaacaacatccagcccatcttcgccgtcacgtcccgcatggtgaagacctacgagaagctcaccgagatcatccccaagagcgccgtgggcgagctgtccgaggacagctccaacgtcgtgcacctgatcaagaacgcgtacaacaagctcagctcccgggtgttcctggaccacaacgccctgccggacaccctcaaggtcacgtacgacagcttctgcagcaacggggtgacccaccgcaaccagccccggggcgactgcgacggcgtgcagatcaacgtccccatcaccttccaggtgaaggtgaccgccacggagtgcatccaggagcagtccttcgtcatccgcgccctggggttcaccgacatcgtgaccgtccaggtgctgccccagtgcgagtgccggtgccgcgaccagagccgggaccgctccctctgccacggcaaggggttcctggagtgcggcatctgccggtgcgacaccgggtacatcggcaagaactgcgagtgccagacgcagggccgcagctcccaggagctggaggggagctgccgcaaggacaacaactccatcatctgcagcggcctcggggactgcgtgtgcggccagtgcctgtgccacacctccgacgtcccggggaagctgatctacggccagtactgcgagtgcgacaccatcaactgcgagcggtacaacggccaggtgtgcgggggccccgggcgcggcctctgcttctgcggcaagtgccggtgccaccccgggttcgagggcagcgcctgccagtgcgagcgcaccacggaggggtgcctgaacccccggcgcgtggagtgctccggccgggggcgctgccggtgcaacgtctgcgagtgccacagcggctaccagctgccgctctgccaggagtgccccggctgcccctccccgtgcgggaagtacatcagctgcgcggagtgcctgaagttcgagaagggccccttcgggaagaactgctccgccgcctgccccggcctgcagctgagcaacaaccccgtgaaggggcggacctgcaaggagcgcgactccgagggctgctgggtggcctacaccctcgagcagcaggacggcatggaccgctacctgatctacgtcgacgagagccgggagtgcgtggccgggccgaacatcgcggccatcgtgggcgggaccgtcgccggcatcgtgctgatcgggatcctcctgctggtgatctggaaggccctcatccacctgtccgacctgcgcgagtaccggcgcttcgagaaggagaagctcaagagccagtggaacaacgacaaccccctgttcaagagcgccacgaccaccgtcatgaaccccaagttcgcggagtcctga

SEQ ID NO: 8097 - RNA, 2139 nt, synthetic construct
  misc_feature 1..2139: note = derived and/or modified sequence opt2 fromcomplement_system_component_CR3__Homo_sapiens__EAX09383
  source 1..2139: mol_type = other RNA
atgctcggcctccgcccccccctcctcgccctcgtcggcctcctctccctcggctgcgtcctctcccaggagtgcaccaagttcaaggtctcctcctgccgcgagtgcatcgagtccggccccggctgcacctggtgccagaagctcaacttcaccggccccggcgaccccgactccatccgctgcgacacccgcccccagctcctcatgcgcggctgcgccgccgacgacatcatggaccccacctccctcgccgagacccaggaggaccacaacggcggccagaagcagctctccccccagaaggtcaccctctacctccgccccggcttcggctccttcgtcgacaagaccgtcctccccttcgtcaacacccaccccgacaagctccgcaacccctgccccaacaaggagaaggagtgccagccccccttcgccttccgccacgtcctcaagctcaccaacaactccaaccagttccagaccgaggtcggcaagcagctcatctccggcaacctcgacgcccccgagggcggcctcgacgccatgatgcaggtcgccgcctgccccgaggagatcggctggcgcaacgtcacccgcctcctcgtcttcgccaccgacgacggcttccacttcgccggcgacggcaagctcggcgccatcctcacccccaacgacggccgctgccacctcgaggacaacctctacaagcgctccaacgagttcgactacccctccgtcggccagctcgcccacaagctcgccgagaacaacatccagcccatcttcgccgtcacctcccgcatggtcaagacctacgagaagctcaccgagatcatccccaagtccgccgtcggcgagctctccgaggactcctccaacgtcgtccacctcatcaagaacgcctacaacaagctctcctcccgcgtcttcctcgaccacaacgccctccccgacaccctcaaggtcacctacgactccttctgctccaacggcgtcacccaccgcaaccagccccgcggcgactgcgacggcgtccagatcaacgtccccatcaccttccaggtcaaggtcaccgccaccgagtgcatccaggagcagtccttcgtcatccgcgccctcggcttcaccgacatcgtcaccgtccaggtcctcccccagtgcgagtgccgctgccgcgaccagtcccgcgaccgctccctctgccacggcaagggcttcctcgagtgcggcatctgccgctgcgacaccggctacatcggcaagaactgcgagtgccagacccagggccgctcctcccaggagctcgagggctcctgccgcaaggacaacaactccatcatctgctccggcctcggcgactgcgtctgcggccagtgcctctgccacacctccgacgtccccggcaagctcatctacggccagtactgcgagtgcgacaccatcaactgcgagcgctacaacggccaggtctgcggcggccccggccgcggcctctgcttctgcggcaagtgccgctgccaccccggcttcgagggctccgcctgccagtgcgagcgcaccaccgagggctgcctcaacccccgccgcgtcgagtgctccggccgcggccgctgccgctgcaacgtctgcgagtgccactccggctaccagctccccctctgccaggagtgccccggctgcccctccccctgcggcaagtacatctcctgcgccgagtgcctcaagttcgagaagggccccttcggcaagaactgctccgccgcctgccccggcctccagctctccaacaaccccgtcaagggccgcacctgcaaggagcgcgactccgagggctgctgggtcgcctacaccctcgagcagcaggacggcatggaccgctacctcatctacgtcgacgagtcccgcgagtgcgtcgccggccccaacatcgccgccatcgtcggcggcaccgtcgccggcatcgtcctcatcggcatcctcctcctcgtcatctggaaggccctcatccacctctccgacctccgcgagtaccgccgcttcgagaaggagaagctcaagtcccagtggaacaacgacaaccccctcttcaagtccgccaccaccaccgtcatgaaccccaagttcgccgagtcctga

SEQ ID NO: 8098 - RNA, 2139 nt, synthetic construct
  misc_feature 1..2139: note = derived and/or modified sequence opt3 fromcomplement_system_component_CR3__Homo_sapiens__EAX09383
  source 1..2139: mol_type = other RNA
atgctgggcctcagaccccctcttctggccttggtggggttactgagcctaggatgcgtcctctcccaggagtgtaccaagttcaaagtttcttcatgcagggaatgtatcgagagtggtccaggctgcacatggtgtcaaaagctgaactttactgggccgggagaccccgatagcattcggtgcgacacgcgccctcagcttctgatgcgaggctgtgctgcagatgacataatggatccaacctccttggccgaaacacaggaggaccacaatggtgggcagaaacaactctctccccagaaggtgactctgtacctgcgtcctggattcggctcgtttgtagataaaaccgtgctcccattcgtcaacacacatcccgacaagttaagaaatccttgcccaaacaaggaaaaagagtgtcagccgccctttgcgttcaggcacgtgctgaaacttaccaataactcaaatcagtttcaaactgaggttggcaagcagttgatcagcgggaacctggatgctcctgaaggaggtctagacgccatgatgcaagtggcagcctgcccagaggaaattggctggcggaatgtcacacgcctcctggtgttcgctaccgatgacgggtttcatttcgcaggagatggcaaacttggtgccatcctgacgcccaacgacgggagatgtcacttggaggacaatctctataagaggagtaacgagtttgattacccttccgtaggacagctggctcataagttagccgaaaataacattcagccaatcttcgcggttacttctcggatggtgaagacctatgagaaactgacagaaataatccccaagagcgcagtcggcgagctctccgaagactcaagtaatgtggtgcaccttattaaaaacgcctacaacaagctgagctctcgcgtctttttggatcacaatgctctaccggacactctgaaagttacctatgattccttctgctcaaacggcgtgacacatcgaaatcagcctagaggggactgcgatggagtacagatcaacgtgcccattaccttccaagtcaaggtgacggccactgagtgtatccaggagcagagctttgttataagggcactcggtttcacagacattgtgaccgtccaggtgctgccacaatgcgaatgtcggtgccgtgatcagagtcgcgacagatctctttgtcacggcaaagggtttctggagtgcggaatctgtaggtgcgatactggctacattggtaagaattgtgaatgccagacacaggggcggtccagccaagagttggaaggctcgtgtcgaaaggacaacaattctatcatctgctccggactcggcgactgcgtatgtgggcagtgcctgtgtcatacctcagatgttcctggaaaattaatttatggtcagtactgcgagtgtgacacgataaactgcgagcgctacaatggccaggtgtgtgggggacccggcagaggtctgtgcttctgtgggaagtgtaggtgccacccaggctttgaaggaagtgcttgccaatgcgagcggaccacagaaggctgtctaaacccccgcagagtcgagtgcagcgggaggggacgttgtcggtgcaatgtgtgtgaatgccactccggttatcagctccctctgtgtcaggagtgcccaggctgtccgtctccctgcgggaaatacatcagctgtgccgagtgccttaagttcgaaaaaggaccttttggcaagaactgctcagcggcctgtccaggtttgcagctgagtaataaccccgtcaaggggcgaacttgcaaagagagagattccgaaggctgttgggtggcatataccctcgagcaacaggacggaatggataggtacctgatttatgttgacgagagccgcgaatgcgtggctggccctaatatcgccgctatagtagggggaacagtcgccggcattgtgcttatcggtatcctgttgctcgttatttggaaggcactgatccatttatctgatctgcgggagtacagaaggttcgaaaaagagaagctaaaatcacagtggaacaacgacaatccactctttaagagtgccactaccacagtgatgaaccccaagttcgctgaaagctga

SEQ ID NO: 8099 - RNA, 2139 nt, synthetic construct
  misc_feature 1..2139: note = derived and/or modified sequence opt4 fromcomplement_system_component_CR3__Homo_sapiens__EAX09383
  source 1..2139: mol_type = other RNA
atgctgggcctgagaccccccctgctggccctggtgggcctgctgagcctgggctgcgtgctgagccaggagtgcaccaagttcaaggtgagcagctgcagagagtgcatcgagagcggccccggctgcacctggtgccagaagctgaacttcaccggccccggcgaccccgacagcatcagatgcgacaccagaccccagctgctgatgagaggctgcgccgccgacgacatcatggaccccaccagcctggccgagacccaggaggaccacaacggcggccagaagcagctgagcccccagaaggtgaccctgtacctgagacccggcttcggcagcttcgtggacaagaccgtgctgcccttcgtgaacacccaccccgacaagctgagaaacccctgccccaacaaggagaaggagtgccagccccccttcgccttcagacacgtgctgaagctgaccaacaacagcaaccagttccagaccgaggtgggcaagcagctgatcagcggcaacctggacgcccccgagggcggcctggacgccatgatgcaggtggccgcctgccccgaggagatcggctggagaaacgtgaccagactgctggtgttcgccaccgacgacggcttccacttcgccggcgacggcaagctgggcgccatcctgacccccaacgacggcagatgccacctggaggacaacctgtacaagagaagcaacgagttcgactaccccagcgtgggccagctggcccacaagctggccgagaacaacatccagcccatcttcgccgtgaccagcagaatggtgaagacctacgagaagctgaccgagatcatccccaagagcgccgtgggcgagctgagcgaggacagcagcaacgtggtgcacctgatcaagaacgcctacaacaagctgagcagcagagtgttcctggaccacaacgccctgcccgacaccctgaaggtgacctacgacagcttctgcagcaacggcgtgacccacagaaaccagcccagaggcgactgcgacggcgtgcagatcaacgtgcccatcaccttccaggtgaaggtgaccgccaccgagtgcatccaggagcagagcttcgtgatcagagccctgggcttcaccgacatcgtgaccgtgcaggtgctgccccagtgcgagtgcagatgcagagaccagagcagagacagaagcctgtgccacggcaagggcttcctggagtgcggcatctgcagatgcgacaccggctacatcggcaagaactgcgagtgccagacccagggcagaagcagccaggagctggagggcagctgcagaaaggacaacaacagcatcatctgcagcggcctgggcgactgcgtgtgcggccagtgcctgtgccacaccagcgacgtgcccggcaagctgatctacggccagtactgcgagtgcgacaccatcaactgcgagagatacaacggccaggtgtgcggcggccccggcagaggcctgtgcttctgcggcaagtgcagatgccaccccggcttcgagggcagcgcctgccagtgcgagagaaccaccgagggctgcctgaaccccagaagagtggagtgcagcggcagaggcagatgcagatgcaacgtgtgcgagtgccacagcggctaccagctgcccctgtgccaggagtgccccggctgccccagcccctgcggcaagtacatcagctgcgccgagtgcctgaagttcgagaagggccccttcggcaagaactgcagcgccgcctgccccggcctgcagctgagcaacaaccccgtgaagggcagaacctgcaaggagagagacagcgagggctgctgggtggcctacaccctggagcagcaggacggcatggacagatacctgatctacgtggacgagagcagagagtgcgtggccggccccaacatcgccgccatcgtgggcggcaccgtggccggcatcgtgctgatcggcatcctgctgctggtgatctggaaggccctgatccacctgagcgacctgagagagtacagaagattcgagaaggagaagctgaagagccagtggaacaacgacaaccccctgttcaagagcgccaccaccaccgtgatgaaccccaagttcgccgagagctga

SEQ ID NO: 8100 - RNA, 2139 nt, synthetic construct
  misc_feature 1..2139: note = derived and/or modified sequence opt5 fromcomplement_system_component_CR3__Homo_sapiens__EAX09383
  source 1..2139: mol_type = other RNA
atgctgggcctcagaccccctctgcttgccctggtggggctcctgagccttggatgcgtcctgtcccaggagtgtaccaagttcaaagtttctagctgccgggaatgtatcgagtccggcccggggtgcacatggtgtcaaaagctcaactttacgggacccggcgaccctgattctattcgctgcgacaccagaccccagctgctgatgcgggggtgtgctgccgatgacatcatggatcctacaagcctcgcggaaacccaggaggaccacaatggaggccagaaacaactgtctccccagaaggtgacactttacctgcgccctggcttcgggtcctttgtggataaaaccgtcctcccgttcgtgaacacacatcccgacaagctgagaaatccttgccccaacaaggaaaaagagtgtcagcctccctttgctttccggcacgttcttaagctgaccaataacagcaatcagtttcaaacggaggtgggaaaacagctcatttccggcaacctggatgccccggaagggggactggacgccatgatgcaggtcgctgcctgccctgaggaaatcggctggcgcaatgtgaccagactcctggttttcgctacagatgacgggtttcatttcgccggagatggcaaacttggcgcgattctgacccccaacgacgggcggtgtcacctcgaggacaatctgtataagcgcagcaacgagtttgattacccttctgtgggacagcttgcccataagctggctgaaaataacatccaacccatcttcgccgtcacatccagaatggtgaagacctatgagaaactcacggaaattatccccaagagcgctgtgggcgagctgtctgaagactccagcaatgtcgttcacctgattaaaaacgcctacaacaagctctcttcccgggtgtttctggatcacaatgcgcttcctgacacactgaaagtgacctatgatagcttctgctccaacggggtcacacatcgcaatcagccgagaggagactgcgatggcgtgcagatcaacgttcccattaccttccaagtgaaggtcaccgccacagagtgtatccaggagcagtcttttgtgattcgggctctcgggttcacggacatcgttaccgtgcaggtcctgcctcaatgcgaatgtcgctgcagagatcagagccgggacagatccctttgtcacggaaaaggctttctggagtgcggcatctgtcgctgcgatacagggtacattggaaagaattgtgaatgccagacccagggccggagctctcaagagctcgaagggtcctgtagaaaggacaacaatagcatcatttgctctggactgggcgactgcgtgtgtgggcagtgcctgtgtcatacaagcgatgtccccggcaaactcatctatggacagtactgcgagtgtgacaccattaactgcgagcgctacaatggccaggtgtgtgggggacctggccgggggctgtgcttctgtggaaagtgcagatgtcaccccggctttgaagggtccgcctgccaatgcgagcgcacgacagaaggctgtcttaacccgcggagagttgagtgctctggacgcggccggtgtagatgcaatgtgtgtgaatgccacagcgggtatcagctgcctctctgtcaggagtgccccggatgtccttccccctgcggcaaatacatcagctgtgctgagtgcctgaagttcgaaaaagggccttttggaaagaactgctctgccgcctgtcccggcctgcagctttccaataacccggtcaaggggcggacctgcaaagagcgcgatagcgaaggctgttgggtggcttataccctcgagcaacaggacggaatggatagatacctgatctatgttgacgagtctcgggaatgcgtggcgggccctaatattgccgctatcgtcgggggaacagtggccggcattgtgctgatcgggattctcctgcttgttatctggaaggccctgatccatctctccgatctgcgcgagtacagacggttcgaaaaagagaagctgaaaagccagtggaacaacgacaatcccctttttaagtccgctaccacaacggtcatgaaccccaagttcgccgaatcttga

SEQ ID NO: 8101 - protein, 769 aa, synthetic construct
  REGION 1..769: note = complement_system_component_CR3__Homo_sapiens__P05107
MLGLRPPLLALVGLLSLGCVLSQECTKFKVSSCRECIESGPGCTWCQKLNFTGPGDPDSIRCDTRPQLLMRGCAADDIMDPTSLAETQEDHNGGQKQLSPQKVTLYLRPGQAAAFNVTFRRAKGYPIDLYYLMDLSYSMLDDLRNVKKLGGDLLRALNEITESGRIGFGSFVDKTVLPFVNTHPDKLRNPCPNKEKECQPPFAFRHVLKLTNNSNQFQTEVGKQLISGNLDAPEGGLDAMMQVAACPEEIGWRNVTRLLVFATDDGFHFAGDGKLGAILTPNDGRCHLEDNLYKRSNEFDYPSVGQLAHKLAENNIQPIFAVTSRMVKTYEKLTEIIPKSAVGELSEDSSNVVQLIKNAYNKLSSRVFLDHNALPDTLKVTYDSFCSNGVTHRNQPRGDCDGVQINVPITFQVKVTATECIQEQSFVIRALGFTDIVTVQVLPQCECRCRDQSRDRSLCHGKGFLECGICRCDTGYIGKNCECQTQGRSSQELEGSCRKDNNSIICSGLGDCVCGQCLCHTSDVPGKLIYGQYCECDTINCERYNGQVCGGPGRGLCFCGKCRCHPGFEGSACQCERTTEGCLNPRRVECSGRGRCRCNVCECHSGYQLPLCQECPGCPSPCGKYISCAECLKFEKGPFGKNCSAACPGLQLSNNPVKGRTCKERDSEGCWVAYTLEQQDGMDRYLIYVDESRECVAGPNIAAIVGGTVAGIVLIGILLLVIWKALIHLSDLREYRRFEKEKLKSQWNNDNPLFKSATTTVMNPKFAES

SEQ ID NO: 8102 - RNA, 2310 nt, synthetic construct
  misc_feature 1..2310: note complement_system_component_CR3__Homo_sapiens__CAB90553
  source 1..2310: mol_type = other RNA
atgctgggcctgcgccccccactgctcgccctggtggggctgctctccctcgggtgcgtcctctctcaggagtgcacgaagttcaaggtcagcagctgccgggaatgcatcgagtcggggcccggctgcacctggtgccagaagctgaacttcacagggccgggggatcctgactccattcgctgcgacacccggccacagctgctcatgaggggctgtgcggctgacgacatcatggaccccacaagcctcgctgaaacccaggaagaccacaatgggggccagaagcagctgtccccacaaaaagtgacgctttacctgcgaccaggccaggcagcagcgttcaacgtgaccttccggcgggccaagggctaccccatcgacctgtactatctgatggacctctcctactccatgcttgatgacctcaggaatgtcaagaagctaggtggcgacctgctccgggccctcaacgagatcaccgagtccggccgcattggcttcgggtccttcgtggacaagaccgtgctgccgttcgtgaacacgcaccctgataagctgcgaaacccatgccccaacaaggagaaagagtgccagcccccgtttgccttcaggcacgtgctgaagctgaccaacaactccaaccagtttcagaccgaggtcgggaagcagctgatttccggaaacctggatgcacccgagggtgggctggacgccatgatgcaggtcgccgcctgcccggaggaaatcggctggcgcaacgtcacgcggctgctggtgtttgccactgatgacggcttccatttcgcgggcgacgggaagctgggcgccatcctgacccccaacgacggccgctgtcacctggaggacaacttgtacaagaggagcaacgaattcgactacccatcggtgggccagctggcgcacaagctggctgaaaacaacatccagcccatcttcgcggtgaccagtaggatggtgaagacctacgagaaactcaccgagatcatccccaagtcagccgtgggggagctgtctgaggactccagcaatgtggtccaactcattaagaatgcttacaataaactctcctccagggtcttcctggatcacaacgccctccccgacaccctgaaagtcacctacgactccttctgcagcaatggagtgacgcacaggaaccagcccagaggtgactgtgatggcgtgcagatcaatgtcccgatcaccttccaggtgaaggtcacggccacagagtgcatccaggagcagtcgtttgtcatccgggcgctgggcttcacggacatagtgaccgtgcaggttcttccccagtgtgagtgccggtgccgggaccagagcagagaccgcagcctctgccatggcaagggcttcttggagtgcggcatctgcaggtgtgacactggctacattgggaaaaactgtgagtgccagacacagggccggagcagccaggagctggaaggaagctgccggaaggacaacaactccatcatctgctcagggctgggggactgtgtctgcgggcagtgcctgtgccacaccagcgacgtccccggcaagctgatatacgggcagtactgcgagtgtgacaccatcaactgtgagcgctacaacggccaggtctgcggcggcccggggagggggctctgcttctgcgggaagtgccgctgccacccgggctttgagggctcagcgtgccagtgcgagaggaccactgagggctgcctgaacccgcggcgtgttgagtgtagtggtcgtggccggtgccgctgcaacgtatgcgagtgccattcaggctaccagctgcctctgtgccaggagtgccccggctgcccctcaccctgtggcaagtacatctcctgcgccgagtgcctgaagttcgaaaagggcccctttgggaagaactgcagcgcggcgtgtccgggcctgcagctgtcgaacaaccccgtgaagggcaggacctgcaaggagagggactcagagggctgctgggtggcctacacgctggagcagcaggacgggatggaccgctacctcatctatgtggatgagagccgagagtgtgtggcaggccccaacatcgccgccatcgtcgggggcaccgtggcaggcatcgtgctgatcggcattctcctgctggtcatctggaaggctctgatccacctgagcgacctccgggagtacaggcgctttgagaaggagaagctcaagtcccagtggaacaatgataatccccttttcaagagcgccaccacgacggtcatgaaccccaagtttgctgagagttag

SEQ ID NO: 8103 - RNA, 2310 nt, synthetic construct
  misc_feature 1..2310: note = derived and/or modified sequence opt1 fromcomplement_system_component_CR3__Homo_sapiens__CAB90553
  source 1..2310: mol_type = other RNA
atgctgggcctccggcccccgctgctggccctcgtggggctgctgagcctcggctgcgtcctgtcccaggagtgcaccaagttcaaggtgagctcctgccgcgagtgcatcgagagcgggcccggctgcacctggtgccagaagctgaacttcacggggcccggcgaccccgactccatccgctgcgacacccggccgcagctcctgatgcgcggctgcgccgcggacgacatcatggaccccaccagcctggccgagacccaggaggaccacaacgggggccagaagcagctcagcccccagaaggtgacgctgtacctgcggcccgggcaggccgccgccttcaacgtcaccttccgccgggcgaagggctacccgatcgacctctactacctgatggacctgtcctactccatgctcgacgacctgcgcaacgtgaagaagctcgggggcgacctgctgcgggccctgaacgagatcaccgagagcggccgcatcgggttcggctccttcgtggacaagaccgtcctccccttcgtgaacacgcaccccgacaagctgcggaacccctgcccgaacaaggagaaggagtgccagccgcccttcgccttccgccacgtgctgaagctcaccaacaacagcaaccagttccagaccgaggtcgggaagcagctgatctccggcaacctggacgcccccgagggcgggctcgacgcgatgatgcaggtcgccgcctgccccgaggagatcggctggcggaacgtgacccgcctgctggtgttcgccacggacgacgggttccacttcgccggcgacgggaagctcggcgcgatcctgacccccaacgacggccggtgccacctggaggacaacctctacaagcgcagcaacgagttcgactacccctccgtggggcagctggcccacaagctggccgagaacaacatccagcccatcttcgccgtgaccagccggatggtcaagacctacgagaagctcacggagatcatcccgaagtccgccgtgggcgagctgagcgaggactccagcaacgtggtccagctgatcaagaacgcgtacaacaagctcagctcccgcgtgttcctggaccacaacgccctgcccgacaccctcaaggtgacctacgacagcttctgctccaacggggtcacccaccggaaccagccccgcggcgactgcgacggggtgcagatcaacgtgcccatcacgttccaggtcaaggtgaccgccaccgagtgcatccaggagcagagcttcgtcatccgggccctgggcttcaccgacatcgtgacggtgcaggtcctgccgcagtgcgagtgccgctgccgcgaccagtcccgggaccgcagcctctgccacggcaaggggttcctggagtgcggcatctgccggtgcgacaccgggtacatcggcaagaactgcgagtgccagacccaggggcgctccagccaggagctggagggctcctgccggaaggacaacaacagcatcatctgctccggcctgggggactgcgtgtgcggccagtgcctctgccacaccagcgacgtgcccgggaagctgatctacggccagtactgcgagtgcgacacgatcaactgcgagcgctacaacggccaggtctgcgggggccccgggcggggcctgtgcttctgcgggaagtgccgctgccaccccggcttcgagggctccgcctgccagtgcgagcggaccaccgaggggtgcctcaacccgcgccgggtggagtgcagcggccgcgggcggtgccgctgcaacgtgtgcgagtgccactccggctaccagctgcccctgtgccaggagtgccccgggtgcccgagcccctgcggcaagtacatctcctgcgcggagtgcctcaagttcgagaagggccccttcgggaagaactgcagcgccgcctgccccggcctgcagctgtccaacaacccggtcaaggggcggacctgcaaggagcgcgacagcgagggctgctgggtggcctacacgctcgagcagcaggacgggatggaccggtacctgatctacgtggacgagagccgcgagtgcgtcgccggccccaacatcgcggccatcgtgggcgggaccgtggccggcatcgtcctgatcgggatcctcctgctggtgatctggaaggccctcatccacctgtccgacctgcgggagtaccgccgcttcgagaaggagaagctcaagagccagtggaacaacgacaaccccctgttcaagtccgcgaccaccacggtgatgaaccccaagttcgccgagagctga

SEQ ID NO: 8104 - RNA, 2310 nt, synthetic construct
  misc_feature 1..2310: note = derived and/or modified sequence opt2 fromcomplement_system_component_CR3__Homo_sapiens__CAB90553
  source 1..2310: mol_type = other RNA
atgctcggcctccgcccccccctcctcgccctcgtcggcctcctctccctcggctgcgtcctctcccaggagtgcaccaagttcaaggtctcctcctgccgcgagtgcatcgagtccggccccggctgcacctggtgccagaagctcaacttcaccggccccggcgaccccgactccatccgctgcgacacccgcccccagctcctcatgcgcggctgcgccgccgacgacatcatggaccccacctccctcgccgagacccaggaggaccacaacggcggccagaagcagctctccccccagaaggtcaccctctacctccgccccggccaggccgccgccttcaacgtcaccttccgccgcgccaagggctaccccatcgacctctactacctcatggacctctcctactccatgctcgacgacctccgcaacgtcaagaagctcggcggcgacctcctccgcgccctcaacgagatcaccgagtccggccgcatcggcttcggctccttcgtcgacaagaccgtcctccccttcgtcaacacccaccccgacaagctccgcaacccctgccccaacaaggagaaggagtgccagccccccttcgccttccgccacgtcctcaagctcaccaacaactccaaccagttccagaccgaggtcggcaagcagctcatctccggcaacctcgacgcccccgagggcggcctcgacgccatgatgcaggtcgccgcctgccccgaggagatcggctggcgcaacgtcacccgcctcctcgtcttcgccaccgacgacggcttccacttcgccggcgacggcaagctcggcgccatcctcacccccaacgacggccgctgccacctcgaggacaacctctacaagcgctccaacgagttcgactacccctccgtcggccagctcgcccacaagctcgccgagaacaacatccagcccatcttcgccgtcacctcccgcatggtcaagacctacgagaagctcaccgagatcatccccaagtccgccgtcggcgagctctccgaggactcctccaacgtcgtccagctcatcaagaacgcctacaacaagctctcctcccgcgtcttcctcgaccacaacgccctccccgacaccctcaaggtcacctacgactccttctgctccaacggcgtcacccaccgcaaccagccccgcggcgactgcgacggcgtccagatcaacgtccccatcaccttccaggtcaaggtcaccgccaccgagtgcatccaggagcagtccttcgtcatccgcgccctcggcttcaccgacatcgtcaccgtccaggtcctcccccagtgcgagtgccgctgccgcgaccagtcccgcgaccgctccctctgccacggcaagggcttcctcgagtgcggcatctgccgctgcgacaccggctacatcggcaagaactgcgagtgccagacccagggccgctcctcccaggagctcgagggctcctgccgcaaggacaacaactccatcatctgctccggcctcggcgactgcgtctgcggccagtgcctctgccacacctccgacgtccccggcaagctcatctacggccagtactgcgagtgcgacaccatcaactgcgagcgctacaacggccaggtctgcggcggccccggccgcggcctctgcttctgcggcaagtgccgctgccaccccggcttcgagggctccgcctgccagtgcgagcgcaccaccgagggctgcctcaacccccgccgcgtcgagtgctccggccgcggccgctgccgctgcaacgtctgcgagtgccactccggctaccagctccccctctgccaggagtgccccggctgcccctccccctgcggcaagtacatctcctgcgccgagtgcctcaagttcgagaagggccccttcggcaagaactgctccgccgcctgccccggcctccagctctccaacaaccccgtcaagggccgcacctgcaaggagcgcgactccgagggctgctgggtcgcctacaccctcgagcagcaggacggcatggaccgctacctcatctacgtcgacgagtcccgcgagtgcgtcgccggccccaacatcgccgccatcgtcggcggcaccgtcgccggcatcgtcctcatcggcatcctcctcctcgtcatctggaaggccctcatccacctctccgacctccgcgagtaccgccgcttcgagaaggagaagctcaagtcccagtggaacaacgacaaccccctcttcaagtccgccaccaccaccgtcatgaaccccaagttcgccgagtcctga

SEQ ID NO: 8105 - RNA, 2310 nt, synthetic construct
  misc_feature 1..2310: note = derived and/or modified sequence opt3 fromcomplement_system_component_CR3__Homo_sapiens__CAB90553
  source 1..2310: mol_type = other RNA
atgctgggcctcagaccccctcttctggccttggtggggttactgagcctaggatgcgtcctctcccaggagtgtaccaagttcaaagtttcttcatgcagggaatgtatcgagagtggtccaggctgcacatggtgtcaaaagctgaactttactgggccgggagaccccgatagcattcggtgcgacacgcgccctcagcttctgatgcgaggctgtgctgcagatgacataatggatccaacctccttggccgaaacacaggaggaccacaatggtgggcagaaacaactctctccccagaaggtgactctgtacctgcgtcctggacaggcggctgccttcaacgtaacctttagaagggcaaaaggctatccaatcgatctctactatttaatggacctgtcgtactcaatgcttgatgacttgcggaatgtgaagaagctgggcggggatctactccgcgccctgaacgaaattacagagagcggaagaatcggtttcggcagttttgtcgacaaaaccgtgcttcccttcgttaatactcatcctgataagctgaggaacccatgcccgaataaagagaaggaatgtcagcccccttttgctttccggcacgtgttgaaactcacaaacaattccaaccaatttcagaccgaggtcgggaagcagctgatttctggaaatttagacgcaccagaaggcggtctggacgccatgatgcaagtggctgcctgccccgaggagatcgggtggcgcaacgtaacgcgactccttgttttcgcgactgatgacggatttcatttcgcaggcgatggcaagctgggggccatattgacccctaatgacggaagatgtcacctagaagataacctgtataaaaggagcaatgagtttgactacccatccgtgggtcagctcgctcataagctggccgaaaacaacatccagcccattttcgcagtcacatcacggatggtgaaaacttatgagaaacttaccgaaatcattccgaagagtgctgtgggcgagctgagcgaggattcttccaatgtcgttcagttgatcaagaacgcctacaataaactctcaagccgtgtgttcctggaccacaacgcgttacctgatacactgaaggtaacctacgacagtttttgctctaatggggtgacgcaccgcaaccaacccagaggagattgcgacggcgtccagataaatgtgccaattactttccaggttaaggtgacagccaccgaatgtatccaggagcaatcctttgtcattagggcactaggtttcactgacatcgtgacagtacaggttctccctcagtgcgaatgtcggtgccgagatcagagccgcgacagatcgctgtgtcatgggaaaggctttcttgagtgcggaatctgtaggtgcgataccggctatattgggaagaactgtgaatgccaaacgcagggacggtcttcccaggagttggagggttcatgtcgcaaagacaataacagtataatctgcagcggcctgggggattgcgtgtgtggacagtgcctctgtcacacctccgacgtccccggcaagctgatttacggtcaatattgcgaatgtgatacaatcaattgcgagagatacaacggccaggtgtgtgggggaccaggcagggggctttgcttctgtggaaaatgccgttgtcatcccggttttgaaggctctgcttgccagtgcgagcggactaccgaagggtgtctgaatcctcgaagagtcgagtgcagcggaaggggccgctgtcggtgcaacgtgtgtgagtgccactcaggttatcagttgccactctgtcaagaatgcccggggtgtcccagtccttgcggcaagtacatatcctgtgccgagtgcctgaagttcgaaaaaggaccatttggcaagaattgcagcgctgcctgtcccgggttacagctgtctaacaaccctgttaaaggaagaacatgcaaggagagggactcagagggctgttgggtggcatatactctagaacagcaagatggtatggaccgctacctcatttacgtagatgagagtcgagaatgcgtcgccgggccaaatatcgctgcgatcgtgggaggcaccgttgcaggtattgtgctgatcggcattcttttgctggtcatatggaaagccctcatccacctgagcgacttacgggagtatcgtagattcgaaaaggagaagctgaaatcccagtggaacaatgataaccccctttttaagtctgctacaaccactgtgatgaatccgaaattcgccgagtcgtga

SEQ ID NO: 8106 - RNA, 2310 nt, synthetic construct
  misc_feature 1..2310: note = derived and/or modified sequence opt4 fromcomplement_system_component_CR3__Homo_sapiens__CAB90553
  source 1..2310: mol_type = other RNA
atgctgggcctgagaccccccctgctggccctggtgggcctgctgagcctgggctgcgtgctgagccaggagtgcaccaagttcaaggtgagcagctgcagagagtgcatcgagagcggccccggctgcacctggtgccagaagctgaacttcaccggccccggcgaccccgacagcatcagatgcgacaccagaccccagctgctgatgagaggctgcgccgccgacgacatcatggaccccaccagcctggccgagacccaggaggaccacaacggcggccagaagcagctgagcccccagaaggtgaccctgtacctgagacccggccaggccgccgccttcaacgtgaccttcagaagagccaagggctaccccatcgacctgtactacctgatggacctgagctacagcatgctggacgacctgagaaacgtgaagaagctgggcggcgacctgctgagagccctgaacgagatcaccgagagcggcagaatcggcttcggcagcttcgtggacaagaccgtgctgcccttcgtgaacacccaccccgacaagctgagaaacccctgccccaacaaggagaaggagtgccagccccccttcgccttcagacacgtgctgaagctgaccaacaacagcaaccagttccagaccgaggtgggcaagcagctgatcagcggcaacctggacgcccccgagggcggcctggacgccatgatgcaggtggccgcctgccccgaggagatcggctggagaaacgtgaccagactgctggtgttcgccaccgacgacggcttccacttcgccggcgacggcaagctgggcgccatcctgacccccaacgacggcagatgccacctggaggacaacctgtacaagagaagcaacgagttcgactaccccagcgtgggccagctggcccacaagctggccgagaacaacatccagcccatcttcgccgtgaccagcagaatggtgaagacctacgagaagctgaccgagatcatccccaagagcgccgtgggcgagctgagcgaggacagcagcaacgtggtgcagctgatcaagaacgcctacaacaagctgagcagcagagtgttcctggaccacaacgccctgcccgacaccctgaaggtgacctacgacagcttctgcagcaacggcgtgacccacagaaaccagcccagaggcgactgcgacggcgtgcagatcaacgtgcccatcaccttccaggtgaaggtgaccgccaccgagtgcatccaggagcagagcttcgtgatcagagccctgggcttcaccgacatcgtgaccgtgcaggtgctgccccagtgcgagtgcagatgcagagaccagagcagagacagaagcctgtgccacggcaagggcttcctggagtgcggcatctgcagatgcgacaccggctacatcggcaagaactgcgagtgccagacccagggcagaagcagccaggagctggagggcagctgcagaaaggacaacaacagcatcatctgcagcggcctgggcgactgcgtgtgcggccagtgcctgtgccacaccagcgacgtgcccggcaagctgatctacggccagtactgcgagtgcgacaccatcaactgcgagagatacaacggccaggtgtgcggcggccccggcagaggcctgtgcttctgcggcaagtgcagatgccaccccggcttcgagggcagcgcctgccagtgcgagagaaccaccgagggctgcctgaaccccagaagagtggagtgcagcggcagaggcagatgcagatgcaacgtgtgcgagtgccacagcggctaccagctgcccctgtgccaggagtgccccggctgccccagcccctgcggcaagtacatcagctgcgccgagtgcctgaagttcgagaagggccccttcggcaagaactgcagcgccgcctgccccggcctgcagctgagcaacaaccccgtgaagggcagaacctgcaaggagagagacagcgagggctgctgggtggcctacaccctggagcagcaggacggcatggacagatacctgatctacgtggacgagagcagagagtgcgtggccggccccaacatcgccgccatcgtgggcggcaccgtggccggcatcgtgctgatcggcatcctgctgctggtgatctggaaggccctgatccacctgagcgacctgagagagtacagaagattcgagaaggagaagctgaagagccagtggaacaacgacaaccccctgttcaagagcgccaccaccaccgtgatgaaccccaagttcgccgagagctga

SEQ ID NO: 8107 - RNA, 2310 nt, synthetic construct
  misc_feature 1..2310: note = derived and/or modified sequence opt5 fromcomplement_system_component_CR3__Homo_sapiens__CAB90553
  source 1..2310: mol_type = other RNA
atgctgggactcagaccccctctgcttgccctggtggggctcctgagccttggatgcgtcctgtcccaggagtgtaccaagttcaaagtttctagctgccgggaatgtatcgagtccggcccggggtgcacatggtgtcaaaagctcaactttacgggacccggcgaccctgattctattcgctgcgacaccagaccccagctgctgatgcgggggtgtgctgccgatgacatcatggatcctacaagcctcgcggaaacccaggaggaccacaatggaggccagaaacaactgagcccccagaaggtgacactttacctgcgccctggccaggctgccgccttcaacgtgacctttagacgggctaaagggtatccgattgatctctactatctgatggacctttcttacagcatgctggatgacctccgcaatgtcaagaagctgggaggcgatctgctcagagccctgaacgaaatcacagagtccgggcggattggattcggcagctttgtggacaaaaccgttcttcccttcgtgaatacgcatcctgataagctgcgcaacccctgccctaataaagagaaggaatgtcagcccccgtttgctttcagacacgtcctcaaactgaccaacaattctaaccaatttcagacagaggtggggaagcagcttatctccggaaatctggacgcccctgaaggcggcctcgacgcgatgatgcaggttgccgcttgccccgaggagatcgggtggcggaacgtgacccgcctgctggtcttcgccacagatgacggatttcatttcgctggcgatgggaagctcggagccattctgacccctaatgacggcagatgtcaccttgaagataacctgtataaacggagcaatgagtttgactacccctctgtggggcaactcgcgcataagctggccgaaaacaacatccagcccattttcgctgtgacgtcccgcatggtcaaaacatatgagaaacttaccgaaatcattcctaagagcgccgttggagagctgtctgaggattccagcaatgtggtgcagctcatcaagaacgcttacaataaactgtcctctagagtcttcctggaccacaacgccctcccggatacactgaaggtgacctacgacagcttttgctccaatggcgttacccaccggaaccaacccagaggcgattgcgacggggtgcagattaatgtccctatcacattccaggtgaaggttacggccaccgaatgtatccaggagcaatcctttgtgattcgcgctcttggattcacagacatcgtcaccgtgcaggtcctgccccagtgcgaatgtcggtgcagagatcagtctcgcgaccggtccctctgtcatggcaaagggtttctggagtgcggaatttgtagatgcgatacaggctatatcgggaagaactgtgaatgccaaacccagggccgcagctctcaggagctggagggaagctgtcggaaagacaataactccattatctgctctggccttggggattgcgtgtgtggacagtgcctctgtcacacgagcgacgttcctggcaagctgatctacgggcaatattgcgaatgtgatacaattaattgcgagagatacaacggacaggtgtgtggcgggcccggccgcggactgtgcttctgtggcaaatgccggtgtcatccggggtttgaaggatccgcgtgccagtgcgagagaaccaccgaaggctgtctcaatcctcgccgggtcgagtgcagcgggagaggacggtgtcgctgcaacgtgtgtgagtgccactctggctatcagctgcccctttgtcaagaatgccctgggtgtccctccccttgcggcaagtacatcagctgtgccgagtgcctgaagttcgaaaaaggaccctttggcaagaattgctctgctgcctgtccggggctccagctgtccaacaaccctgttaaaggaagaacatgcaaggagcgggacagcgagggctgttgggtggcctataccctggaacagcaagatgggatggacagataccttatttacgtcgatgagtcccgcgaatgcgtggctggacccaatatcgccgcgattgtgggcgggacagttgctggcatcgtcctcatcggcattctgctgctcgtgatctggaaagccctgattcacctttctgacctgcgggagtatagacgcttcgaaaaggagaagctcaaaagccagtggaacaatgataaccccctgtttaagtccgccacgaccacagtgatgaatcctaaattcgctgagtcttga

SEQ ID NO: 8108 - protein, 699 aa, synthetic construct
  REGION 1..699: note complement_system_component_MASP-1__Homo_sapiens__P48740
MRWLLLYYALCFSLSKASAHTVELNNMFGQIQSPGYPDSYPSDSEVTWNITVPDGFRIKLYFMHFNLESSYLCEYDYVKVETEDQVLATFCGRETTDTEQTPGQEVVLSPGSFMSITFRSDFSNEERFTGFDAHYMAVDVDECKEREDEELSCDHYCHNYIGGYYCSCRFGYILHTDNRTCRVECSDNLFTQRTGVITSPDFPNPYPKSSECLYTIELEEGFMVNLQFEDIFDIEDHPEVPCPYDYIKIKVGPKVLGPFCGEKAPEPISTQSHSVLILFHSDNSGENRGWRLSYRAAGNECPELQPPVHGKIEPSQAKYFFKDQVLVSCDTGYKVLKDNVEMDTFQIECLKDGTWSNKIPTCKIVDCRAPGELEHGLITFSTRNNLTTYKSEIKYSCQEPYYKMLNNNTGIYTCSAQGVWMNKVLGRSLPTCLPVCGLPKFSRKLMARIFNGRPAQKGTTPWIAMLSHLNGQPFCGGSLLGSSWIVTAAHCLHQSLDPEDPTLRDSDLLSPSDFKIILGKHWRLRSDENEQHLGVKHTTLHPQYDPNTFENDVALVELLESPVLNAFVMPICLPEGPQQEGAMVIVSGWGKQFLQRFPETLMEIEIPIVDHSTCQKAYAPLKKKVTRDMICAGEKEGGKDACAGDSGGPMVTLNRERGQWYLVGTVSWGDDCGKKDRYGVYSYIHHNKDWIQRVTGVRN

SEQ ID NO: 8109 - RNA, 2100 nt, synthetic construct
  misc_feature 1..2100: note complement_system_component_MASP-1__Homo_sapiens__CCDS33907 .1
  source 1..2100: mol_type = other RNA
atgaggtggctgcttctctattatgctctgtgcttctccctgtcaaaggcttcagcccacaccgtggagctaaacaatatgtttggccagatccagtcgcctggttatccagactcctatcccagtgattcagaggtgacttggaatatcactgtcccagatgggtttcggatcaagctttacttcatgcacttcaacttggaatcctcctacctttgtgaatatgactatgtgaaggtagaaactgaggaccaggtgctggcaaccttctgtggcagggagaccacagacacagagcagactcccggccaggaggtggtcctctcccctggctccttcatgtccatcactttccggtcagatttctccaatgaggagcgtttcacaggctttgatgcccactacatggctgtggatgtggacgagtgcaaggagagggaggacgaggagctgtcctgtgaccactactgccacaactacattggcggctactactgctcctgccgcttcggctacatcctccacacagacaacaggacctgccgagtggagtgcagtgacaacctcttcactcaaaggactggggtgatcaccagccctgacttcccaaacccttaccccaagagctctgaatgcctgtataccatcgagctggaggagggtttcatggtcaacctgcagtttgaggacatatttgacattgaggaccatcctgaggtgccctgcccctatgactacatcaagatcaaagttggtccaaaagttttggggcctttctgtggagagaaagccccagaacccatcagcacccagagccacagtgtcctgatcctgttccatagtgacaactcgggagagaaccggggctggaggctctcatacagggctgcaggaaatgagtgcccagagctacagcctcctgtccatgggaaaatcgagccctcccaagccaagtatttcttcaaagaccaagtgctcgtcagctgtgacacaggctacaaagtgctgaaggataatgtggagatggacacattccagattgagtgtctgaaggatgggacgtggagtaacaagattcccacctgtaaaattgtagactgtagagccccaggagagctggaacacgggctgatcaccttctctacaaggaacaacctcaccacatacaagtctgagatcaaatactcctgtcaggagccctattacaagatgctcaacaataacacaggtatatatacctgttctgcccaaggagtctggatgaataaagtattggggagaagcctacccacctgccttccagtgtgtgggctccccaagttctcccggaagctgatggccaggatcttcaatggacgcccagcccagaaaggcaccactccctggattgccatgctgtcacacctgaatgggcagcccttctgcggaggctcccttctaggctccagctggatcgtgaccgccgcacactgcctccaccagtcactcgatccggaagatccgaccctacgtgattcagacttgctcagcccttctgacttcaaaatcatcctgggcaagcattggaggctccggtcagatgaaaatgaacagcatctcggcgtcaaacacaccactctccacccccagtatgatcccaacacattcgagaatgacgtggctctggtggagctgttggagagcccagtgctgaatgccttcgtgatgcccatctgtctgcctgagggaccccagcaggaaggagccatggtcatcgtcagcggctgggggaagcagttcttgcaaaggttcccagagaccctgatggagattgaaatcccgattgttgaccacagcacctgccagaaggcttatgccccgctgaagaagaaagtgaccagggacatgatctgtgctggggagaaggaagggggaaaggacgcctgtgcgggtgactctggaggccccatggtgaccctgaatagagaaagaggccagtggtacctggtgggcactgtgtcctggggtgatgactgtgggaagaaggaccgctacggagtatactcttacatccaccacaacaaggactggatccagagggtcaccggagtgaggaactga

SEQ ID NO: 8110 - RNA, 2100 nt, synthetic construct
  misc_feature 1..2100: note = derived and/or modified sequence opt1 fromcomplement_system_component_MASP-1__Homo_sapiens__CCDS3 3907.1
  source 1..2100: mol_type = other RNA
atgcgctggctgctcctgtactacgccctgtgcttcagcctctccaaggccagcgcgcacaccgtggagctgaacaacatgttcggccagatccagtcccccgggtacccggacagctacccctccgacagcgaggtcacctggaacatcacggtgcccgacggcttccggatcaagctgtacttcatgcacttcaacctcgagtccagctacctgtgcgagtacgactacgtgaaggtcgagaccgaggaccaggtgctggccaccttctgcgggcgcgagaccacggacaccgagcagacccccggccaggaggtggtcctctccccggggagcttcatgtccatcaccttccggagcgacttctccaacgaggagcgcttcacgggcttcgacgcccactacatggccgtggacgtggacgagtgcaaggagcgggaggacgaggagctgagctgcgaccactactgccacaactacatcggcgggtactactgctcctgccgcttcggctacatcctgcacaccgacaaccggacctgccgcgtcgagtgcagcgacaacctcttcacccagcggacgggggtgatcacctcccccgacttccccaacccctaccccaagagctccgagtgcctgtacaccatcgagctggaggagggcttcatggtgaacctccagttcgaggacatcttcgacatcgaggaccaccccgaggtcccctgcccctacgactacatcaagatcaaggtggggccgaaggtgctgggccccttctgcggcgagaaggcccccgagcccatcagcacccagagccactccgtcctgatcctcttccacagcgacaactccggggagaaccgcggctggcggctgagctaccgcgcggccgggaacgagtgcccggagctgcagccgcccgtgcacggcaagatcgagccctcccaggccaagtacttcttcaaggaccaggtgctcgtcagctgcgacacgggctacaaggtgctgaaggacaacgtggagatggacaccttccagatcgagtgcctgaaggacgggacctggtccaacaagatcccgacctgcaagatcgtcgactgccgggcccccggcgagctcgagcacgggctgatcacgttcagcacccgcaacaacctgaccacctacaagtccgagatcaagtacagctgccaggagccctactacaagatgctcaacaacaacacgggcatctacacgtgctccgcgcagggggtgtggatgaacaaggtgctgggccggagcctgccgacctgcctccccgtctgcggcctgcccaagttctcccgcaagctgatggcccggatcttcaacgggcgccccgcccagaagggcaccaccccctggatcgccatgctcagccacctgaacgggcagccgttctgcggcgggtccctgctcggcagctcctggatcgtgaccgccgcgcactgcctgcaccagagcctggaccccgaggaccccaccctccgggactccgacctgctgagcccgagcgacttcaagatcatcctcggcaagcactggcgcctgcggtccgacgagaacgagcagcacctgggggtcaagcacaccacgctccacccccagtacgaccccaacaccttcgagaacgacgtggccctggtggagctgctcgagagccccgtcctgaacgccttcgtgatgccgatctgcctgcccgagggcccccagcaggagggggccatggtgatcgtctccggctgggggaagcagttcctgcagcgcttccccgagaccctcatggagatcgagatcccgatcgtggaccacagcacgtgccagaaggcctacgcgcccctgaagaagaaggtgacccgcgacatgatctgcgccggcgagaaggagggcgggaaggacgcctgcgccggcgactccgggggccccatggtcaccctgaaccgggagcgcggccagtggtacctcgtggggaccgtgagctggggcgacgactgcgggaagaaggaccggtacggcgtctactcctacatccaccacaacaaggactggatccagcgcgtgaccggggtgcggaactga

SEQ ID NO: 8111 - RNA, 2100 nt, synthetic construct
  misc_feature 1..2100: note = derived and/or modified sequence opt2 fromcomplement_system_component_MASP-1__Homo_sapiens__CCDS3 3907.1
  source 1..2100: mol_type = other RNA
atgcgctggctcctcctctactacgccctctgcttctccctctccaaggcctccgcccacaccgtcgagctcaacaacatgttcggccagatccagtcccccggctaccccgactcctacccctccgactccgaggtcacctggaacatcaccgtccccgacggcttccgcatcaagctctacttcatgcacttcaacctcgagtcctcctacctctgcgagtacgactacgtcaaggtcgagaccgaggaccaggtcctcgccaccttctgcggccgcgagaccaccgacaccgagcagacccccggccaggaggtcgtcctctcccccggctccttcatgtccatcaccttccgctccgacttctccaacgaggagcgcttcaccggcttcgacgcccactacatggccgtcgacgtcgacgagtgcaaggagcgcgaggacgaggagctctcctgcgaccactactgccacaactacatcggcggctactactgctcctgccgcttcggctacatcctccacaccgacaaccgcacctgccgcgtcgagtgctccgacaacctcttcacccagcgcaccggcgtcatcacctcccccgacttccccaacccctaccccaagtcctccgagtgcctctacaccatcgagctcgaggagggcttcatggtcaacctccagttcgaggacatcttcgacatcgaggaccaccccgaggtcccctgcccctacgactacatcaagatcaaggtcggccccaaggtcctcggccccttctgcggcgagaaggcccccgagcccatctccacccagtcccactccgtcctcatcctcttccactccgacaactccggcgagaaccgcggctggcgcctctcctaccgcgccgccggcaacgagtgccccgagctccagccccccgtccacggcaagatcgagccctcccaggccaagtacttcttcaaggaccaggtcctcgtctcctgcgacaccggctacaaggtcctcaaggacaacgtcgagatggacaccttccagatcgagtgcctcaaggacggcacctggtccaacaagatccccacctgcaagatcgtcgactgccgcgcccccggcgagctcgagcacggcctcatcaccttctccacccgcaacaacctcaccacctacaagtccgagatcaagtactcctgccaggagccctactacaagatgctcaacaacaacaccggcatctacacctgctccgcccagggcgtctggatgaacaaggtcctcggccgctccctccccacctgcctccccgtctgcggcctccccaagttctcccgcaagctcatggcccgcatcttcaacggccgccccgcccagaagggcaccaccccctggatcgccatgctctcccacctcaacggccagcccttctgcggcggctccctcctcggctcctcctggatcgtcaccgccgcccactgcctccaccagtccctcgaccccgaggaccccaccctccgcgactccgacctcctctccccctccgacttcaagatcatcctcggcaagcactggcgcctccgctccgacgagaacgagcagcacctcggcgtcaagcacaccaccctccacccccagtacgaccccaacaccttcgagaacgacgtcgccctcgtcgagctcctcgagtcccccgtcctcaacgccttcgtcatgcccatctgcctccccgagggcccccagcaggagggcgccatggtcatcgtctccggctggggcaagcagttcctccagcgcttccccgagaccctcatggagatcgagatccccatcgtcgaccactccacctgccagaaggcctacgcccccctcaagaagaaggtcacccgcgacatgatctgcgccggcgagaaggagggcggcaaggacgcctgcgccggcgactccggcggccccatggtcaccctcaaccgcgagcgcggccagtggtacctcgtcggcaccgtctcctggggcgacgactgcggcaagaaggaccgctacggcgtctactcctacatccaccacaacaaggactggatccagcgcgtcaccggcgtccgcaactga

SEQ ID NO: 8112 - RNA, 2100 nt, synthetic construct
  misc_feature 1..2100: note = derived and/or modified sequence opt3 fromcomplement_system_component_MASP-1__Homo_sapiens__CCDS3 3907.1
  source 1..2100: mol_type = other RNA
atgagatggctgctcctttactatgccctgtgcttcagcttgtccaaggcttctgcacacaccgtggagttaaacaatatgtttggccagatccaatcacccgggtaccctgacagttatccaagcgattccgaagtcacatggaacattactgttccggacggattcaggataaaactgtactttatgcatttcaatctagagtcttcgtatctctgtgaatacgattatgtgaaggtagagacggaagaccaggtgctggccaccttttgcggtcgggagacaactgataccgagcagacacccggccaggaagtcgtgctttcacctgggagcttcatgagtatcacctttcgctccgacttctctaacgaggaacgatttactggattcgatgcgcactacatggctgttgacgtggatgagtgtaaagagcgtgaagacgaggaactgagctgcgatcattactgtcacaattatattggcggttactattgctcctgtagatttgggtacatcttgcatacagacaacaggacctgccgggtcgagtgttcagataatctcttcacgcaacgcactggagtgattaccagtccagactttcccaacccttatccaaagagctctgaatgcctgtacacaatcgagctggaggaaggcttcatggtaaatctccagttcgaggacatatttgatatcgaagaccaccccgaggttccttgtccatatgattacattaaaatcaaggtgggcccgaaggtcttagggcccttctgcggagaaaaagcccctgagccaatttccactcagtcacacagcgtgctgatcctttttcatagtgacaactctggtgagaatagaggctggaggttgtcctaccgggcagccgggaacgaatgccccgagctgcagcctccagtgcacggaaagatagaacccagccaagctaaatatttctttaaggatcaggtcctagtttcgtgtgacaccggctacaaagtgctcaaggataatgtagagatggacacattccagattgaatgcctgaaggatggtacctggtctaacaaaatcccgacgtgtaagattgtggactgccgcgcacctggggagcttgagcatggactgatcactttttccacacgaaataacttgaccacttataaatcagaaatcaagtacagttgtcaggagccctattacaaaatgctcaacaataacacaggcatttatacctgcagcgcccaaggcgtctggatgaataaggtgctggggagatccttaccaacgtgtctgcctgtttgcggactccccaaattctctaggaaacttatggctcggatatttaacggtcgtccagcccagaagggcaccacaccctggatcgcgatgctgagccacttgaatgggcagcctttctgtggaggctcactactgggtagttcctggattgtgactgcagcccactgcctccatcaaagcctggatccagaagacccgacccttcgcgactctgatctgttgtcacccagtgactttaaaatcatactcgggaagcactggagactgaggagcgatgagaacgagcagcatttaggcgtcaaacacacaactctgcatcctcagtacgacccaaataccttcgaaaacgatgtggctctagtagagctcctggaatcccccgttcttaatgcctttgtgatgcctatttgtttgccagagggaccccagcaagaaggcgcaatggtcatcgtgtctgggtggggaaagcagttcctgcagcggttcccggagacactcatggagatcgaaattcctatcgtcgaccactcgacctgccagaaggcttacgccccactgaagaagaaagtgactcgagatatgatttgcgcgggtgagaaggaaggcgggaaagacgcctgtgcaggagatagcggcggtcccatggttacgcttaaccgcgagagagggcaatggtatctggtgggcacagtatcctggggagacgattgcggcaagaaagacaggtacggggtctattcatacatacaccataataaggattggatccagcgggtgaccggagttcgcaactga

SEQ ID NO: 8113 - RNA, 2100 nt, synthetic construct
  misc_feature 1..2100: note = derived and/or modified sequence opt4 fromcomplement_system_component_MASP-1__Homo_sapiens__CCDS3 3907.1
  source 1..2100: mol_type = other RNA
atgagatggctgctgctgtactacgccctgtgcttcagcctgagcaaggccagcgcccacaccgtggagctgaacaacatgttcggccagatccagagccccggctaccccgacagctaccccagcgacagcgaggtgacctggaacatcaccgtgcccgacggcttcagaatcaagctgtacttcatgcacttcaacctggagagcagctacctgtgcgagtacgactacgtgaaggtggagaccgaggaccaggtgctggccaccttctgcggcagagagaccaccgacaccgagcagacccccggccaggaggtggtgctgagccccggcagcttcatgagcatcaccttcagaagcgacttcagcaacgaggagagattcaccggcttcgacgcccactacatggccgtggacgtggacgagtgcaaggagagagaggacgaggagctgagctgcgaccactactgccacaactacatcggcggctactactgcagctgcagattcggctacatcctgcacaccgacaacagaacctgcagagtggagtgcagcgacaacctgttcacccagagaaccggcgtgatcaccagccccgacttccccaacccctaccccaagagcagcgagtgcctgtacaccatcgagctggaggagggcttcatggtgaacctgcagttcgaggacatcttcgacatcgaggaccaccccgaggtgccctgcccctacgactacatcaagatcaaggtgggccccaaggtgctgggccccttctgcggcgagaaggcccccgagcccatcagcacccagagccacagcgtgctgatcctgttccacagcgacaacagcggcgagaacagaggctggagactgagctacagagccgccggcaacgagtgccccgagctgcagccccccgtgcacggcaagatcgagcccagccaggccaagtacttcttcaaggaccaggtgctggtgagctgcgacaccggctacaaggtgctgaaggacaacgtggagatggacaccttccagatcgagtgcctgaaggacggcacctggagcaacaagatccccacctgcaagatcgtggactgcagagcccccggcgagctggagcacggcctgatcaccttcagcaccagaaacaacctgaccacctacaagagcgagatcaagtacagctgccaggagccctactacaagatgctgaacaacaacaccggcatctacacctgcagcgcccagggcgtgtggatgaacaaggtgctgggcagaagcctgcccacctgcctgcccgtgtgcggcctgcccaagttcagcagaaagctgatggccagaatcttcaacggcagacccgcccagaagggcaccaccccctggatcgccatgctgagccacctgaacggccagcccttctgcggcggcagcctgctgggcagcagctggatcgtgaccgccgcccactgcctgcaccagagcctggaccccgaggaccccaccctgagagacagcgacctgctgagccccagcgacttcaagatcatcctgggcaagcactggagactgagaagcgacgagaacgagcagcacctgggcgtgaagcacaccaccctgcacccccagtacgaccccaacaccttcgagaacgacgtggccctggtggagctgctggagagccccgtgctgaacgccttcgtgatgcccatctgcctgcccgagggcccccagcaggagggcgccatggtgatcgtgagcggctggggcaagcagttcctgcagagattccccgagaccctgatggagatcgagatccccatcgtggaccacagcacctgccagaaggcctacgcccccctgaagaagaaggtgaccagagacatgatctgcgccggcgagaaggagggcggcaaggacgcctgcgccggcgacagcggcggccccatggtgaccctgaacagagagagaggccagtggtacctggtgggcaccgtgagctggggcgacgactgcggcaagaaggacagatacggcgtgtacagctacatccaccacaacaaggactggatccagagagtgaccggcgtgagaaactga

SEQ ID NO: 8114 - RNA, 2100 nt, synthetic construct
  misc_feature 1..2100: note = derived and/or modified sequence opt5 fromcomplement_system_component_MASP-1__Homo_sapiens__CCDS3 3907.1
  source 1..2100: mol_type = other RNA
atgagatggctgctcctgtactatgccctttgcttcagcctgtccaaggcttctgcccacaccgtggagctcaacaatatgtttggccagatccaaagccccgggtaccctgactcctatccgtctgatagcgaagtcacatggaacattacggttcccgacggattccggatcaaactgtactttatgcatttcaatcttgagtcctcttatctgtgtgaatacgattatgtgaaggtggagaccgaagaccaggtcctcgcgacattttgcggccgcgagaccacagataccgagcagacacctgggcaggaagtggttctgagccccggatccttcatgagcattacctttagatctgacttctccaacgaggaacggtttacgggcttcgatgctcactacatggccgtggacgtcgatgagtgtaaagagcgcgaagacgaggaactgagctgcgatcattactgtcacaattatatcgggggatactattgctcttgtagatttggctacattctccataccgacaaccggacatgccgcgtggagtgttccgataatctgttcacccaaagaacaggcgttatcaccagccctgactttcccaacccttatccgaagtcttccgaatgcctttacacgatcgagctggaggaagggttcatggtgaatctccagttcgaggacatttttgatatcgaagaccaccccgaggtcccttgtccctatgattacattaaaatcaaggtgggacctaaggtgctgggccccttctgcggggaaaaagccccggagcctattagcacacagtcccactctgtccttatcctgtttcatagcgacaactccggagagaatcggggctggcgcctcagctacagagctgccgggaacgaatgccccgagctgcagcctcccgttcacggaaagattgaaccctctcaagctaaatatttctttaaggatcaggtgctggtgtcctgtgacaccggctacaaagtcctcaaggataatgtggagatggacacattccagatcgaatgcctgaaggatggcacctggagcaacaaaatccctacctgtaagattgttgactgccgggccccgggggagcttgagcatggactgatcacattttctacgcgcaataacctcaccacatataaaagcgaaattaagtactcctgtcaggagccctattacaaaatgctgaacaataacaccggcatctatacatgctctgcgcaaggggtgtggatgaataaggtccttggaagaagcctgcctacctgtctccccgtgtgcggcctgcctaaattctcccggaagctgatggcccgcatttttaacgggagacccgctcagaagggaacgacaccgtggatcgccatgctcagccacctgaatggccagcctttctgtggcgggtctcttctgggatccagctggatcgttaccgctgcccactgcctccatcaatctctggatcccgaagaccctacccttcgggactccgatctgctcagcccctccgactttaaaattatcctgggcaagcactggagactgcgctctgatgagaacgagcagcatctcggggtgaaacacacaaccctgcatcctcagtacgaccccaatacattcgaaaacgatgtcgcgcttgtggagctgctcgaaagcccggtcctgaatgcctttgtgatgcctatttgtctgcccgagggaccccagcaagaaggcgctatggttatcgtgtccgggtggggcaagcagttccttcagcggttccctgagacgctcatggagattgaaatcccgatcgtcgaccactctacctgccagaaagcctacgctcccctgaagaagaaagtgacaagagatatgatttgcgccggagagaaggaaggcgggaaagacgcctgtgctggagatagcggcgggcctatggttaccctgaaccgcgagcggggacaatggtatctcgtgggcacagtctcctggggcgacgattgcgggaagaaagacagatacggagtgtatagctacatccaccataataaggattggattcagcgcgtgaccggcgttcggaactga

SEQ ID NO: 8115 - protein, 686 aa, synthetic construct
  REGION 1..686: note complement_system_component_MASP-2__Homo_sapiens__O00187
MRLLTLLGLLCGSVATPLGPKWPEPVFGRLASPGFPGEYANDQERRWTLTAPPGYRLRLYFTHFDLELSHLCEYDFVKLSSGAKVLATLCGQESTDTERAPGKDTFYSLGSSLDITFRSDYSNEKPFTGFEAFYAAEDIDECQVAPGEAPTCDHHCHNHLGGFYCSCRAGYVLHRNKRTCSALCSGQVFTQRSGELSSPEYPRPYPKLSSCTYSISLEEGFSVILDFVESFDVETHPETLCPYDFLKIQTDREEHGPFCGKTLPHRIETKSNTVTITFVTDESGDHTGWKIHYTSTAQPCPYPMAPPNGHVSPVQAKYILKDSFSIFCETGYELLQGHLPLKSFTAVCQKDGSWDRPMPACSIVDCGPPDDLPSGRVEYITGPGVTTYKAVIQYSCEETFYTMKVNDGKYVCEADGFWTSSKGEKSLPVCEPVCGLSARTTGGRIYGGQKAKPGDFPWQVLILGGTTAAGALLYDNWVLTAAHAVYEQKHDASALDIRMGTLKRLSPHYTQAWSEAVFIHEGYTHDAGFDNDIALIKLNNKVVINSNITPICLPRKEAESFMRTDDIGTASGWGLTQRGFLARNLMYVDIPIVDHQKCTAAYEKPPYPRGSVTANMLCAGLESGGKDSCRGDSGGALVFLDSETERWFVGGIVSWGSMNCGEAGQYGVYTKVINYIPWIENIISDF

SEQ ID NO: 8116 - RNA, 2061 nt, synthetic construct
  misc_feature 1..2061: note complement_system_component_MASP-2__Homo_sapiens__CCDS123.1
  source 1..2061: mol_type = other RNA
atgaggctgctgaccctcctgggccttctgtgtggctcggtggccacccccttgggcccgaagtggcctgaacctgtgttcgggcgcctggcatcccccggctttccaggggagtatgccaatgaccaggagcggcgctggaccctgactgcaccccccggctaccgcctgcgcctctacttcacccacttcgacctggagctctcccacctctgcgagtacgacttcgtcaagctgagctcgggggccaaggtgctggccacgctgtgcgggcaggagagcacagacacggagcgggcccctggcaaggacactttctactcgctgggctccagcctggacattaccttccgctccgactactccaacgagaagccgttcacggggttcgaggccttctatgcagccgaggacattgacgagtgccaggtggccccgggagaggcgcccacctgcgaccaccactgccacaaccacctgggcggtttctactgctcctgccgcgcaggctacgtcctgcaccgtaacaagcgcacctgctcagccctgtgctccggccaggtcttcacccagaggtctggggagctcagcagccctgaatacccacggccgtatcccaaactctccagttgcacttacagcatcagcctggaggaggggttcagtgtcattctggactttgtggagtccttcgatgtggagacacaccctgaaaccctgtgtccctacgactttctcaagattcaaacagacagagaagaacatggcccattctgtgggaagacattgccccacaggattgaaacaaaaagcaacacggtgaccatcacctttgtcacagatgaatcaggagaccacacaggctggaagatccactacacgagcacagcgcagccttgcccttatccgatggcgccacctaatggccacgtttcacctgtgcaagccaaatacatcctgaaagacagcttctccatcttttgcgagactggctatgagcttctgcaaggtcacttgcccctgaaatcctttactgcagtttgtcagaaagatggatcttgggaccggccaatgcccgcgtgcagcattgttgactgtggccctcctgatgatctacccagtggccgagtggagtacatcacaggtcctggagtgaccacctacaaagctgtgattcagtacagctgtgaagagaccttctacacaatgaaagtgaatgatggtaaatatgtgtgtgaggctgatggattctggacgagctccaaaggagaaaaatcactcccagtctgtgagcctgtttgtggactatcagcccgcacaacaggagggcgtatatatggagggcaaaaggcaaaacctggtgattttccttggcaagtcctgatattaggtggaaccacagcagcaggtgcacttttatatgacaactgggtcctaacagctgctcatgccgtctatgagcaaaaacatgatgcatccgccctggacattcgaatgggcaccctgaaaagactatcacctcattatacacaagcctggtctgaagctgtttttatacatgaaggttatactcatgatgctggctttgacaatgacatagcactgattaaattgaataacaaagttgtaatcaatagcaacatcacgcctatttgtctgccaagaaaagaagctgaatcctttatgaggacagatgacattggaactgcatctggatggggattaacccaaaggggttttcttgctagaaatctaatgtatgtcgacataccgattgttgaccatcaaaaatgtactgctgcatatgaaaagccaccctatccaaggggaagtgtaactgctaacatgctttgtgctggcttagaaagtgggggcaaggacagctgcagaggtgacagcggaggggcactggtgtttctagatagtgaaacagagaggtggtttgtgggaggaatagtgtcctggggttccatgaattgtggggaagcaggtcagtatggagtctacacaaaagttattaactatattccctggatcgagaacataattagtgatttttaa

SEQ ID NO: 8117 - RNA, 2061 nt, synthetic construct
  misc_feature 1..2061: note = derived and/or modified sequence opt1 fromcomplement_system_component_MASP-2__Homo_sapiens__CCDS1 23.1
  source 1..2061: mol_type = other RNA
atgcgcctgctcaccctgctgggcctcctgtgcgggagcgtggccacgcccctgggcccgaagtggcccgagcccgtcttcgggcggctcgcctcccccggcttcccgggggagtacgcgaacgaccaggagcgccggtggaccctgaccgccccgcccggctaccgcctgcggctctacttcacccacttcgacctggagctgagccacctctgcgagtacgacttcgtgaagctgtccagcggcgccaaggtgctggccaccctctgcgggcaggagtccacggacaccgagcgcgcccccggcaaggacaccttctacagcctggggtccagcctggacatcaccttccggtccgactacagcaacgagaagcccttcacgggcttcgaggcgttctacgccgccgaggacatcgacgagtgccaggtcgcccccggggaggcgccgacctgcgaccaccactgccacaaccacctcggcggcttctactgctcctgccgcgccgggtacgtgctgcaccggaacaagcggacctgcagcgccctgtgctccggccaggtgttcacccagcgcagcggggagctctccagccccgagtacccccgcccctaccccaagctgtccagctgcacgtactccatcagcctggaggagggcttcagcgtcatcctcgacttcgtggagtccttcgacgtggagacccaccccgagaccctgtgcccgtacgacttcctgaagatccagaccgaccgggaggagcacggccccttctgcgggaagacgctcccccaccgcatcgagaccaagagcaacaccgtcaccatcacgttcgtgaccgacgagtccggcgaccacaccgggtggaagatccactacaccagcacggcccagccctgcccgtaccccatggccccgcccaacggccacgtgtcccccgtccaggcgaagtacatcctgaaggacagcttctccatcttctgcgagaccgggtacgagctgctccagggccacctccccctcaagagcttcaccgccgtgtgccagaaggacggctcctgggaccggcccatgcccgcctgcagcatcgtggactgcgggccgcccgacgacctgccctccggccgcgtcgagtacatcaccgggccgggcgtgacgacctacaaggccgtgatccagtacagctgcgaggagaccttctacaccatgaaggtcaacgacgggaagtacgtgtgcgaggccgacggcttctggacgtccagcaagggcgagaagtccctgcccgtgtgcgagcccgtctgcgggctgagcgcgcggaccaccggcgggcgcatctacggcgggcagaaggccaagcccggcgacttcccgtggcaggtcctgatcctgggcgggaccacggccgccggcgccctgctctacgacaactgggtgctgaccgcggcccacgccgtgtacgagcagaagcacgacgcctccgccctggacatccggatggggaccctcaagcgcctgagcccccactacacccaggcgtggtccgaggccgtgttcatccacgagggctacacccacgacgccggcttcgacaacgacatcgccctgatcaagctcaacaacaaggtcgtgatcaacagcaacatcacgcccatctgcctgccccggaaggaggcggagagcttcatgcgcaccgacgacatcgggaccgcctccggctgggggctgacccagcgcggcttcctcgcccggaacctgatgtacgtggacatcccgatcgtcgaccaccagaagtgcacggccgcctacgagaagccgccctacccccgcgggagcgtgaccgcgaacatgctgtgcgccggcctggagtccggcgggaaggacagctgccggggcgactccgggggcgccctcgtgttcctggacagcgagaccgagcgctggttcgtcgggggcatcgtgtcctggggcagcatgaactgcggggaggccggccagtacggggtgtacaccaaggtcatcaactacatcccctggatcgagaacatcatctccgacttctga

SEQ ID NO: 8118 - RNA, 2061 nt, synthetic construct
  misc_feature 1..2061: note = derived and/or modified sequence opt2 fromcomplement_system_component_MASP-2__Homo_sapiens__CCDS1 23.1
  source 1..2061: mol_type = other RNA
atgcgcctcctcaccctcctcggcctcctctgcggctccgtcgccacccccctcggccccaagtggcccgagcccgtcttcggccgcctcgcctcccccggcttccccggcgagtacgccaacgaccaggagcgccgctggaccctcaccgccccccccggctaccgcctccgcctctacttcacccacttcgacctcgagctctcccacctctgcgagtacgacttcgtcaagctctcctccggcgccaaggtcctcgccaccctctgcggccaggagtccaccgacaccgagcgcgcccccggcaaggacaccttctactccctcggctcctccctcgacatcaccttccgctccgactactccaacgagaagcccttcaccggcttcgaggccttctacgccgccgaggacatcgacgagtgccaggtcgcccccggcgaggcccccacctgcgaccaccactgccacaaccacctcggcggcttctactgctcctgccgcgccggctacgtcctccaccgcaacaagcgcacctgctccgccctctgctccggccaggtcttcacccagcgctccggcgagctctcctcccccgagtacccccgcccctaccccaagctctcctcctgcacctactccatctccctcgaggagggcttctccgtcatcctcgacttcgtcgagtccttcgacgtcgagacccaccccgagaccctctgcccctacgacttcctcaagatccagaccgaccgcgaggagcacggccccttctgcggcaagaccctcccccaccgcatcgagaccaagtccaacaccgtcaccatcaccttcgtcaccgacgagtccggcgaccacaccggctggaagatccactacacctccaccgcccagccctgcccctaccccatggccccccccaacggccacgtctcccccgtccaggccaagtacatcctcaaggactccttctccatcttctgcgagaccggctacgagctcctccagggccacctccccctcaagtccttcaccgccgtctgccagaaggacggctcctgggaccgccccatgcccgcctgctccatcgtcgactgcggcccccccgacgacctcccctccggccgcgtcgagtacatcaccggccccggcgtcaccacctacaaggccgtcatccagtactcctgcgaggagaccttctacaccatgaaggtcaacgacggcaagtacgtctgcgaggccgacggcttctggacctcctccaagggcgagaagtccctccccgtctgcgagcccgtctgcggcctctccgcccgcaccaccggcggccgcatctacggcggccagaaggccaagcccggcgacttcccctggcaggtcctcatcctcggcggcaccaccgccgccggcgccctcctctacgacaactgggtcctcaccgccgcccacgccgtctacgagcagaagcacgacgcctccgccctcgacatccgcatgggcaccctcaagcgcctctccccccactacacccaggcctggtccgaggccgtcttcatccacgagggctacacccacgacgccggcttcgacaacgacatcgccctcatcaagctcaacaacaaggtcgtcatcaactccaacatcacccccatctgcctcccccgcaaggaggccgagtccttcatgcgcaccgacgacatcggcaccgcctccggctggggcctcacccagcgcggcttcctcgcccgcaacctcatgtacgtcgacatccccatcgtcgaccaccagaagtgcaccgccgcctacgagaagcccccctacccccgcggctccgtcaccgccaacatgctctgcgccggcctcgagtccggcggcaaggactcctgccgcggcgactccggcggcgccctcgtcttcctcgactccgagaccgagcgctggttcgtcggcggcatcgtctcctggggctccatgaactgcggcgaggccggccagtacggcgtctacaccaaggtcatcaactacatcccctggatcgagaacatcatctccgacttctga

SEQ ID NO: 8119 - RNA, 2061 nt, synthetic construct
  misc_feature 1..2061: note = derived and/or modified sequence opt3 fromcomplement_system_component_MASP-2__Homo_sapiens__CCDS1 23.1
  source 1..2061: mol_type = other RNA
atgagactgctcacccttctgggcttgttatgcgggagcgtggccacacccctgggacctaagtggccagagccggtcttcggtaggctagcttcccccggctttcctggggaatacgcaaacgaccaggagcggcgctggactctcacggccccacccggatatcgactgcgtctttacttcacccactttgatctggaattgtctcatctctgtgagtatgacttcgttaaactgtcaagtggcgcgaaggtgctggctacactctgcggtcaagaaagcactgataccgagagagcccctgggaaagacacattttactccttaggatcttcgctggatatcaccttcaggtcagactatagcaatgagaagccatttactggcttcgaagcattttacgccgctgaggatattgacgaatgtcaggtagcacccggcgaggcccctacatgcgatcaccattgtcacaaccatcttgggggattctattgcagttgtcgggctggttacgtgttgcaccgcaataaaagaacctgctccgccctgtgttctggccaggtctttacgcagaggagcggggagctatcctcaccagaatacccgcggccctatcctaagctcagtagctgcacttactctatatccctggaggaaggattctcagtgatccttgactttgttgagagcttcgatgtggaaacccacccagagacactgtgtccctatgacttcttgaagattcaaactgatcgcgaggaacatggccctttttgcggtaaaaccctcccacaccgaatcgagacaaagagtaacaccgtcacgattactttcgtgacagacgaatctggggaccataccggatggaaaatccactacacttccacagcgcagccctgcccgtatcctatggcacccccaaatggccacgtaagccctgttcaggccaagtacatactgaaagattcgttttctatcttctgtgagaccggctatgaattactgcaggggcatctcccccttaagtcctttacggctgtgtgccaaaaggacggatcatgggatagaccaatgcccgcctgtagtattgtcgactgcggtcctccagatgacctgccgagcggcagggtggagtacatcaccgggcccggagtgacaacttacaaagcagtcattcagtattcctgtgaggaaaccttctacacaatgaaggttaacgatggcaaatatgtgtgcgaggctgacggtttttggacttctagcaagggggaaaaatcattgcctgtatgtgagccagtgtgcggcctaagtgcccggaccacaggaggccgtatctacgggggacagaaggcgaaacccggtgatttcccttggcaggtcctgatactcggcgggaccactgccgcaggagctctgctttatgacaattgggtgctgacggccgctcacgccgtttacgaacaaaagcatgatgcatccgccttggacattcgcatgggcacactcaagagactgagcccacactatacccaggcttggtctgaggcggtgtttatccatgagggttacactcacgacgcagggttcgataacgacattgccttaatcaaactgaataacaaggtcgtgatcaattcaaacattacccccatatgtctaccgaggaaagaagctgagagttttatgcggacagatgacatcggcaccgccagcggatggggcctcactcagcgagggttcctggcacgcaatcttatgtacgtagatattcctatcgttgaccaccaaaagtgcacagccgcttatgaaaaaccaccctaccctagaggatccgtgacggccaacatgttgtgtgcaggtctggagtctggcgggaaggattcgtgcaggggagacagcggcggtgcgctcgtctttctggattccgagaccgaacggtggttcgtcgggggcatagtgtcatggggaagtatgaattgcggcgaggctgggcagtatggagtgtacactaaggttattaactatatcccctggatcgaaaacattatctctgacttctga

SEQ ID NO: 8120 - RNA, 2061 nt, synthetic construct
  misc_feature 1..2061: note = derived and/or modified sequence opt4 fromcomplement_system_component_MASP-2__Homo_sapiens__CCDS1 23.1
  source 1..2061: mol_type = other RNA
atgagactgctgaccctgctgggcctgctgtgcggcagcgtggccacccccctgggccccaagtggcccgagcccgtgttcggcagactggccagccccggcttccccggcgagtacgccaacgaccaggagagaagatggaccctgaccgccccccccggctacagactgagactgtacttcacccacttcgacctggagctgagccacctgtgcgagtacgacttcgtgaagctgagcagcggcgccaaggtgctggccaccctgtgcggccaggagagcaccgacaccgagagagcccccggcaaggacaccttctacagcctgggcagcagcctggacatcaccttcagaagcgactacagcaacgagaagcccttcaccggcttcgaggccttctacgccgccgaggacatcgacgagtgccaggtggcccccggcgaggcccccacctgcgaccaccactgccacaaccacctgggcggcttctactgcagctgcagagccggctacgtgctgcacagaaacaagagaacctgcagcgccctgtgcagcggccaggtgttcacccagagaagcggcgagctgagcagccccgagtaccccagaccctaccccaagctgagcagctgcacctacagcatcagcctggaggagggcttcagcgtgatcctggacttcgtggagagcttcgacgtggagacccaccccgagaccctgtgcccctacgacttcctgaagatccagaccgacagagaggagcacggccccttctgcggcaagaccctgccccacagaatcgagaccaagagcaacaccgtgaccatcaccttcgtgaccgacgagagcggcgaccacaccggctggaagatccactacaccagcaccgcccagccctgcccctaccccatggccccccccaacggccacgtgagccccgtgcaggccaagtacatcctgaaggacagcttcagcatcttctgcgagaccggctacgagctgctgcagggccacctgcccctgaagagcttcaccgccgtgtgccagaaggacggcagctgggacagacccatgcccgcctgcagcatcgtggactgcggcccccccgacgacctgcccagcggcagagtggagtacatcaccggccccggcgtgaccacctacaaggccgtgatccagtacagctgcgaggagaccttctacaccatgaaggtgaacgacggcaagtacgtgtgcgaggccgacggcttctggaccagcagcaagggcgagaagagcctgcccgtgtgcgagcccgtgtgcggcctgagcgccagaaccaccggcggcagaatctacggcggccagaaggccaagcccggcgacttcccctggcaggtgctgatcctgggcggcaccaccgccgccggcgccctgctgtacgacaactgggtgctgaccgccgcccacgccgtgtacgagcagaagcacgacgccagcgccctggacatcagaatgggcaccctgaagagactgagcccccactacacccaggcctggagcgaggccgtgttcatccacgagggctacacccacgacgccggcttcgacaacgacatcgccctgatcaagctgaacaacaaggtggtgatcaacagcaacatcacccccatctgcctgcccagaaaggaggccgagagcttcatgagaaccgacgacatcggcaccgccagcggctggggcctgacccagagaggcttcctggccagaaacctgatgtacgtggacatccccatcgtggaccaccagaagtgcaccgccgcctacgagaagcccccctaccccagaggcagcgtgaccgccaacatgctgtgcgccggcctggagagcggcggcaaggacagctgcagaggcgacagcggcggcgccctggtgttcctggacagcgagaccgagagatggttcgtgggcggcatcgtgagctggggcagcatgaactgcggcgaggccggccagtacggcgtgtacaccaaggtgatcaactacatcccctggatcgagaacatcatcagcgacttctga

SEQ ID NO: 8121 - RNA, 2061 nt, synthetic construct
  misc_feature 1..2061: note = derived and/or modified sequence opt5 fromcomplement_system_component_MASP-2__Homo_sapiens__CCDS1 23.1
  source 1..2061: mol_type = other RNA
atgagactgctcaccctgcttggcctgctctgcgggagcgtggccacacccctgggacctaagtggccggagcccgtcttcggccggcttgcttcccctgggtttcccggagaatacgccaacgaccaggagcgcagatggacgctgaccgcgcctcccggctatcggctccgcctgtacttcacacactttgatctggaactctctcatctgtgtgagtatgacttcgttaaacttagctccggggctaaggtgctggccaccctctgcggacaagaatctacagataccgagagagcccctggcaaagacacattttacagcctgggctcctctcttgatatcaccttccggagcgactattccaatgagaagccgtttacggggttcgaggctttttacgccgctgaagatattgacgaatgtcaggtggcccccggagaggcgcctacctgcgatcaccattgtcacaaccatctgggcgggttctattgcagctgtcgcgccggatacgtcctccacagaaataaacggacatgctctgctctgtgttccggccaggtgtttacccagcgcagcggggagctgtcttcccccgaataccctagaccctatccgaagctcagctcttgcacatactccatcagcctggaggaaggattctccgttattcttgactttgtggagtctttcgatgtcgaaacccaccctgagacgctgtgtccctatgacttcctcaagatccaaacagatcgggaggaacatggccctttttgcggcaaaaccctgccccaccgcattgagacaaagagcaacaccgtgaccatcacattcgttacggacgaatccggggaccataccggatggaaaatccactacacaagcaccgcccagccctgcccttatccgatggctccccctaatggccacgtgtctcccgtccaggccaagtacattcttaaagattcctttagcatcttctgtgagacagggtatgaactgctccagggacatctgcctctgaagtcttttaccgcggtgtgccaaaaggacggcagctgggatagacccatgccggcctgttccattgtggactgcgggcctcccgatgacctcccttctggacgggtcgagtacatcacgggccccggcgttacaacctacaaagctgtgattcagtatagctgtgaggaaaccttctacacaatgaaggtgaacgatgggaaatatgtctgcgaggccgacggattttggacctccagcaagggcgaaaaatctctgcctgtgtgtgagcccgtttgcgggctttccgctcgcacaacgggaggcagaatctacgggggccagaaggccaaaccgggagatttcccttggcaagtgctgattctcggcgggaccacagccgctggagcgctgctttatgacaattgggtcctgaccgccgctcacgccgtgtacgaacagaagcatgatgccagcgctctcgacatccggatgggcacactgaagagactgtctccccactatacccaggcctggtccgaggcggtttttatccatgaggggtacacgcacgacgctggattcgataacgacattgccctcatcaaactgaataacaaggtggtcattaatagcaacatcacccccatttgtcttcctcgcaaagaagccgagtcctttatgcggacagatgacatcggcaccgcttctgggtggggcctgacacagagaggattcctcgcccgcaatctgatgtacgtggatatcccgattgtcgaccaccaaaagtgcaccgctgcctatgaaaaacccccttacccccggggcagcgtgacggcgaacatgctgtgtgccgggcttgagtccggaggcaaggattcttgcagaggggacagcggaggcgctctcgtttttctggattccgagacagaacgctggttcgtcgggggcatcgtgagctggggatctatgaattgcggcgaggccgggcagtatggagtgtacaccaaggttattaactatatcccttggattgaaaacatcatctccgacttctga

SEQ ID NO: 8122 - protein, 248 aa, synthetic construct
  REGION 1..248: note = complement_system_component_MBL__Homo_sapiens__P11226
MSLFPSLPLLLLSMVAASYSETVTCEDAQKTCPAVIACSSPGINGFPGKDGRDGTKGEKGEPGQGLRGLQGPPGKLGPPGNPGPSGSPGPKGQKGDPGKSPDGDSSLAASERKALQTEMARIKKWLTFSLGKQVGNKFFLTNGEIMTFEKVKALCVKFQASVATPRNAAENGAIQNLIKEEAFLGITDEKTEGQFVDLTGNRLTYTNWNEGEPNNAGSDEDCVLLLKNGQWNDVPCSTSHLAVCEFPI

SEQ ID NO: 8123 - RNA, 747 nt, synthetic construct
  misc_feature 1..747: note complement_system_component_MBL__Homo_sapiens__AAC31937
  source 1..747: mol_type = other RNA
atgtccctgtttccatcactccctctccttctcctgagtatggtggcagcgtcttactcagaaactgtgacctgtgaggatgcccaaaagacctgccctgcagtgattgcctgtagctctccaggcatcaacggcttcccaggcaaagatgggcgtgatggcaccaagggagaaaagggggaaccaggccaagggctcagaggcttacagggcccccctggaaagttggggcctccaggaaatccagggccttctgggtcaccaggaccaaagggccaaaaaggagaccctggaaaaagtccggatggtgatagtagcctggctgcctcagaaagaaaagctctgcaaacagaaatggcacgtatcaaaaagtggctgaccttctctctgggcaaacaagttgggaacaagttcttcctgaccaatggtgaaataatgacctttgaaaaagtgaaggccttgtgtgtcaagttccaggcctctgtggccacccccaggaatgctgcagagaatggagccattcagaatctcatcaaggaggaagccttcctgggcatcactgatgagaagacagaagggcagtttgtggatctgacaggaaatagactgacctacacaaactggaacgagggtgaacccaacaatgctggttctgatgaagattgtgtattgctactgaaaaatggccagtggaatgacgtcccctgctccacctcccatctggccgtctgtgagttccctatctga

SEQ ID NO: 8124 - RNA, 747 nt, synthetic construct
  misc_feature 1..747: note = derived and/or modified sequence opt1 fromcomplement_system_component_MBL__Homo_sapiens__AAC31937
  source 1..747: mol_type = other RNA
atgagcctgttcccctccctcccgctgctgctcctgagcatggtggccgcctcctacagcgagaccgtgacctgcgaggacgcgcagaagacgtgccccgccgtgatcgcctgctccagccccggcatcaacgggttccccggcaaggacgggcgcgacggcaccaagggggagaagggcgagccgggccaggggctgcggggcctccaggggccgcccggcaagctggggccgcccggcaaccccggcccctccgggagccccggccccaaggggcagaagggcgaccccggcaagtcccccgacggggacagctccctggccgccagcgagcgcaaggcgctccagaccgagatggcccggatcaagaagtggctgaccttctccctgggcaagcaggtcgggaacaagttcttcctcacgaacggcgagatcatgaccttcgagaaggtcaaggccctgtgcgtgaagttccaggccagcgtggcgacgccccgcaacgccgccgagaacggggccatccagaacctgatcaaggaggaggccttcctcggcatcaccgacgagaagaccgagggccagttcgtcgacctgaccgggaaccggctgacctacaccaactggaacgagggcgagccgaacaacgcggggtccgacgaggactgcgtgctcctgctgaagaacggccagtggaacgacgtgccctgcagcacgtcccacctcgccgtctgcgagttccccatctga

SEQ ID NO: 8125 - RNA, 747 nt, synthetic construct
  misc_feature 1..747: note = derived and/or modified sequence opt2 fromcomplement_system_component_MBL__Homo_sapiens__AAC31937
  source 1..747: mol_type = other RNA
atgtccctcttcccctccctccccctcctcctcctctccatggtcgccgcctcctactccgagaccgtcacctgcgaggacgcccagaagacctgccccgccgtcatcgcctgctcctcccccggcatcaacggcttccccggcaaggacggccgcgacggcaccaagggcgagaagggcgagcccggccagggcctccgcggcctccagggcccccccggcaagctcggcccccccggcaaccccggcccctccggctcccccggccccaagggccagaagggcgaccccggcaagtcccccgacggcgactcctccctcgccgcctccgagcgcaaggccctccagaccgagatggcccgcatcaagaagtggctcaccttctccctcggcaagcaggtcggcaacaagttcttcctcaccaacggcgagatcatgaccttcgagaaggtcaaggccctctgcgtcaagttccaggcctccgtcgccaccccccgcaacgccgccgagaacggcgccatccagaacctcatcaaggaggaggccttcctcggcatcaccgacgagaagaccgagggccagttcgtcgacctcaccggcaaccgcctcacctacaccaactggaacgagggcgagcccaacaacgccggctccgacgaggactgcgtcctcctcctcaagaacggccagtggaacgacgtcccctgctccacctcccacctcgccgtctgcgagttccccatctga

SEQ ID NO: 8126 - RNA, 747 nt, synthetic construct
  misc_feature 1..747: note = derived and/or modified sequence opt3 fromcomplement_system_component_MBL__Homo_sapiens__AAC31937
  source 1..747: mol_type = other RNA
atgagcctgttcccctccctccctcttctgttgttatctatggtggccgcttcatacagtgagactgtcacatgcgaagacgcacagaagacttgtccagccgttatcgcgtgcagctccccgggcattaacgggtttcccggaaaagatggtagagacggcacgaagggggagaaaggagaacctggccaaggtctgagggggctacagggaccacccggcaagctcggccctccagggaatcccggaccttctggttcgccaggcccgaaagggcagaagggagatcccggcaagtcacctgacggtgatagcagtctggctgcctccgagcggaaagcacttcagaccgaaatggcccgcataaagaaatggctgacattctctttggggaagcaagtgggaaacaaatttttcctcactaatggcgagatcatgacctttgagaaggtaaaggctctgtgtgtgaaattccaggcaagcgtcgccacaccacgaaacgctgccgaaaatggcgcgattcagaacctgatcaaggaggaagcatttctcgggattaccgacgagaaaactgagggacagttcgtggatttaacaggtaatcgtctgacctatacgaactggaatgaaggcgagcccaacaatgccgggtccgacgaagattgcgttcttttgctgaagaacggacaatggaatgacgtgccttgttcaaccagtcacctagctgtctgcgagtttccaatctga

SEQ ID NO: 8127 - RNA, 747 nt, synthetic construct
  misc_feature 1..747: note = derived and/or modified sequence opt4 fromcomplement_system_component_MBL__Homo_sapiens__AAC31937
  source 1..747: mol_type = other RNA
atgagcctgttccccagcctgcccctgctgctgctgagcatggtggccgccagctacagcgagaccgtgacctgcgaggacgcccagaagacctgccccgccgtgatcgcctgcagcagccccggcatcaacggcttccccggcaaggacggcagagacggcaccaagggcgagaagggcgagcccggccagggcctgagaggcctgcagggcccccccggcaagctgggcccccccggcaaccccggccccagcggcagccccggccccaagggccagaagggcgaccccggcaagagccccgacggcgacagcagcctggccgccagcgagagaaaggccctgcagaccgagatggccagaatcaagaagtggctgaccttcagcctgggcaagcaggtgggcaacaagttcttcctgaccaacggcgagatcatgaccttcgagaaggtgaaggccctgtgcgtgaagttccaggccagcgtggccacccccagaaacgccgccgagaacggcgccatccagaacctgatcaaggaggaggccttcctgggcatcaccgacgagaagaccgagggccagttcgtggacctgaccggcaacagactgacctacaccaactggaacgagggcgagcccaacaacgccggcagcgacgaggactgcgtgctgctgctgaagaacggccagtggaacgacgtgccctgcagcaccagccacctggccgtgtgcgagttccccatctga

SEQ ID NO: 8128 - RNA, 747 nt, synthetic construct
  misc_feature 1..747: note = derived and/or modified sequence opt5 fromcomplement_system_component_MBL__Homo_sapiens__AAC31937
  source 1..747: mol_type = other RNA
atgagcctgttcccctccctccctctgcttctgctctctatggtggccgctagctactccgagaccgtcacatgcgaagacgcccagaagacgtgtccggcggttatcgcttgctctagccccggcattaacgggtttcctggaaaagatggcagagacgggaccaagggagagaaaggcgaacccgggcaaggactgcggggccttcagggccctcccgggaagctgggacctccgggcaatcccgggccttccggatctcccggccctaaagggcagaagggagatcccggcaagagcccggacggcgattccagcctcgccgcctctgagcgcaaagctctgcagacagaaatggccagaatcaagaaatggctgaccttctccctcgggaagcaagtgggaaacaaatttttcctgacaaatggcgagattatgacctttgagaaggtgaaggctctttgtgtcaaattccaggccagcgtggcgacacctcggaacgccgctgaaaatggggccatccagaacctgattaaggaggaagcctttctcggaatcaccgacgagaaaacggagggccagttcgttgatctgaccgggaatcgccttacatataccaactggaatgaaggagagcccaacaatgctggctctgacgaagattgcgtgctgctcctgaagaacggccaatggaatgacgtcccttgttccacaagccacctggcggtgtgcgagtttcccatctga

SEQ ID NO: 8129 - protein, 392 aa, synthetic construct [sequence omitted]

SEQ ID NO: 8130 - RNA, 1179 nt, synthetic construct
  misc_feature 1..1179: note complement_system_component_MCP__Homo_sapiens__AAW82433
  source 1..1179: mol_type = other RNA
atggagcctcccggccgccgcgagtgtccctttccttcctggcgctttcctgggttgcttctggcggccatggtgttgctgctgtactccttctccgatgcctgtgaggagccaccaacatttgaagctatggagctcattggtaaaccaaaaccctactatgagattggtgaacgagtagattataagtgtaaaaaaggatacttctatatacctcctcttgccacccatactatttgtgatcggaatcatacatggctacctgtctcagatgacgcctgttatagagaaacatgtccatatatacgggatcctttaaatggccaagcagtccctgcaaatgggacttacgagtttggttatcagatgcactttatttgtaatgagggttattacttaattggtgaagaaattctatattgtgaacttaaaggatcagtagcaatttggagcggtaagcccccaatatgtgaaaaggttttgtgtacaccacctccaaaaataaaaaatggaaaacacacctttagtgaagtagaagtatttgagtatcttgatgcagtaacttatagttgtgatcctgcacctggaccagatccattttcacttattggagagagcacgatttattgtggtgacaattcagtgtggagtcgtgctgctccagagtgtaaagtggtcaaatgtcgatttccagtagtcgaaaatggaaaacagatatcaggatttggaaaaaaattttactacaaagcaacagttatgtttgaatgcgataagggtttttacctcgatggcagcgacacaattgtctgtgacagtaacagtacttgggatcccccagttccaaagtgtcttaaagtgctgcctccatctagtacaaaacctccagctttgagtcattcagtgtcgacttcttccactacaaaatctccagcgtccagtgcctcaggtcctaggcctacttacaagcctccagtctcaaattatccaggatatcctaaacctgaggaaggaatacttgacagtttggatgtttgggtcattgctgtgattgttattgccatagttgttggagttgcagtaatttgtgttgtcccgtacagatatcttcaaaggaggaagaagaaaggcacatacctaactgatgagacccacagagaagtaaaatttacttctctctga

SEQ ID NO: 8131 - RNA, 1179 nt, synthetic construct
  misc_feature 1..1179: note = derived and/or modified sequence opt1 fromcomplement_system_component_MCP__Homo_sapiens__AAW82433
  source 1..1179: mol_type = other RNA
atggagcccccgggccgccgggagtgccccttccccagctggcgcttccccgggctgctcctggccgccatggtgctgctcctgtactccttcagcgacgcgtgcgaggagccgcccaccttcgaggccatggagctgatcggcaagcccaagccctactacgagatcggggagcgggtcgactacaagtgcaagaagggctacttctacatcccgcccctcgccacccacacgatctgcgaccgcaaccacacctggctgcccgtgtccgacgacgcctgctaccgggagacctgcccctacatccgcgacccgctgaacgggcaggccgtgcccgcgaacggcacctacgagttcggctaccagatgcacttcatctgcaacgaggggtactacctcatcggcgaggagatcctgtactgcgagctgaaggggagcgtcgccatctggtccggcaagccgcccatctgcgagaaggtgctctgcacgcccccgcccaagatcaagaacgggaagcacaccttcagcgaggtggaggtcttcgagtacctggacgccgtgacctactcctgcgaccccgcccccggccccgaccccttcagcctgatcggcgagtccaccatctactgcggggacaacagcgtgtggtcccgggcggcccccgagtgcaaggtcgtgaagtgccgcttcccggtggtcgagaacggcaagcagatcagcgggttcggcaagaagttctactacaaggccacggtgatgttcgagtgcgacaagggcttctacctcgacgggtccgacaccatcgtgtgcgacagcaactccacctgggacccgcccgtccccaagtgcctgaaggtgctgccgcccagctccaccaagccgcccgccctcagccactccgtgagcacgagctccaccaccaagagccccgcctccagcgcgtccggcccccggcccacctacaagccgcccgtcagcaactaccccgggtaccccaagcccgaggagggcatcctggactccctggacgtgtgggtgatcgccgtcatcgtgatcgccatcgtggtcggggtggccgtcatctgcgtggtgccctaccgctacctccagcggcgcaagaagaagggcacgtacctgaccgacgagacccaccgggaggtcaagttcaccagcctgtga

SEQ ID NO: 8132 - RNA, 1179 nt, synthetic construct
  misc_feature 1..1179: note = derived and/or modified sequence opt2 fromcomplement_system_component_MCP__Homo_sapiens__AAW82433
  source 1..1179: mol_type = other RNA
atggagccccccggccgccgcgagtgccccttcccctcctggcgcttccccggcctcctcctcgccgccatggtcctcctcctctactccttctccgacgcctgcgaggagccccccaccttcgaggccatggagctcatcggcaagcccaagccctactacgagatcggcgagcgcgtcgactacaagtgcaagaagggctacttctacatcccccccctcgccacccacaccatctgcgaccgcaaccacacctggctccccgtctccgacgacgcctgctaccgcgagacctgcccctacatccgcgaccccctcaacggccaggccgtccccgccaacggcacctacgagttcggctaccagatgcacttcatctgcaacgagggctactacctcatcggcgaggagatcctctactgcgagctcaagggctccgtcgccatctggtccggcaagccccccatctgcgagaaggtcctctgcacccccccccccaagatcaagaacggcaagcacaccttctccgaggtcgaggtcttcgagtacctcgacgccgtcacctactcctgcgaccccgcccccggccccgaccccttctccctcatcggcgagtccaccatctactgcggcgacaactccgtctggtcccgcgccgcccccgagtgcaaggtcgtcaagtgccgcttccccgtcgtcgagaacggcaagcagatctccggcttcggcaagaagttctactacaaggccaccgtcatgttcgagtgcgacaagggcttctacctcgacggctccgacaccatcgtctgcgactccaactccacctgggacccccccgtccccaagtgcctcaaggtcctccccccctcctccaccaagccccccgccctctcccactccgtctccacctcctccaccaccaagtcccccgcctcctccgcctccggcccccgccccacctacaagccccccgtctccaactaccccggctaccccaagcccgaggagggcatcctcgactccctcgacgtctgggtcatcgccgtcatcgtcatcgccatcgtcgtcggcgtcgccgtcatctgcgtcgtcccctaccgctacctccagcgccgcaagaagaagggcacctacctcaccgacgagacccaccgcgaggtcaagttcacctccctctga

SEQ ID NO: 8133 - RNA, 1179 nt, synthetic construct
  misc_feature 1..1179: note = derived and/or modified sequence opt3 fromcomplement_system_component_MCP__Homo_sapiens__AAW82433
  source 1..1179: mol_type = other RNA
atggagccccctggcagaagggaatgcccattcccgagctggcggtttcccgggctgctccttgccgctatggtgctgttgttatactccttctctgacgcatgtgaggaacctccaacctttgaggccatggaactgatcggaaagcccaaaccttattacgagattggtgagcgcgtcgattataagtgcaaaaagggctacttctatataccacccctagcgacacacactatctgtgaccgaaaccatacgtggctccctgtttcagatgacgcttgctaccgtgaaacctgtccatatattagagatccgctgaatgggcaggccgtgcccgcaaacggaacatacgagtttggctaccaaatgcacttcatctgcaatgaaggttattaccttattggggaggagatcctgtattgtgaattgaaaggaagtgtagccatatggagcggcaagcctccaatctgcgagaaggtgctctgtactccccctccaaaaattaagaacggcaaacataccttttccgaagtcgaggtgttcgaatacctggacgctgttacatattcttgcgatcccgcaccggggcctgaccccttttcgctgatcggagagtcaaccatttactgtggtgataatagcgtgtggagtagggccgctccagagtgcaaggtcgtgaaatgccggttccctgtagttgaaaacggcaagcagatctccgggtttggaaagaaattctattacaaggccactgtgatgtttgagtgtgacaaaggcttctacctcgatggttctgacacaatagtctgcgatagcaattccacctgggatcccccagtgcccaagtgtttaaaagtgctgcctccatcaagtacgaagccgcccgcgcttagccactctgtctccacttcaagcaccacaaaaagtcctgcatcttccgccagcgggccacgccccacttataagcctccagtttcgaactaccccggatatccgaagcctgaagagggcattttggactctctggacgtgtgggtaatcgctgtgattgtcatcgccatcgtggttggcgtggcagtcatttgcgtggtaccatacagatatctacagaggcggaaaaagaaagggacctacctcacagacgaaacccatcgcgaggttaagttcacgtccctgtga

SEQ ID NO: 8134 - RNA, 1179 nt, synthetic construct
  misc_feature 1..1179: note = derived and/or modified sequence opt4 fromcomplement_system_component_MCP__Homo_sapiens__AAW82433
  source 1..1179: mol_type = other RNA
atggagccccccggcagaagagagtgccccttccccagctggagattccccggcctgctgctggccgccatggtgctgctgctgtacagcttcagcgacgcctgcgaggagccccccaccttcgaggccatggagctgatcggcaagcccaagccctactacgagatcggcgagagagtggactacaagtgcaagaagggctacttctacatcccccccctggccacccacaccatctgcgacagaaaccacacctggctgcccgtgagcgacgacgcctgctacagagagacctgcccctacatcagagaccccctgaacggccaggccgtgcccgccaacggcacctacgagttcggctaccagatgcacttcatctgcaacgagggctactacctgatcggcgaggagatcctgtactgcgagctgaagggcagcgtggccatctggagcggcaagccccccatctgcgagaaggtgctgtgcacccccccccccaagatcaagaacggcaagcacaccttcagcgaggtggaggtgttcgagtacctggacgccgtgacctacagctgcgaccccgcccccggccccgaccccttcagcctgatcggcgagagcaccatctactgcggcgacaacagcgtgtggagcagagccgcccccgagtgcaaggtggtgaagtgcagattccccgtggtggagaacggcaagcagatcagcggcttcggcaagaagttctactacaaggccaccgtgatgttcgagtgcgacaagggcttctacctggacggcagcgacaccatcgtgtgcgacagcaacagcacctgggacccccccgtgcccaagtgcctgaaggtgctgccccccagcagcaccaagccccccgccctgagccacagcgtgagcaccagcagcaccaccaagagccccgccagcagcgccagcggccccagacccacctacaagccccccgtgagcaactaccccggctaccccaagcccgaggagggcatcctggacagcctggacgtgtgggtgatcgccgtgatcgtgatcgccatcgtggtgggcgtggccgtgatctgcgtggtgccctacagatacctgcagagaagaaagaagaagggcacctacctgaccgacgagacccacagagaggtgaagttcaccagcctgtga

SEQ ID NO: 8135 - RNA, 1179 nt, synthetic construct
  misc_feature 1..1179: note = derived and/or modified sequence opt5 fromcomplement_system_component_MCP__Homo_sapiens__AAW82433
  source 1..1179: mol_type = other RNA
atggagccccctggcagacgggaatgcccgttccccagctggcgctttcctgggctgctcctggccgctatggtgcttctgctctactccttctctgacgcctgtgaggaaccccctacctttgaggcgatggaactgatcggaaagcccaaaccttattacgagattggcgagagagtcgattataagtgcaaaaaggggtacttctatatcccgccccttgctacacacacgatttgtgaccggaaccatacctggctgcctgttagcgatgacgcctgctaccgcgaaacatgtccctatatcagagatcctctcaatggacaggccgtgcccgctaacggcacctacgagtttgggtaccaaatgcacttcatttgcaatgaaggatattacctgatcggcgaggagatcctgtattgtgaactcaaaggctccgtggccatttggtctgggaagccgcctatctgcgagaaggtcctgtgtacaccccctcccaaaattaagaacggaaaacatacctttagcgaagtggaggttttcgaataccttgacgctgtgacatattcctgcgatcccgcccctggcccggaccccttttctctgatcggggagagcaccatttactgtggagataattccgtctggagccgggcggcccctgagtgcaaggtggttaaatgccgcttccccgtggtcgaaaacggcaagcagatctctgggtttggaaagaaattctattacaaggctacggtgatgtttgagtgtgacaaaggcttctacctcgatggctccgacaccattgtgtgcgatagcaattctacatgggaccctcccgtcccgaagtgtctgaaagttcttcctccctccagcaccaagcctcccgccctgtctcactccgtgagcacatcctctaccacgaaaagccctgcttccagcgcctctgggcccagaccgacatataagcctcccgtgtccaactaccccggatatcctaagccggaagagggcatcctcgacagcctggatgtctgggtgatcgcggttattgtgatcgccattgtcgtgggggttgctgtgatctgcgtcgtgccctaccggtatctgcagcgccggaaaaagaaaggaacctacctcacagacgaaacccatagagaggtcaagttcacctctctgtga

SEQ ID NO: 8136 - protein, 348 aa, synthetic construct
  REGION 1..348: note = complement_system_component_MCP__Homo_sapiens__P40121
MYTAIPQSGSPFPGSVQDPGLHVWRVEKLKPVPVAQENQGVFFSGDSYLVLHNGPEEVSHLHLWIGQQSSRDEQGACAVLAVHLNTLLGERPVQHREVQGNESDLFMSYFPRGLKYQEGGVESAFHKTSTGAPAAIKKLYQVKGKKNIRATERALNWDSFNTGDCFILDLGQNIFAWCGGKSNILERNKARDLALAIRDSERQGKAQVEIVTDGEEPAEMIQVLGPKPALKEGNPEEDLTADKANAQAAALYKVSDATGQMNLTKVADSSPFALELLISDDCFVLDNGLCGKIYIWKGRKANEKERQAALQVAEGFISRMQYAPNTQVEILPQGHESPIFKQFFKDWK

SEQ ID NO: 8137 - RNA, 1047 nt, synthetic construct
  misc_feature 1..1047: note complement_system_component_MCP__Homo_sapiens__AAY24128
  source 1..1047: mol_type = other RNA
atgtacacagccattccccagagtggctctccattcccaggctcagtgcaggatccaggcctgcatgtgtggcgggtggagaagctgaagccggtgcctgtggcgcaagagaaccagggcgtcttcttctcgggggactcctacctagtgctgcacaatggcccagaagaggtttcccatctgcacctgtggataggccagcagtcatcccgggatgagcagggggcctgtgccgtgctggctgtgcacctcaacacgctgctgggagagcggcctgtgcagcaccgcgaggtgcagggcaatgagtctgacctcttcatgagctacttcccacggggcctcaagtaccaggaaggtggtgtggagtcagcatttcacaagacctccacaggagccccagctgccatcaagaaactctaccaggtgaaggggaagaagaacatccgtgccaccgagcgggcactgaactgggacagcttcaacactggggactgcttcatcctggacctgggccagaacatcttcgcctggtgtggtggaaagtccaacatcctggaacgcaacaaggcgagggacctggccctggccatccgggacagtgagcgacagggcaaggcccaggtggagattgtcactgatggggaggagcctgctgagatgatccaggtcctgggccccaagcctgctctgaaggagggcaaccctgaggaagacctcacagctgacaaggcaaatgcccaggccgcagctctgtataaggtctctgatgccactggacagatgaacctgaccaaggtggctgactccagcccatttgcccttgaactgctgatatctgatgactgctttgtgctggacaacgggctctgtggcaagatctatatctggaaggggcgaaaagcgaatgagaaggagcggcaggcagccctgcaggtggccgagggcttcatctcgcgcatgcagtacgccccgaacactcaggtggagattctgcctcagggccatgagagtcccatcttcaagcaatttttcaaggactggaaatga

SEQ ID NO: 8138 - RNA, 1047 nt, synthetic construct
  misc_feature 1..1047: note = derived and/or modified sequence opt1 fromcomplement_system_component_MCP__Homo_sapiens__AAY24128
  source 1..1047: mol_type = other RNA
atgtacacggccatcccccagagcggctccccgttccccgggagcgtgcaggaccccggcctgcacgtctggcgcgtggagaagctgaagcccgtgccggtcgcccaggagaaccagggggtgttcttctccggcgacagctacctggtgctgcacaacgggcccgaggaggtctcccacctccacctgtggatcggccagcagagctcccgggacgagcagggcgcgtgcgccgtgctggccgtgcacctcaacaccctgctgggggagcgccccgtccagcaccgggaggtgcagggcaacgagagcgacctcttcatgtcctacttcccccgcgggctgaagtaccaggagggcggggtggagagcgccttccacaagacgtccaccggcgccccggcggccatcaagaagctgtaccaggtcaagggcaagaagaacatccgggccaccgagcgcgccctcaactgggacagcttcaacaccggggactgcttcatcctggacctgggccagaacatcttcgcgtggtgcgggggcaagtccaacatcctcgagcggaacaaggcccgcgacctggccctggccatccgggacagcgagcgccagggcaaggcccaggtggagatcgtgacggacggggaggagcccgcggagatgatccaggtcctcggccccaagcccgccctgaaggaggggaacccggaggaggacctgaccgccgacaaggccaacgcccaggcggccgccctctacaaggtgtccgacgccaccggccagatgaacctgaccaaggtggccgacagctcccccttcgcgctggagctcctgatcagcgacgactgcttcgtcctggacaacgggctctgcggcaagatctacatctggaagggccggaaggccaacgagaaggagcgccaggccgccctccaggtggccgaggggttcatctcccggatgcagtacgcgcccaacacccaggtggagatcctgccccagggccacgagagcccgatcttcaagcagttcttcaaggactggaagtga

SEQ ID NO: 8139 - RNA, 1047 nt, synthetic construct
  misc_feature 1..1047: note = derived and/or modified sequence opt2 fromcomplement_system_component_MCP__Homo_sapiens__AAY24128
  source 1..1047: mol_type = other RNA
atgtacaccgccatcccccagtccggctcccccttccccggctccgtccaggaccccggcctccacgtctggcgcgtcgagaagctcaagcccgtccccgtcgcccaggagaaccagggcgtcttcttctccggcgactcctacctcgtcctccacaacggccccgaggaggtctcccacctccacctctggatcggccagcagtcctcccgcgacgagcagggcgcctgcgccgtcctcgccgtccacctcaacaccctcctcggcgagcgccccgtccagcaccgcgaggtccagggcaacgagtccgacctcttcatgtcctacttcccccgcggcctcaagtaccaggagggcggcgtcgagtccgccttccacaagacctccaccggcgcccccgccgccatcaagaagctctaccaggtcaagggcaagaagaacatccgcgccaccgagcgcgccctcaactgggactccttcaacaccggcgactgcttcatcctcgacctcggccagaacatcttcgcctggtgcggcggcaagtccaacatcctcgagcgcaacaaggcccgcgacctcgccctcgccatccgcgactccgagcgccagggcaaggcccaggtcgagatcgtcaccgacggcgaggagcccgccgagatgatccaggtcctcggccccaagcccgccctcaaggagggcaaccccgaggaggacctcaccgccgacaaggccaacgcccaggccgccgccctctacaaggtctccgacgccaccggccagatgaacctcaccaaggtcgccgactcctcccccttcgccctcgagctcctcatctccgacgactgcttcgtcctcgacaacggcctctgcggcaagatctacatctggaagggccgcaaggccaacgagaaggagcgccaggccgccctccaggtcgccgagggcttcatctcccgcatgcagtacgcccccaacacccaggtcgagatcctcccccagggccacgagtcccccatcttcaagcagttcttcaaggactggaagtga

SEQ ID NO: 8140 - RNA, 1047 nt, synthetic construct
  misc_feature 1..1047: note = derived and/or modified sequence opt3 fromcomplement_system_component_MCP__Homo_sapiens__AAY24128
  source 1..1047: mol_type = other RNA
atgtacaccgccatcccccagagcggctcccctttcccagggtctgtgcaagacccgggactgcacgtctggagagttgagaagctcaaacccgtgcctgtagctcaggaaaaccagggtgtgtttttctcaggcgatagttatcttgtcctgcataatgggccagaggaagtgagccacttgcatttatggattggacagcaatcctctagggacgagcagggcgcatgcgccgttctggcggtgcacctaaacacactcctgggtgaacggcccgtccagcatcgcgaggtgcaggggaatgagtcggatctttttatgtcatacttccctcgaggactgaagtatcaagaaggcggcgtagagagcgcttttcacaaaacgagtactggggccccagcagccataaagaaattgtaccaggttaagggaaagaaaaacatccgtgctaccgaaagagcactcaattgggactccttcaacacaggtgattgttttattctggacctgggccagaatatcttcgcctggtgcgggggaaagtctaacattctcgagaggaataaagctcgggatttagccctggcgatccgcgacagcgagagacagggcaaggcacaagtggaaatagtcactgatggtgaggaacccgccgagatgatccaggtgcttgggcctaaaccagctttgaaggaaggaaacccggaggaggacctgaccgccgataaggcaaatgctcaggccgcggccctatataaagtgtccgacgcaacaggccaaatgaacctcaccaaggtcgctgattcaagtccctttgccctggaacttctgattagcgacgactgtttcgttttggataatggcctctgcgggaaaatctacatttggaagggaaggaaagctaacgagaaggaacggcaggccgcattacaggtggccgagggttttatctctcgcatgcagtatgctcctaatactcaagtagaaatactgccacagggccacgagtcccccattttcaaacagtttttcaaggactggaagtga

SEQ ID NO: 8141 - RNA, 1047 nt, synthetic construct
  misc_feature 1..1047: note = derived and/or modified sequence opt4 fromcomplement_system_component_MCP__Homo_sapiens__AAY24128
  source 1..1047: mol_type = other RNA
atgtacaccgccatcccccagagcggcagccccttccccggcagcgtgcaggaccccggcctgcacgtgtggagagtggagaagctgaagcccgtgcccgtggcccaggagaaccagggcgtgttcttcagcggcgacagctacctggtgctgcacaacggccccgaggaggtgagccacctgcacctgtggatcggccagcagagcagcagagacgagcagggcgcctgcgccgtgctggccgtgcacctgaacaccctgctgggcgagagacccgtgcagcacagagaggtgcagggcaacgagagcgacctgttcatgagctacttccccagaggcctgaagtaccaggagggcggcgtggagagcgccttccacaagaccagcaccggcgcccccgccgccatcaagaagctgtaccaggtgaagggcaagaagaacatcagagccaccgagagagccctgaactgggacagcttcaacaccggcgactgcttcatcctggacctgggccagaacatcttcgcctggtgcggcggcaagagcaacatcctggagagaaacaaggccagagacctggccctggccatcagagacagcgagagacagggcaaggcccaggtggagatcgtgaccgacggcgaggagcccgccgagatgatccaggtgctgggccccaagcccgccctgaaggagggcaaccccgaggaggacctgaccgccgacaaggccaacgcccaggccgccgccctgtacaaggtgagcgacgccaccggccagatgaacctgaccaaggtggccgacagcagccccttcgccctggagctgctgatcagcgacgactgcttcgtgctggacaacggcctgtgcggcaagatctacatctggaagggcagaaaggccaacgagaaggagagacaggccgccctgcaggtggccgagggcttcatcagcagaatgcagtacgcccccaacacccaggtggagatcctgccccagggccacgagagccccatcttcaagcagttcttcaaggactggaagtga

SEQ ID NO: 8142 - RNA, 1047 nt, synthetic construct
  misc_feature 1..1047: note = derived and/or modified sequence opt5 fromcomplement_system_component_MCP__Homo_sapiens__AAY24128
  source 1..1047: mol_type = other RNA
atgtacaccgccatcccccagagcggctcccctttcccggggtctgtgcaagaccccggactgcacgtctggagagttgagaagctcaaacctgtgcccgtggctcaggaaaaccagggcgtctttttcagcggggattcctatctggtgcttcataatggacctgaggaagtttctcatctgcacctctggattggccagcaaagctcccgggacgagcagggggcctgcgcggtgctggctgtccaccttaacacactgctcggagaacgccccgtgcagcatagagaggttcagggcaatgagtctgatctgtttatgagctacttccctcggggcctgaagtatcaagaagggggagtggagtccgcctttcacaaaacgagcaccggcgccccggctgccatcaagaaactctaccaggtcaaggggaagaaaaacattcgcgctacagaaagagccctgaattgggactctttcaacaccggagattgttttatccttgacctgggccagaatattttcgcgtggtgcgggggaaagtccaacatcctcgagcggaataaagcccgcgatctggctcttgccatcagagacagcgagcggcagggcaaggctcaagtggaaattgtgacagatggcgaggaacccgccgagatgatccaggtcctggggcctaaacccgcgctcaaggaaggaaaccctgaggaggacctgaccgccgataaggctaatgcccaggctgccgccctgtataaagtttctgacgctacaggccaaatgaacctcaccaaggtggcggattccagcccctttgccctggaacttctgatttctgacgactgtttcgtgctcgataatgggctgtgcggaaaaatctacatttggaagggccgcaaagctaacgagaaggaaagacaggccgcccttcaggtcgctgaggggtttatctcccggatgcagtatgccccgaatacgcaagtggaaattctgcctcagggacacgagagccccatcttcaaacagtttttcaaggactggaagtga

SEQ ID NO: 8143 - protein, 371 aa, synthetic construct
  REGION 1..371: note = CREB3__Homo_sapiens__CCDS6588.1
MELELDAGDQDLLAFLLEESGDLGTAPDEAVRAPLDWALPLSEVPSDWEVDDLLCSLLSPPASLNILSSSNPCLVHHDHTYSLPRETVSMDLESESCRKEGTQMTPQHMEELAEQEIARLVLTDEEKSLLEKEGLILPETLPLTKTEEQILKRVRRKIRNKRSAQESRRKKKVYVGGLESRVLKYTAQNMELQNKVQLLEEQNLSLLDQLRKLQAMVIEISNKTSSSSTCILVLLVSFCLLLVPAMYSSDTRGSLPAEHGVLSRQLRALPSEDPYQLELPALQSEVPKDSTHQWLDGSDCVLQAPGNTSCLLHYMPQAPSAEPPLEWPFPDLFSEPLCRGPILPLQANLTRKGGWLPTGSPSVILQDRYSG

SEQ ID NO: 8144 - RNA, 1116 nt, synthetic construct
  misc_feature 1..1116: note = CREB3__Homo_sapiens__CCDS6588.1
  source 1..1116: mol_type = other RNA
atggagctggaattggatgctggtgaccaagacctgctggccttcctgctagaggaaagtggagatttggggacggcacccgatgaggccgtgagggccccactggactgggcgctgccgctttctgaggtaccgagcgactgggaagtagatgatttgctgtgctccctgctgagtcccccagcgtcgttgaacattctcagctcctccaacccctgccttgtccaccatgaccacacctactccctcccacgggaaactgtctctatggatctagagagtgagagctgtagaaaagaggggacccagatgactccacagcatatggaggagctggcagagcaggagattgctaggctagtactgacagatgaggagaagagtctattggagaaggaggggcttattctgcctgagacacttcctctcactaagacagaggaacaaattctgaaacgtgtgcggaggaagattcgaaataaaagatctgctcaagagagccgcaggaaaaagaaggtgtatgttgggggtttagagagcagggtcttgaaatacacagcccagaatatggagcttcagaacaaagtacagcttctggaggaacagaatttgtcccttctagatcaactgaggaaactccaggccatggtgattgagatatcaaacaaaaccagcagcagcagcacctgcatcttggtcctactagtctccttctgcctcctccttgtacctgctatgtactcctctgacacaagggggagcctgccagctgagcatggagtgttgtcccgccagcttcgtgccctccccagtgaggacccttaccagctggagctgcctgccctgcagtcagaagtgccgaaagacagcacacaccagtggttggacggctcagactgtgtactccaggcccctggcaacacttcctgcctgctgcattacatgcctcaggctcccagtgcagagcctcccctggagtggccattccctgacctcttctcagagcctctctgccgaggtcccatcctccccctgcaggcaaatctcacaaggaagggaggatggcttcctactggtagcccctctgtcattttgcaggacagatactcaggctag

SEQ ID NO: 8145 - RNA, 1116 nt, synthetic construct
  misc_feature 1..1116: note = derived and/or modified sequence opt1 fromCREB3__Homo_sapiens__CCDS6588.1
  source 1..1116: mol_type = other RNA
atggagctggagctcgacgccggcgaccaggacctgctggccttcctcctggaggagagcggggacctgggcaccgcgcccgacgaggccgtgcgcgccccgctcgactgggccctgcccctgtccgaggtccccagcgactgggaggtggacgacctcctgtgctccctgctcagcccgcccgcctccctgaacatcctgagctccagcaacccctgcctcgtgcaccacgaccacacctactccctgccccgggagacggtcagcatggacctggagtccgagagctgccgcaaggaggggacccagatgacgccccagcacatggaggagctcgcggagcaggagatcgcccggctggtgctgaccgacgaggagaagtccctcctggagaaggagggcctgatcctcccggagaccctgcccctgaccaagaccgaggagcagatcctcaagcgcgtgcggcgcaagatccggaacaagcgcagcgcccaggagtcccggcgcaagaagaaggtctacgtcgggggcctggagagccgggtgctgaagtacaccgcccagaacatggagctccagaacaaggtgcagctgctggaggagcagaacctctccctgctggaccagctccgcaagctgcaggcgatggtgatcgagatcagcaacaagacgtccagcagctccacgtgcatcctggtgctcctggtcagcttctgcctgctcctggtgcccgccatgtactccagcgacacccggggctccctgcccgccgagcacggggtgctcagccgccagctgcgggccctgccgtccgaggacccctaccagctcgagctgcccgccctgcagagcgaggtccccaaggactccacccaccagtggctggacggcagcgactgcgtgctccaggcgccggggaacacctcctgcctgctgcactacatgccccaggcccccagcgccgagcccccgctcgagtggcccttccccgacctgttctccgagcccctgtgccgcggcccgatcctccccctgcaggccaacctgacccggaagggcgggtggctccccaccggcagcccctccgtgatcctgcaggaccgctacagcgggtga

SEQ ID NO: 8146 - RNA, 1116 nt, synthetic construct
  misc_feature 1..1116: note = derived and/or modified sequence opt2 fromCREB3__Homo_sapiens__CCDS6588.1
  source 1..1116: mol_type = other RNA
atggagctcgagctcgacgccggcgaccaggacctcctcgccttcctcctcgaggagtccggcgacctcggcaccgcccccgacgaggccgtccgcgcccccctcgactgggccctccccctctccgaggtcccctccgactgggaggtcgacgacctcctctgctccctcctctccccccccgcctccctcaacatcctctcctcctccaacccctgcctcgtccaccacgaccacacctactccctcccccgcgagaccgtctccatggacctcgagtccgagtcctgccgcaaggagggcacccagatgaccccccagcacatggaggagctcgccgagcaggagatcgcccgcctcgtcctcaccgacgaggagaagtccctcctcgagaaggagggcctcatcctccccgagaccctccccctcaccaagaccgaggagcagatcctcaagcgcgtccgccgcaagatccgcaacaagcgctccgcccaggagtcccgccgcaagaagaaggtctacgtcggcggcctcgagtcccgcgtcctcaagtacaccgcccagaacatggagctccagaacaaggtccagctcctcgaggagcagaacctctccctcctcgaccagctccgcaagctccaggccatggtcatcgagatctccaacaagacctcctcctcctccacctgcatcctcgtcctcctcgtctccttctgcctcctcctcgtccccgccatgtactcctccgacacccgcggctccctccccgccgagcacggcgtcctctcccgccagctccgcgccctcccctccgaggacccctaccagctcgagctccccgccctccagtccgaggtccccaaggactccacccaccagtggctcgacggctccgactgcgtcctccaggcccccggcaacacctcctgcctcctccactacatgccccaggccccctccgccgagccccccctcgagtggcccttccccgacctcttctccgagcccctctgccgcggccccatcctccccctccaggccaacctcacccgcaagggcggctggctccccaccggctccccctccgtcatcctccaggaccgctactccggctga

SEQ ID NO: 8147 - RNA, 1116 nt, synthetic construct
  misc_feature 1..1116: note = derived and/or modified sequence opt3 fromCREB3__Homo_sapiens__CCDS6588.1
  source 1..1116: mol_type = other RNA
atggagctggaactcgacgccggcgatcaggaccttctggctttcttgttagaggaaagcggggatctgggaaccgcacccgacgaggccgtgagagcgcctctagattgggctctcccactgtccgaagtcccgtctgactgggaggttgatgaccttctgtgctcattgctcagtccccctgccagcctgaacatcctgtcctcttcgaatccatgtctcgtgcaccatgatcacacatactcattacccagggagactgtaagcatggacctggaaagtgagtcctgccggaaggaaggtacgcaaatgacccctcagcatatggaggagcttgcagaacaggagattgcccgcttggtgctgacagatgaagagaaatctctactcgaaaaggagggcctgatacttccagagactctgcccttgaccaaaacagaggaacagatcctcaagcgagtccgtagaaaaattaggaacaagcggagcgctcaagaatcccgcagaaagaaaaaggtgtatgttgggggactggagtcaagggtgttaaaatacaccgcacagaatatggaactgcagaacaaggtccagctccttgaggagcaaaatctgagtttgctagaccagctgcggaaactccaggccatggtgatcgaaattagcaacaagacttcttcctcaagcacatgtatcctggtacttctggttagtttttgcttgctcctggtgcctgctatgtattcttccgatacccgcggcagcttaccagccgagcacggtgtcctgtcgcgacagctaagagcgctcccgtctgaagacccctaccaactggagcttcctgcattgcagtccgaagtgccaaaggactcaacgcatcagtggctggatgggagtgactgtgtgctccaagcccccggaaatactagctgcctgcttcactatatgcctcaggctccatccgccgagcccccgctggagtggcctttccccgatttgttttctgaaccactctgtaggggccctatactgcccttacaggcaaacctgacccggaaaggcgggtggctaccaacaggaagcccctcagtcatcctccaggaccgttacagtggttga

SEQ ID NO: 8148 - RNA, 1116 nt, synthetic construct
  misc_feature 1..1116: note = derived and/or modified sequence opt4 fromCREB3__Homo_sapiens__CCDS6588.1
  source 1..1116: mol_type = other RNA
atggagctggagctggacgccggcgaccaggacctgctggccttcctgctggaggagagcggcgacctgggcaccgcccccgacgaggccgtgagagcccccctggactgggccctgcccctgagcgaggtgcccagcgactgggaggtggacgacctgctgtgcagcctgctgagcccccccgccagcctgaacatcctgagcagcagcaacccctgcctggtgcaccacgaccacacctacagcctgcccagagagaccgtgagcatggacctggagagcgagagctgcagaaaggagggcacccagatgaccccccagcacatggaggagctggccgagcaggagatcgccagactggtgctgaccgacgaggagaagagcctgctggagaaggagggcctgatcctgcccgagaccctgcccctgaccaagaccgaggagcagatcctgaagagagtgagaagaaagatcagaaacaagagaagcgcccaggagagcagaagaaagaagaaggtgtacgtgggcggcctggagagcagagtgctgaagtacaccgcccagaacatggagctgcagaacaaggtgcagctgctggaggagcagaacctgagcctgctggaccagctgagaaagctgcaggccatggtgatcgagatcagcaacaagaccagcagcagcagcacctgcatcctggtgctgctggtgagcttctgcctgctgctggtgcccgccatgtacagcagcgacaccagaggcagcctgcccgccgagcacggcgtgctgagcagacagctgagagccctgcccagcgaggacccctaccagctggagctgcccgccctgcagagcgaggtgcccaaggacagcacccaccagtggctggacggcagcgactgcgtgctgcaggcccccggcaacaccagctgcctgctgcactacatgccccaggcccccagcgccgagccccccctggagtggcccttccccgacctgttcagcgagcccctgtgcagaggccccatcctgcccctgcaggccaacctgaccagaaagggcggctggctgcccaccggcagccccagcgtgatcctgcaggacagatacagcggctga

SEQ ID NO: 8149 - RNA, 1116 nt, synthetic construct
  misc_feature 1..1116: note = derived and/or modified sequence opt5 fromCREB3__Homo_sapiens__CCDS6588.1
  source 1..1116: mol_type = other RNA
atggagctggaactcgacgccggcgatcaggacctgcttgctttcctgctcgaggaaagcggggatctgggaaccgcccccgacgaggcggtgagagctcctcttgattgggccctgccgctctccgaagtcccctctgactgggaggttgatgacctgctgtgcagcctcctgtcccctcccgcctctcttaacatcctgagctcctctaatccttgtctcgtgcaccatgatcacacatacagcctgccccgggagacggtgtccatggaccttgaaagcgagtcttgccgcaaggaaggcacccaaatgacacctcagcatatggaggagctggctgaacaggagattgccagactcgtcctgaccgatgaagagaaatccctgctcgaaaaggaggggctgatccttccggagacactgcccctcaccaaaacagaggaacagattctgaagcgggtgcgcagaaaaatccggaacaagcgcagcgctcaagaatctagacggaagaaaaaggtttatgtgggaggccttgagtcccgcgtcctgaaatacaccgcccagaatatggaactccagaacaaggtgcagctgctggaggagcaaaatctcagcctgcttgaccagctgagaaaactccaggcgatggttattgaaatctctaacaagacgtccagctcctctacctgtatcctggtgcttctggtcagcttttgcctcctgctggtgcctgccatgtattccagcgatacacgggggtctctccccgctgagcacggagtgctgtcccgccagcttagagccctgcctagcgaagacccctaccaactcgagctgccggctctgcagtctgaagtccctaaggacagcacccatcagtggcttgatggctccgactgtgttctccaagcccccggcaatacatcttgcctgctgcactatatgcctcaggcgcccagcgccgagccccctctcgagtggccgttccccgatctgttttccgaacctctttgtcgggggcccattctgcctctccaggctaacctgacccgcaaaggaggctggctgcccacggggagcccgtctgtgatccttcaggacagatactccggatga

SEQ ID NO: 8150 - protein, 519 aa, synthetic construct
  REGION 1..519: note = CREB3L1__Homo_sapiens__Q96BA8
MDAVLEPFPADRLFPGSSFLDLGDLNESDFLNNAHFPEHLDHFTENMEDFSNDLFSSFFDDPVLDEKSPLLDMELDSPTPGIQAEHSYSLSGDSAPQSPLVPIKMEDTTQDAEHGAWALGHKLCSIMVKQEQSPELPVDPLAAPSAMAAAAAMATTPLLGLSPLSRLPIPHQAPGEMTQLPVIKAEPLEVNQFLKVTPEDLVQMPPTPPSSHGSDSDGSQSPRSLPPSSPVRPMARSSTAISTSPLLTAPHKLQGTSGPLLLTEEEKRTLIAEGYPIPTKLPLTKAEEKALKRVRRKIKNKISAQESRRKKKEYVECLEKKVETFTSENNELWKKVETLENANRTLLQQLQKLQTLVTNKISRPYKMAATQTGTCLMVAALCFVLVLGSLVPCLPEFSSGSQTVKEDPLAADGVYTASQMPSRSLLFYDDGAGLWEDGRSTLLPMEPPDGWEINPGGPAEQRPRDHLQHDHLDSTHETTKYLSEAWPKDGGNGTSPDFSHSKEWFHDRDLGPNTTIKLS

SEQ ID NO: 8151 - RNA, 1560 nt, synthetic construct
  misc_feature 1..1560: note = CREB3L1__Homo_sapiens__CCDS53620.1
  source 1..1560: mol_type = other RNA
atggacgccgtcttggaacccttcccggccgacaggctgttccccggatccagcttcctggacttgggggatctgaacgagtcggacttcctcaacaatgcgcactttcctgagcacctggaccactttacggagaacatggaggacttctccaatgacctgttcagcagcttctttgatgaccctgtgctggatgagaagagccctctattggacatggaactggactcccctacgccaggcatccaggcggagcacagctactccctgagcggcgactcagcgccccagagcccccttgtgcccatcaagatggaggacaccacccaagatgcagagcatggagcatgggcgctgggacacaaactgtgctccatcatggtgaagcaggagcagagcccggagctgcccgtggaccctctggctgccccctcggccatggctgccgcggccgccatggccaccaccccgctgctgggcctcagccccttgtccaggctgcccatcccccaccaggccccgggagagatgactcagctgccagtgatcaaagcagagcctctggaggtgaaccagttcctcaaagtgacaccggaggacctggtgcagatgcctccgacgccccccagcagccatggcagtgacagcgacggctcccagagtccccgctctctgcccccctccagccctgtcaggcccatggcgcgctcctccacggccatctccacctccccactcctcactgcccctcacaaattacaggggacatcagggccactgctcctgacagaggaggagaagcggaccctgattgctgagggctaccccatccccacaaaactccccctcaccaaagccgaggagaaggccttgaagagagtccggaggaaaatcaagaacaagatctcagcccaggagagccgtcgtaagaagaaggagtatgtggagtgtctagaaaagaaggtggagacatttacatctgagaacaatgaactgtggaagaaggtggagaccctggagaatgccaacaggaccctgctccagcagctgcagaaactccagactctggtcaccaacaagatctccagaccttacaagatggccgccacccagactgggacctgcctcatggtggcagccttgtgctttgttctggtgctgggctccctcgtgccctgccttcccgagttctcctccggctcccagactgtgaaggaagaccccctggccgcagacggcgtctacacggccagccagatgccctcccgaagcctcctattctacgatgacggggcaggcttatgggaagatggccgcagcaccctgctgcccatggagcccccagatggctgggaaatcaaccccggggggccggcagagcagcggccccgggaccacctgcagcatgatcacctggacagcacccacgagaccaccaagtacctgagtgaggcctggcctaaagacggtggaaacggcaccagccccgacttctcccactccaaggagtggttccacgacagggatctgggccccaacaccaccatcaaactctcctag

SEQ ID NO: 8152 - RNA, 1560 nt, synthetic construct
  misc_feature 1..1560: note = derived and/or modified sequence opt1 fromCREB3L1__Homo_sapiens__CCDS53620.1
  source 1..1560: mol_type = other RNA
atggacgccgtgctggagcccttcccggccgaccgcctcttccccggcagctccttcctggacctgggggacctcaacgagagcgacttcctgaacaacgcgcacttccccgagcacctggaccacttcaccgagaacatggaggacttctccaacgacctcttcagctccttcttcgacgaccccgtcctggacgagaagtccccgctgctcgacatggagctggacagccccacccccggcatccaggccgagcacagctactccctgagcggggactccgcgccccagagcccgctcgtgcccatcaagatggaggacacgacccaggacgccgagcacggcgcctgggccctggggcacaagctgtgctccatcatggtgaagcaggagcagagccccgagctccccgtcgacccgctggccgccccctccgccatggcggccgccgccgccatggcgaccacgcccctgctcggcctgagccccctgtcccggctcccgatcccccaccaggcccccggcgagatgacccagctgcccgtgatcaaggccgagccgctggaggtgaaccagttcctcaaggtcacccccgaggacctggtgcagatgccgcccaccccgcccagctcccacgggagcgacagcgacggctcccagagcccccgctccctgccgcccagctcccccgtgcggcccatggcccgcagctccaccgccatcagcacgagccccctcctgaccgcgccccacaagctgcaggggacctccggccccctcctgctgaccgaggaggagaagcggacgctcatcgccgaggggtaccccatcccgaccaagctgcccctgaccaaggccgaggagaaggccctcaagcgcgtccggcgcaagatcaagaacaagatctccgcccaggagagccggcgcaagaagaaggagtacgtggagtgcctggagaagaaggtggagaccttcacgtccgagaacaacgagctgtggaagaaggtcgagaccctcgagaacgcgaaccggaccctgctgcagcagctccagaagctgcagaccctggtgacgaacaagatcagccgcccctacaagatggccgccacccagaccgggacctgcctcatggtggccgccctgtgcttcgtcctggtgctcggctccctggtgccctgcctgccggagttcagctccggcagccagacggtcaaggaggaccccctggcggccgacggcgtgtacaccgcctcccagatgcccagccggagcctcctgttctacgacgacggggccggcctgtgggaggacggccgctccaccctcctgcccatggagccgcccgacgggtgggagatcaaccccggcgggcccgcggagcagcggccgcgcgaccacctccagcacgaccacctggacagcacccacgagacgaccaagtacctgtccgaggcctggcccaaggacggcgggaacggcaccagccccgacttctcccacagcaaggagtggttccacgaccgggacctgggccccaacaccacgatcaagctctcctga

SEQ ID NO: 8153 - RNA, 1560 nt, synthetic construct
  misc_feature 1..1560: note = derived and/or modified sequence opt2 fromCREB3L1__Homo_sapiens__CCDS53620.1
  source 1..1560: mol_type = other RNA
atggacgccgtcctcgagcccttccccgccgaccgcctcttccccggctcctccttcctcgacctcggcgacctcaacgagtccgacttcctcaacaacgcccacttccccgagcacctcgaccacttcaccgagaacatggaggacttctccaacgacctcttctcctccttcttcgacgaccccgtcctcgacgagaagtcccccctcctcgacatggagctcgactcccccacccccggcatccaggccgagcactcctactccctctccggcgactccgccccccagtcccccctcgtccccatcaagatggaggacaccacccaggacgccgagcacggcgcctgggccctcggccacaagctctgctccatcatggtcaagcaggagcagtcccccgagctccccgtcgaccccctcgccgccccctccgccatggccgccgccgccgccatggccaccacccccctcctcggcctctcccccctctcccgcctccccatcccccaccaggcccccggcgagatgacccagctccccgtcatcaaggccgagcccctcgaggtcaaccagttcctcaaggtcacccccgaggacctcgtccagatgccccccacccccccctcctcccacggctccgactccgacggctcccagtccccccgctccctccccccctcctcccccgtccgccccatggcccgctcctccaccgccatctccacctcccccctcctcaccgccccccacaagctccagggcacctccggccccctcctcctcaccgaggaggagaagcgcaccctcatcgccgagggctaccccatccccaccaagctccccctcaccaaggccgaggagaaggccctcaagcgcgtccgccgcaagatcaagaacaagatctccgcccaggagtcccgccgcaagaagaaggagtacgtcgagtgcctcgagaagaaggtcgagaccttcacctccgagaacaacgagctctggaagaaggtcgagaccctcgagaacgccaaccgcaccctcctccagcagctccagaagctccagaccctcgtcaccaacaagatctcccgcccctacaagatggccgccacccagaccggcacctgcctcatggtcgccgccctctgcttcgtcctcgtcctcggctccctcgtcccctgcctccccgagttctcctccggctcccagaccgtcaaggaggaccccctcgccgccgacggcgtctacaccgcctcccagatgccctcccgctccctcctcttctacgacgacggcgccggcctctgggaggacggccgctccaccctcctccccatggagccccccgacggctgggagatcaaccccggcggccccgccgagcagcgcccccgcgaccacctccagcacgaccacctcgactccacccacgagaccaccaagtacctctccgaggcctggcccaaggacggcggcaacggcacctcccccgacttctcccactccaaggagtggttccacgaccgcgacctcggccccaacaccaccatcaagctctcctga

SEQ ID NO: 8154 - RNA, 1560 nt, synthetic construct
  misc_feature 1..1560: note = derived and/or modified sequence opt3 fromCREB3L1__Homo_sapiens__CCDS53620.1
  source 1..1560: mol_type = other RNA
atggacgccgtgctggagcccttccctgctgatagactctttccaggcagctccttccttgacctgggggatttgaacgaatctgactttttaaataacgcacacttcccggagcatctggatcactttaccgaaaatatggaggacttctcaaacgatctatttagtagcttctttgacgatcccgtcctcgacgaaaagtcccctctgcttgatatggagctggactctccaacacccggaatccaggccgagcattcgtactcattgagcggtgatagtgcgcctcaatccccactcgttcccattaaaatggaagacactacgcaggacgctgagcacggcgcctgggcactggggcataagctgtgctctataatggtgaaacaggaacagagccctgagctcccagtagatccgttagccgctccctccgcaatggccgctgccgcggcaatggccaccacacctctgcttggattgtcaccactgagtaggctacccatccctcaccaagctccaggcgagatgactcagctccccgtgattaaggccgaaccgctggaggtcaatcagttccttaaagtgacccctgaagacctggttcagatgcccccaacacctcccagctctcacggttccgattcagacgggagccaaagtccacggtctttgcccccttccagcccagtgcgcccgatggcacgatcgtctaccgctatctccacttcacccctcctgacagcccctcataagttacagggaaccagtggcccactgctccttacggaggaagagaagcgtactctgattgcggagggctatcccatccctaccaaattgccactaacaaaggccgaagagaaagcactgaagagagtcaggcggaaaataaagaacaagatcagcgctcaggaatcccgcaggaaaaagaaagagtacgtggaatgtctcgagaagaaagtagagacttttacctctgaaaataacgagctgtggaagaaagttgaaacacttgagaatgccaacagaaccctgttgcagcaactccagaagctgcagacgttagtgactaataagattagccggccctataaaatggctgccacacaaaccgggacttgcctgatggtcgcagccctatgtttcgtgctcgtgctgggatcacttgtcccgtgcttgcctgaatttagttccggtagccagacagttaaggaggatccactggctgcggacggcgtgtacaccgcatctcagatgccctcacgcagtctcctgttctatgatgacggggccggactttgggaggatggccgaagcacgctgttgcctatggaacccccagacggttgggagatcaaccctgggggacccgctgaacagagaccaagggatcacctccaacatgaccacctggactccacccacgagacaactaaatacttatctgaggcctggccgaaggatggcggcaatgggacctcgcctgacttcagccattccaaagaatggtttcacgatcgggacctgggacccaacacaactattaagctatcatga

SEQ ID NO: 8155 - RNA, 1560 nt, synthetic construct
  misc_feature 1..1560: note = derived and/or modified sequence opt4 fromCREB3L1__Homo_sapiens__CCDS53620.1
  source 1..1560: mol_type = other RNA
atggacgccgtgctggagcccttccccgccgacagactgttccccggcagcagcttcctggacctgggcgacctgaacgagagcgacttcctgaacaacgcccacttccccgagcacctggaccacttcaccgagaacatggaggacttcagcaacgacctgttcagcagcttcttcgacgaccccgtgctggacgagaagagccccctgctggacatggagctggacagccccacccccggcatccaggccgagcacagctacagcctgagcggcgacagcgccccccagagccccctggtgcccatcaagatggaggacaccacccaggacgccgagcacggcgcctgggccctgggccacaagctgtgcagcatcatggtgaagcaggagcagagccccgagctgcccgtggaccccctggccgcccccagcgccatggccgccgccgccgccatggccaccacccccctgctgggcctgagccccctgagcagactgcccatcccccaccaggcccccggcgagatgacccagctgcccgtgatcaaggccgagcccctggaggtgaaccagttcctgaaggtgacccccgaggacctggtgcagatgccccccaccccccccagcagccacggcagcgacagcgacggcagccagagccccagaagcctgccccccagcagccccgtgagacccatggccagaagcagcaccgccatcagcaccagccccctgctgaccgccccccacaagctgcagggcaccagcggccccctgctgctgaccgaggaggagaagagaaccctgatcgccgagggctaccccatccccaccaagctgcccctgaccaaggccgaggagaaggccctgaagagagtgagaagaaagatcaagaacaagatcagcgcccaggagagcagaagaaagaagaaggagtacgtggagtgcctggagaagaaggtggagaccttcaccagcgagaacaacgagctgtggaagaaggtggagaccctggagaacgccaacagaaccctgctgcagcagctgcagaagctgcagaccctggtgaccaacaagatcagcagaccctacaagatggccgccacccagaccggcacctgcctgatggtggccgccctgtgcttcgtgctggtgctgggcagcctggtgccctgcctgcccgagttcagcagcggcagccagaccgtgaaggaggaccccctggccgccgacggcgtgtacaccgccagccagatgcccagcagaagcctgctgttctacgacgacggcgccggcctgtgggaggacggcagaagcaccctgctgcccatggagccccccgacggctgggagatcaaccccggcggccccgccgagcagagacccagagaccacctgcagcacgaccacctggacagcacccacgagaccaccaagtacctgagcgaggcctggcccaaggacggcggcaacggcaccagccccgacttcagccacagcaaggagtggttccacgacagagacctgggccccaacaccaccatcaagctgagctga

SEQ ID NO: 8156 - RNA, 1560 nt, synthetic construct
  misc_feature 1..1560: note = derived and/or modified sequence opt5 fromCREB3L1__Homo_sapiens__CCDS53620.1
  source 1..1560: mol_type = other RNA
atggacgccgtgctggagcccttccctgctgatagactctttccgggcagctccttcctggaccttggggatctgaacgaatctgactttctcaataacgcccacttccccgagcatctggatcactttaccgaaaatatggaggacttcagcaacgatctgttttcctctttctttgacgatcctgtccttgacgaaaagagccccctcctggatatggagctggactcccctacacccggaatccaggcggagcattcttacagcctctccggcgatagcgctcctcaatctccgctggttcccattaaaatggaagacacgacccaggacgccgagcacggggcctgggctcttggacataagctgtgctccatcatggtgaaacaggaacagagccctgagctccccgtggatcctctggccgctccctctgccatggcggccgctgccgctatggccacaaccccgcttctgggcctctcccctctgagccggctgcccattcctcaccaagcgcccggggagatgacacagctccccgtcatcaaggccgaacctctggaggtgaatcagttccttaaagttaccccggaagacctggtgcagatgccccctacacccccttcttcccacggaagcgattccgacggctctcaaagcccccgctccctcccgcctagctctcccgtcagacctatggctcggtccagcaccgccatttctacgagccccctgcttaccgctcctcataagctgcagggcacatccgggcccctcctgctgaccgaggaagagaagcgcacactcatcgccgagggatatccgatccctaccaaactgccccttacgaaggccgaagagaaagctctgaagagagtgcggcgcaaaattaagaacaagatctctgcgcaggaaagcagacggaaaaagaaagagtacgttgaatgtctcgagaagaaagtggagacatttacctccgaaaataacgagctgtggaagaaagtcgaaacacttgagaatgccaaccgcaccctgctccagcaactgcagaagctgcagaccctcgtgacaaataagattagcagaccctataaaatggctgccacgcaaaccggcacatgcctgatggtggccgctctttgtttcgtcctggttctcgggtctctggtgccttgcctgccggaattttccagcggatctcagaccgtgaaggaggatccccttgccgcggacggcgtctacacagcttcccagatgcctagccggtccctcctgttctatgatgacggggccggactgtgggaggatggccgctctaccctcctgcccatggaacctcccgacggctgggagatcaaccctgggggacccgccgaacagagaccgcgggatcaccttcaacatgaccacctggacagcacgcacgagacaaccaaatacctctccgaggcttggcctaaggatggcgggaatggaacctctcccgacttcagccattccaaagaatggtttcacgatcgcgacctgggccctaacacaaccattaagctgagctga

SEQ ID NO: 8157 - protein, 461 aa, synthetic construct
  REGION 1..461: note = CREB3L3__Homo_sapiens__Q68CJ9
MNTDLAAGKMASAACSMDPIDSFELLDLLFDRQDGILRHVELGEGWGHVKDQQVLPNPDSDDFLSSILGSGDSLPSSPLWSPEGSDSGISEDLPSDPQDTPPRSGPATSPAGCHPAQPGKGPCLSYHPGNSCSTTTPGPVIQVPEASVTIDLEMWSPGGRICAEKPADPVDLSPRCNLTVKDLLLSGSSGDLQQHHLGASYLLRPGAGHCQELVLTEDEKKLLAKEGITLPTQLPLTKYEERVLKKIRRKIRNKQSAQESRKKKKEYIDGLETRMSACTAQNQELQRKVLHLEKQNLSLLEQLKKLQAIVVQSTSKSAQTGTCVAVLLLSFALIILPSISPFGPNKTESPGDFAPVRVFSRTLHNDAASRVAADAVPGSEAPGPRPEADTTREESPGSPGADWGFQDTANLTNSTEELDNATLVLRNATEGLGQVALLDWVAPGPSTGSGRAGLEAAGDEL

SEQ ID NO: 8158 - RNA, 1386 nt, synthetic construct
  misc_feature 1..1386: note = CREB3L3__Homo_sapiens__CCDS12121.1
  source 1..1386: mol_type = other RNA
atgaatacggatttagctgctggaaagatggcttctgctgcctgctccatggaccccatcgacagctttgagctcctggatctcctgtttgaccggcaggacggcatcctgagacacgtggagctgggcgagggctggggtcacgtcaaggaccagcaggtcctgccaaaccccgactctgacgacttcctcagctccatcctgggctctggagactcactgcccagctccccactctggtcccccgaaggcagtgatagtggcatctccgaagacctcccctccgacccccaggacacccctccacgcagcggaccagccacctcccccgccggctgccatcctgcccagcctggcaaggggccctgcctctcctatcatcctggcaactcttgctccaccacaaccccagggccagtgatccaagtacctgaagcctctgtgaccatagacctggaaatgtggagcccaggaggaaggatctgtgctgagaagccggctgatccggtggacctgtccccacgatgcaatctcaccgtgaaagacctcctcctttcgggcagcagtggggacctgcaacagcatcacctgggggcctcctacctcctgcgacctggggctgggcactgtcaggagctggtgctcaccgaggatgagaagaagctgctggctaaagaaggcatcaccctgcccactcagctgcccctcactaagtacgaggagcgagtgctgaaaaaaatccgccggaaaatccggaacaagcagtcggcgcaagaaagcaggaagaagaagaaggaatatatcgatggcctggagactcggatgtcagcttgcactgctcagaatcaggagttacagaggaaagtcttgcatctcgagaagcaaaacctgtccctcttggagcaactgaagaaactccaggccattgtggtgcagtccaccagcaagtcagcccagacaggcacctgtgtcgcagtcctgttgctgtcctttgccctcatcatcctcccctccatcagcccttttggccccaacaaaaccgagagccctggggactttgcgcctgtacgagtgttctccagaactttgcacaacgatgctgcctcccgcgtggctgctgatgctgtgccaggctccgaggccccaggaccccgacccgaggctgacacaacccgagaagagtctccaggaagccccggggcagactggggcttccaggacaccgcgaacctgaccaattcgacggaggagctggacaacgccaccctggtcctgaggaatgcaacagaggggctgggccaggtcgccctgctggactgggtggcgcctgggccgagcactggctcaggacgtgcagggctggaggcggcgggagacgagctgtga

SEQ ID NO: 8159 - RNA, 1386 nt, synthetic construct
  misc_feature 1..1386: note = derived and/or modified sequence opt1 fromCREB3L3__Homo_sapiens__CCDS12121.1
  source 1..1386: mol_type = other RNA
atgaacaccgacctggccgccggcaagatggcgagcgccgcctgctccatggaccccatcgacagcttcgagctcctggacctcctgttcgaccgccaggacgggatcctgcggcacgtggagctgggcgaggggtggggccacgtcaaggaccagcaggtcctcccgaaccccgactccgacgacttcctgagctccatcctggggagcggcgactccctccccagcagccccctgtggtccccggagggctccgacagcgggatctccgaggacctgcccagcgacccccaggacacgcccccgcgctccggccccgccaccagccccgccgggtgccaccccgcgcagccgggcaaggggccctgcctctcctaccaccccggcaacagctgctccaccaccacccccggcccggtgatccaggtgcccgaggccagcgtgacgatcgacctggagatgtggagccccgggggccggatctgcgccgagaagcccgccgacccggtggacctgagcccccgctgcaacctcaccgtcaaggacctgctgctctccgggtccagcggcgacctgcagcagcaccacctgggcgcgtcctacctcctgcggcccggggccggccactgccaggagctggtgctcaccgaggacgagaagaagctgctggccaaggaggggatcaccctccccacgcagctgccgctgaccaagtacgaggagcgcgtgctcaagaagatccggcgcaagatccggaacaagcagagcgcccaggagtcccgcaagaagaagaaggagtacatcgacggcctggagacccggatgagcgcctgcaccgcgcagaaccaggagctgcagcgcaaggtcctccacctggagaagcagaacctgtccctcctggagcagctgaagaagctccaggccatcgtggtgcagagcacgtccaagagcgcccagaccgggacctgcgtcgccgtgctgctgctctccttcgccctgatcatcctgcccagcatctcccccttcggccccaacaagaccgagagcccgggcgacttcgcgcccgtgcgggtcttctcccgcacgctccacaacgacgccgccagccgggtggccgccgacgcggtgcccgggtccgaggccccgggcccccgccccgaggccgacaccacccgggaggagagccccgggagcccgggcgccgactgggggttccaggacaccgccaacctgacgaactccaccgaggagctggacaacgcgaccctcgtcctgcgcaacgccaccgagggcctgggccaggtggccctgctcgactgggtggcccccgggcccagcacgggctccgggcgggcgggcctggaggccgccggggacgagctgtga

SEQ ID NO: 8160 - RNA, 1386 nt, synthetic construct
  misc_feature 1..1386: note = derived and/or modified sequence opt2 fromCREB3L3__Homo_sapiens__CCDS12121.1
  source 1..1386: mol_type = other RNA
atgaacaccgacctcgccgccggcaagatggcctccgccgcctgctccatggaccccatcgactccttcgagctcctcgacctcctcttcgaccgccaggacggcatcctccgccacgtcgagctcggcgagggctggggccacgtcaaggaccagcaggtcctccccaaccccgactccgacgacttcctctcctccatcctcggctccggcgactccctcccctcctcccccctctggtcccccgagggctccgactccggcatctccgaggacctcccctccgacccccaggacacccccccccgctccggccccgccacctcccccgccggctgccaccccgcccagcccggcaagggcccctgcctctcctaccaccccggcaactcctgctccaccaccacccccggccccgtcatccaggtccccgaggcctccgtcaccatcgacctcgagatgtggtcccccggcggccgcatctgcgccgagaagcccgccgaccccgtcgacctctccccccgctgcaacctcaccgtcaaggacctcctcctctccggctcctccggcgacctccagcagcaccacctcggcgcctcctacctcctccgccccggcgccggccactgccaggagctcgtcctcaccgaggacgagaagaagctcctcgccaaggagggcatcaccctccccacccagctccccctcaccaagtacgaggagcgcgtcctcaagaagatccgccgcaagatccgcaacaagcagtccgcccaggagtcccgcaagaagaagaaggagtacatcgacggcctcgagacccgcatgtccgcctgcaccgcccagaaccaggagctccagcgcaaggtcctccacctcgagaagcagaacctctccctcctcgagcagctcaagaagctccaggccatcgtcgtccagtccacctccaagtccgcccagaccggcacctgcgtcgccgtcctcctcctctccttcgccctcatcatcctcccctccatctcccccttcggccccaacaagaccgagtcccccggcgacttcgcccccgtccgcgtcttctcccgcaccctccacaacgacgccgcctcccgcgtcgccgccgacgccgtccccggctccgaggcccccggcccccgccccgaggccgacaccacccgcgaggagtcccccggctcccccggcgccgactggggcttccaggacaccgccaacctcaccaactccaccgaggagctcgacaacgccaccctcgtcctccgcaacgccaccgagggcctcggccaggtcgccctcctcgactgggtcgcccccggcccctccaccggctccggccgcgccggcctcgaggccgccggcgacgagctctga

SEQ ID NO: 8161 - RNA, 1386 nt, synthetic construct
  misc_feature 1..1386: note = derived and/or modified sequence opt3 fromCREB3L3__Homo_sapiens__CCDS12121.1
  source 1..1386: mol_type = other RNA
atgaacaccgacctggccgctggcaagatggcaagcgccgcgtgctccatggatcccatcgactctttcgagctccttgatctgttgtttgacagacaggatgggattttaaggcacgtggaactgggagagggttggggccatgtcaaagaccaacaggttctacctaatccagattcagacgatttcctcagtagcatactggggtccggagactctcttccgtcgtcacccctgtggagccctgaaggcagtgattccggtatctctgaggacttgccaagcgatccccaggacacacctccacggtccgggcccgctacttcaccagccggatgtcaccctgcacagccgggcaagggcccctgcctcagttaccatcctgggaacagctgttctacgaccacaccaggacccgtgattcaagtacctgaagcctccgtgactatcgacctggagatgtggtcaccaggtggccgcatttgcgctgagaaacccgcagatccggtcgacctgagccctcgatgtaatctcaccgtgaaggatttactgcttagtgggtcttccggagacttgcagcagcaccatctgggcgccagctatctactccgtcccggtgctgggcactgccaggaactggttcttacagaggatgagaaaaagctgttggccaaggaaggaatcaccctcccaactcaactgcctttaacaaaatacgaggaaagagtgctgaagaaaataaggcggaagatccgcaacaaacagtcggcgcaggagtctagaaagaagaaaaaggaatatattgacggcctcgagaccaggatgtccgcatgtacggcccagaatcaagaacttcagcggaaagtcctgcacttggagaagcagaacctatcactgctcgagcaactgaaaaagctgcaggctatcgtggtacagagtactagcaaatccgcccagaccggcacatgcgttgcagtgcttttgctctcttttgctctgattatcttacccagcatatcaccattcgggcccaataagactgaaagtcctggagattttgccccagtccgcgtgttctcccgaaccctgcataacgacgcggccagcagagtggcagctgatgccgtcccgggttctgaggctcccggccctaggccagaagccgacacaacccgggaggaatcacccgggagtcctggagcagattggggctttcaagacacggccaatctaactaacagcacagaggagctcgacaatgctaccctggttcttcgtaacgcgactgaaggtttgggccaggtggcactgctcgattgggtagccccagggccctccacaggatctggccgcgctgggctggaggccgcaggagacgaactttga

SEQ ID NO: 8162 - RNA, 1386 nt, synthetic construct
  misc_feature 1..1386: note = derived and/or modified sequence opt4 fromCREB3L3__Homo_sapiens__CCDS12121.1
  source 1..1386: mol_type = other RNA
atgaacaccgacctggccgccggcaagatggccagcgccgcctgcagcatggaccccatcgacagcttcgagctgctggacctgctgttcgacagacaggacggcatcctgagacacgtggagctgggcgagggctggggccacgtgaaggaccagcaggtgctgcccaaccccgacagcgacgacttcctgagcagcatcctgggcagcggcgacagcctgcccagcagccccctgtggagccccgagggcagcgacagcggcatcagcgaggacctgcccagcgacccccaggacaccccccccagaagcggccccgccaccagccccgccggctgccaccccgcccagcccggcaagggcccctgcctgagctaccaccccggcaacagctgcagcaccaccacccccggccccgtgatccaggtgcccgaggccagcgtgaccatcgacctggagatgtggagccccggcggcagaatctgcgccgagaagcccgccgaccccgtggacctgagccccagatgcaacctgaccgtgaaggacctgctgctgagcggcagcagcggcgacctgcagcagcaccacctgggcgccagctacctgctgagacccggcgccggccactgccaggagctggtgctgaccgaggacgagaagaagctgctggccaaggagggcatcaccctgcccacccagctgcccctgaccaagtacgaggagagagtgctgaagaagatcagaagaaagatcagaaacaagcagagcgcccaggagagcagaaagaagaagaaggagtacatcgacggcctggagaccagaatgagcgcctgcaccgcccagaaccaggagctgcagagaaaggtgctgcacctggagaagcagaacctgagcctgctggagcagctgaagaagctgcaggccatcgtggtgcagagcaccagcaagagcgcccagaccggcacctgcgtggccgtgctgctgctgagcttcgccctgatcatcctgcccagcatcagccccttcggccccaacaagaccgagagccccggcgacttcgcccccgtgagagtgttcagcagaaccctgcacaacgacgccgccagcagagtggccgccgacgccgtgcccggcagcgaggcccccggccccagacccgaggccgacaccaccagagaggagagccccggcagccccggcgccgactggggcttccaggacaccgccaacctgaccaacagcaccgaggagctggacaacgccaccctggtgctgagaaacgccaccgagggcctgggccaggtggccctgctggactgggtggcccccggccccagcaccggcagcggcagagccggcctggaggccgccggcgacgagctgtga

SEQ ID NO: 8163 - RNA, 1386 nt, synthetic construct
  misc_feature 1..1386: note = derived and/or modified sequence opt5 fromCREB3L3__Homo_sapiens__CCDS12121.1
  source 1..1386: mol_type = other RNA
atgaacaccgacctggccgctggcaagatggccagcgcggcttgctccatggatcccatcgactctttcgagctcctggatcttctgtttgacagacaggatgggattctccggcacgtggaactgggagagggctgggggcatgtcaaagaccaacaggttcttcctaatccggatagcgacgatttcctgtcctctatcctcggaagcggcgactccctgccctctagccctctgtggtcccccgaagggagcgattctggaatttccgaggacctccctagcgatccccaggacacacctccgcgctctggccccgccacgtcccctgccggctgtcaccccgctcagcctgggaagggaccctgcctgagctaccatccgggcaactcttgttccaccacaacccctgggcccgtgatccaagtgcctgaagccagcgtcacaattgaccttgagatgtggtcccccggaggcagaatctgcgctgagaaacccgccgatcctgtggacctgtctccgcggtgtaatctcaccgttaaggatctgcttctgagcgggtccagcggagacctccagcagcaccatctgggcgcgtcttatctgctccgccccggcgccgggcactgccaggaactggtgcttacagaggatgagaaaaagctgctcgctaaggaaggaatcaccctgcctacgcaacttcccctgaccaaatacgaggaaagagtcctcaagaaaattcggcgcaagatcagaaacaaacagtccgcccaggagagccggaagaagaaaaaggaatatattgacggcctggagacacgcatgtctgcttgtaccgcccagaatcaagaactgcagagaaaagtgctccacctggagaagcagaaccttagcctgctcgagcaactgaaaaagctgcaggcgatcgttgtgcagtccacatctaaaagcgcccagaccgggacgtgcgtcgctgtgcttctcctgtcctttgccctgattatcctccctagcatttctcccttcggaccgaataagacagaatcccctggcgattttgctcccgtgcgggtcttcagccgcaccctgcataacgacgccgcctctagagttgctgcggatgccgtgcctgggtccgaggctcccggacctcggcccgaagccgacacaacccgcgaggaaagcccgggctcccctggcgccgattgggggtttcaagacaccgctaatcttacaaactctacggaggagctggacaatgccaccctcgtgctgagaaacgcgacagaaggactgggccaggtcgcccttctcgattgggtggctcccgggcccagcaccggatccggccgggccgggctggaggctgccggcgacgaactgtga

SEQ ID NO: 8164 - protein, 395 aa, synthetic construct
  REGION 1..395: note = CREB3L4__Homo_sapiens__Q8TEY5
MDLGIPDLLDAWLEPPEDIFSTGSVLELGLHCPPPEVPVTRLQEQGLQGWKSGGDRGCGLQESEPEDFLKLFIDPNEVYCSEASPGSDSGISEDPCHPDSPPAPRATSSPMLYEVVYEAGALERMQGETGPNVGLISIQLDQWSPAFMVPDSCMVSELPFDAHAHILPRAGTVAPVPCTTLLPCQTLFLTDEEKRLLGQEGVSLPSHLPLTKAEERVLKKVRRKIRNKQSAQDSRRRKKEYIDGLESRVAACSAQNQELQKKVQELERHNISLVAQLRQLQTLIAQTSNKAAQTSTCVLILLFSLALIILPSFSPFQSRPEAGSEDYQPHGVTSRNILTHKDVTENLETQVVESRLREPPGAKDANGSTRTLLEKMGGKPRPSGRIRSVLHADEM

SEQ ID NO: 8165 - RNA, 1188 nt, synthetic construct
  misc_feature 1..1188: note = CREB3L4__Homo_sapiens__CCDS1056.1
  source 1..1188: mol_type = other RNA
atggatctcggaatccctgacctgctggacgcgtggctggagcccccagaggatatcttctcgacaggatccgtcctggagctgggactccactgcccccctccagaggttccggtaactaggctacaggaacagggactgcaaggctggaagtccggtggggaccgtggctgtggccttcaagagagtgagcctgaagatttcttgaagcttttcattgatcccaatgaggtgtactgctcagaagcatctcctggcagtgacagtggcatctctgaggacccctgccatccagacagtccccctgcccccagggcaaccagttctcctatgctctatgaggttgtctatgaggcaggggccctggagaggatgcagggggaaactgggccaaatgtaggccttatctccatccagctagatcagtggagcccagcatttatggtgcctgattcctgcatggtcagtgagctgccctttgatgctcatgcccacatcctgcccagagcaggcaccgtagccccagtgccctgtacaaccctgctgccctgtcaaaccctgttcctgaccgatgaggagaagcgtctgctggggcaggaaggggtttccctgccctctcacctgcccctcaccaaggcagaggagagggtcctcaagaaggtcaggaggaaaatccgtaacaagcagtcagctcaggacagtcggcggcggaagaaggagtacattgatgggctggagagcagggtggcagcctgttctgcacagaaccaagaattacagaaaaaagtccaggagctggagaggcacaacatctccttggtagctcagctccgccagctgcagacgctaattgctcaaacttccaacaaagctgcccagaccagcacttgtgttttgattcttcttttttccctggctctcatcatcctgcccagcttcagtccattccagagtcgaccagaagctgggtctgaggattaccagcctcacggagtgacttccagaaatatcctgacccacaaggacgtaacagaaaatctggagacccaagtggtagagtccagactgagggagccacctggagccaaggatgcaaatggctcaacaaggacactgcttgagaagatgggagggaagccaagacccagtgggcgcatccggtccgtgctgcatgcagatgagatgtga

SEQ ID NO: 8166 - RNA, 1188 nt, synthetic construct
  misc_feature 1..1188: note = derived and/or modified sequence opt1 fromCREB3L4__Homo_sapiens__CCDS1056.1
  source 1..1188: mol_type = other RNA
atggacctgggcatccccgacctcctggacgcctggctggagccgcccgaggacatcttcagcaccgggtccgtgctcgagctgggcctgcactgcccgcccccggaggtccccgtgacccgcctccaggagcaggggctgcagggctggaagtccgggggcgaccggggctgcgggctgcaggagagcgagcccgaggacttcctcaagctgttcatcgaccccaacgaggtgtactgcagcgaggcctccccgggcagcgactccgggatcagcgaggacccctgccaccccgactccccgcccgcgccccgcgccacgagctcccccatgctgtacgaggtcgtgtacgaggccggcgccctcgagcggatgcagggggagaccggccccaacgtgggcctgatcagcatccagctggaccagtggtcccccgccttcatggtccccgacagctgcatggtgtccgagctccccttcgacgcgcacgcccacatcctgccccgcgccgggaccgtggccccggtcccctgcaccacgctgctcccctgccagaccctgttcctgaccgacgaggagaagcggctcctgggccaggagggggtgagcctgccctcccacctcccgctgaccaaggcggaggagcgcgtgctgaagaaggtccggcgcaagatccggaacaagcagagcgcccaggactcccgccggcgcaagaaggagtacatcgacggcctcgagagccgggtggccgcctgcagcgcccagaaccaggagctgcagaagaaggtgcaggagctggagcgccacaacatctccctcgtcgcgcagctgcggcagctgcagacgctcatcgcccagaccagcaacaaggccgcccagacctccacgtgcgtgctgatcctcctgttcagcctggccctgatcatcctcccctccttcagccccttccagtcccgccccgaggcgggcagcgaggactaccagccgcacggggtgacctcccggaacatcctgacccacaaggacgtcaccgagaacctggagacccaggtggtggagagccgcctccgggagccgcccggcgccaaggacgccaacgggtccacgcgcaccctgctggagaagatgggcgggaagccccggcccagcggccgcatccgctccgtcctccacgccgacgagatgtga

SEQ ID NO: 8167 - RNA, 1188 nt, synthetic construct
  misc_feature 1..1188: note = derived and/or modified sequence opt2 fromCREB3L4__Homo_sapiens__CCDS1056.1
  source 1..1188: mol_type = other RNA
atggacctcggcatccccgacctcctcgacgcctggctcgagccccccgaggacatcttctccaccggctccgtcctcgagctcggcctccactgccccccccccgaggtccccgtcacccgcctccaggagcagggcctccagggctggaagtccggcggcgaccgcggctgcggcctccaggagtccgagcccgaggacttcctcaagctcttcatcgaccccaacgaggtctactgctccgaggcctcccccggctccgactccggcatctccgaggacccctgccaccccgactccccccccgccccccgcgccacctcctcccccatgctctacgaggtcgtctacgaggccggcgccctcgagcgcatgcagggcgagaccggccccaacgtcggcctcatctccatccagctcgaccagtggtcccccgccttcatggtccccgactcctgcatggtctccgagctccccttcgacgcccacgcccacatcctcccccgcgccggcaccgtcgcccccgtcccctgcaccaccctcctcccctgccagaccctcttcctcaccgacgaggagaagcgcctcctcggccaggagggcgtctccctcccctcccacctccccctcaccaaggccgaggagcgcgtcctcaagaaggtccgccgcaagatccgcaacaagcagtccgcccaggactcccgccgccgcaagaaggagtacatcgacggcctcgagtcccgcgtcgccgcctgctccgcccagaaccaggagctccagaagaaggtccaggagctcgagcgccacaacatctccctcgtcgcccagctccgccagctccagaccctcatcgcccagacctccaacaaggccgcccagacctccacctgcgtcctcatcctcctcttctccctcgccctcatcatcctcccctccttctcccccttccagtcccgccccgaggccggctccgaggactaccagccccacggcgtcacctcccgcaacatcctcacccacaaggacgtcaccgagaacctcgagacccaggtcgtcgagtcccgcctccgcgagccccccggcgccaaggacgccaacggctccacccgcaccctcctcgagaagatgggcggcaagccccgcccctccggccgcatccgctccgtcctccacgccgacgagatgtga

SEQ ID NO: 8168 - RNA, 1188 nt, synthetic construct
  misc_feature 1..1188: note = derived and/or modified sequence opt3 fromCREB3L4__Homo_sapiens__CCDS1056.1
  source 1..1188: mol_type = other RNA
atggacctgggcatccccgatctccttgacgcctggctggagcctccagaagatattttcagcaccgggtccgtgttggagttaggactgcactgcccgccccctgaagtcccagttacaagactacaggagcaaggtctccagggctggaagtctgggggagacaggggctgtggtctgcaggaatcagagcccgaggattttcttaaactgttcatagaccctaacgaagtgtactgcagtgaggctagcccagggtccgattctggaatctcggaagacccctgtcatcctgattcaccaccggcaccccgggccactagcagtcctatgttgtatgaggtagtgtacgaggcgggcgctctcgaacgcatgcagggcgagacggggccaaatgtcggactgatttccatccaactggaccagtggtctcccgcctttatggtgcctgatagctgcatggtttccgaactcccattcgacgcacacgcccatattttaccccgagctggtaccgtggcaccggtcccttgtacaactctgcttccctgccagaccttgtttctgacagatgaggaaaagcgtctactcggccaggagggggtgtcactgccaagtcaccttcctctgaccaaagccgaggaaagagtattgaagaaagttaggcggaagatccgcaacaagcaaagcgctcaggactctagaaggcggaaaaaggagtatatagacggactcgaatcccgcgtggccgcgtgttcagcacagaatcaggagctgcagaaaaaggtccaagaattagagcgacataacatcagcctggtggcccagctcagacaacttcagactctgattgctcagacaagtaataaagccgcacagacctctacgtgcgtgttgatcctactgttctccctcgctctgattatccttcccagcttttcgccattccaatctaggcccgaggccggctccgaagattaccagcctcacggtgtcacttcacggaacatactgacccacaaggacgttacagagaatttggaaactcaggtggtagagagtcgtctccgcgaaccaccgggggcgaaggatgccaacggaagcaccagaacactgttagagaaaatgggcggcaagcccaggccttccgggcggattcgatctgtgctgcatgcagacgagatgtga

SEQ ID NO: 8169 - RNA, 1188 nt, synthetic construct
  misc_feature 1..1188: note = derived and/or modified sequence opt4 fromCREB3L4__Homo_sapiens__CCDS1056.1
  source 1..1188: mol_type = other RNA
atggacctgggcatccccgacctgctggacgcctggctggagccccccgaggacatcttcagcaccggcagcgtgctggagctgggcctgcactgccccccccccgaggtgcccgtgaccagactgcaggagcagggcctgcagggctggaagagcggcggcgacagaggctgcggcctgcaggagagcgagcccgaggacttcctgaagctgttcatcgaccccaacgaggtgtactgcagcgaggccagccccggcagcgacagcggcatcagcgaggacccctgccaccccgacagcccccccgcccccagagccaccagcagccccatgctgtacgaggtggtgtacgaggccggcgccctggagagaatgcagggcgagaccggccccaacgtgggcctgatcagcatccagctggaccagtggagccccgccttcatggtgcccgacagctgcatggtgagcgagctgcccttcgacgcccacgcccacatcctgcccagagccggcaccgtggcccccgtgccctgcaccaccctgctgccctgccagaccctgttcctgaccgacgaggagaagagactgctgggccaggagggcgtgagcctgcccagccacctgcccctgaccaaggccgaggagagagtgctgaagaaggtgagaagaaagatcagaaacaagcagagcgcccaggacagcagaagaagaaagaaggagtacatcgacggcctggagagcagagtggccgcctgcagcgcccagaaccaggagctgcagaagaaggtgcaggagctggagagacacaacatcagcctggtggcccagctgagacagctgcagaccctgatcgcccagaccagcaacaaggccgcccagaccagcacctgcgtgctgatcctgctgttcagcctggccctgatcatcctgcccagcttcagccccttccagagcagacccgaggccggcagcgaggactaccagccccacggcgtgaccagcagaaacatcctgacccacaaggacgtgaccgagaacctggagacccaggtggtggagagcagactgagagagccccccggcgccaaggacgccaacggcagcaccagaaccctgctggagaagatgggcggcaagcccagacccagcggcagaatcagaagcgtgctgcacgccgacgagatgtga

SEQ ID NO: 8170 - RNA, 1188 nt, synthetic construct
  misc_feature 1..1188: note = derived and/or modified sequence opt5 fromCREB3L4__Homo_sapiens__CCDS1056.1
  source 1..1188: mol_type = other RNA
atggacctgggcatccccgatctcctggacgcctggcttgagcctccggaagatattttcagcaccgggtccgtgctggagctcggactgcactgtccccctcccgaagtccctgttacaagacttcaggagcaaggcctgcaggggtggaagtctggaggcgaccgggggtgcggactccaggaaagcgagcccgaggattttctgaaactgttcatcgaccctaacgaagtgtactgctccgaggcttctccgggcagcgattccggcatttctgaagacccctgtcatcctgatagccctcccgcccccagagcgacgtccagcccgatgctctatgaggtggtctacgaggctggggccctggaaagaatgcagggagagaccggccctaatgtggggcttatctctattcaactggaccagtggtcccccgcctttatggttcctgatagctgcatggtgtctgaactccccttcgacgctcacgcccatatcctgccccgggctggaacagtcgcccctgtgccgtgtaccacacttctgccctgccagaccctctttctgacagatgaggaaaagcgcctgctcggccaggagggggtttccctgcctagccaccttcccctgaccaaagcggaggaaagagtgctcaagaaagtccggcgcaagatcagaaacaagcaatctgcccaggactcccggcgccgcaaaaaggagtatattgacggactggaaagccgggtggctgcctgttccgctcagaatcaggagcttcagaaaaaggtgcaagaactggagcgccataacatctctctcgtcgcccagctgagacaactgcagacgctcattgcgcagaccagcaataaagccgctcagacatccacatgcgttctgatccttctgttcagcctcgccctgattatccttccttctttttcccccttccaaagccggccggaggctggctctgaagattaccagcctcacggcgtgaccagccgcaacattctgacccacaaggacgtgacggagaatctcgaaacacaggtcgtggagtccagactgcgggaaccccctggggccaaggatgccaacggatctaccagaacactgctcgagaaaatgggcgggaagccccgccctagcggacggatcagatccgttctgcatgctgacgagatgtga

SEQ ID NO: 8171 - protein, 508 aa, synthetic construct
  REGION 1..508: note = CREB5__Homo_sapiens__Q02930
MIYEESKMNLEQERPFVCSAPGCSQRFPTEDHLMIHRHKHEMTLKFPSIKTDNMLSDQTPTPTRFLKNCEEVGLFSELDCSLEHEFRKAQEEESSKRNISMHNAVGGAMTGPGTHQLSSARLPNHDTNVVIQQAMPSPQSSSVITQAPSTNRQIGPVPGSLSSLLHLHNRQRQPMPASMPGTLPNPTMPGSSAVLMPMERQMSVNSSIMGMQGPNLSNPCASPQVQPMHSEAKMRLKAALTHHPAAMSNGNMNTMGHMMEMMGSRQDQTPHHHMHSHPHQHQTLPPHHPYPHQHQHPAHHPHPQPHHQQNHPHHHSHSHLHAHPAHHQTSPHPPLHTGNQAQVSPATQQMQPTQTIQPPQPTGGRRRRVVDEDPDERRRKFLERNRAAATRCRQKRKVWVMSLEKKAEELTQTNMQLQNEVSMLKNEVAQLKQLLLTHKDCPITAMQKESQGYLSPESSPPASPVPACSQQQVIQHNTITTSSSVSEVVGSSTLSQLTTHRTDLNPIL

SEQ ID NO: 8172 - RNA, 1527 nt, synthetic construct
  misc_feature 1..1527: note = CREB5__Homo_sapiens__CCDS5417.1
  source 1..1527: mol_type = other RNA
atgatttatgaggaatccaagatgaatttggagcaggagaggccgtttgtctgcagtgccccaggctgctcccagcgcttcccaacagaggaccatctgatgattcataggcacaaacatgaaatgactttgaagtttccttcaataaaaacagacaatatgttatcagatcaaactccgaccccaacgagattcctgaagaactgcgaggaggtgggcctcttcagcgagctggactgctccctggagcacgagttcaggaaggctcaggaagaggagagcagcaagcggaatatctcgatgcataatgcagttggtggggccatgacggggcccggaactcaccagcttagcagcgctcggctgcccaaccatgacaccaacgttgtgattcagcaagccatgccgtcgcctcagtccagctctgtcatcactcaggcaccttccaccaaccgccagatcgggcctgtcccaggctctctatcttctctgctacatctccacaacagacagagacagcccatgccagcctccatgcctgggaccctgcccaaccctacaatgccaggatcttccgccgtcttgatgccaatggagcgacaaatgtcagtgaactccagcatcatggggatgcaaggtccaaatctcagcaacccctgtgcttctccccaggtccagccaatgcattcagaagccaaaatgaggttgaaggctgcattgactcaccaccctgctgccatgtcaaatgggaacatgaacaccatgggacacatgatggagatgatgggctcccggcaggaccagacgccacaccatcacatgcactcgcacccgcatcagcaccagacactgccaccccatcacccttacccacaccagcaccagcacccagcacaccatcctcaccctcaaccccatcaccagcagaaccatccacatcaccactcccattcccaccttcatgcacacccagcacatcaccagacctcgccacatccgcccctgcacaccggcaaccaagcacaggtttcaccagcaacacaacagatgcagccaacccagacaatacagccaccccagcccacaggggggcgccggcgaagggtggtagacgaggatccggacgagaggcggcggaaatttctggaacggaaccgggcagctgccacccgctgcagacagaagaggaaggtctgggtgatgtcattggaaaagaaagcagaagaactcacccagacaaacatgcagcttcagaatgaagtgtctatgttgaaaaatgaggtggcccagctgaaacagttgttgttaacacataaagactgcccaataacagccatgcagaaagaatcacaaggatatctaagtccagagagtagccctcctgctagtcctgtcccagcttgctcccagcaacaagtcatccagcataataccatcactacttcctcatcggtcagcgaggtggtaggaagctccaccctcagccagctcaccactcacagaacagacctgaatccgattctttaa

SEQ ID NO: 8173 - RNA, 1527 nt, synthetic construct
  misc_feature 1..1527: note = derived and/or modified sequence opt1 fromCREB5__Homo_sapiens__CCDS5417.1
  source 1..1527: mol_type = other RNA
atgatctacgaggagagcaagatgaacctggagcaggagcgccccttcgtgtgctccgccccgggctgcagccagcggttccccaccgaggaccacctcatgatccaccgccacaagcacgagatgaccctgaagttcccctccatcaagacggacaacatgctgagcgaccagacccccaccccgacccggttcctcaagaactgcgaggaggtcgggctgttctccgagctggactgcagcctcgagcacgagttccgcaaggcccaggaggaggagtccagcaagcggaacatctccatgcacaacgcggtgggcggggccatgacgggccccgggacccaccagctgagctccgcccgcctgcccaaccacgacaccaacgtggtcatccagcaggccatgcccagcccgcagtccagctccgtgatcacccaggcccccagcacgaaccggcagatcggccccgtgcccggctccctcagctccctgctgcacctccacaaccgccagcggcagccgatgcccgcgagcatgcccgggaccctgcccaacccgaccatgcccggcagctccgccgtcctgatgcccatggagcgccagatgagcgtgaactccagcatcatggggatgcagggccccaacctctccaacccgtgcgccagcccccaggtgcagcccatgcactccgaggccaagatgcggctgaaggcggccctgacccaccaccccgccgccatgagcaacgggaacatgaacacgatgggccacatgatggagatgatgggctcccgccaggaccagaccccgcaccaccacatgcacagccacccccaccagcaccagaccctcccgccccaccacccctacccccaccagcaccagcaccccgcccaccacccgcacccccagccccaccaccagcagaaccacccccaccaccactcccacagccacctccacgcgcacccggcccaccaccagaccagcccccacccgcccctgcacacggggaaccaggcccaggtctcccccgccacccagcagatgcagcccacccagaccatccagccgccccagcccacgggcgggcggcgccggcgcgtggtggacgaggaccccgacgagcggcgccggaagttcctggagcgcaaccgggccgcggccacccgctgccgccagaagcggaaggtctgggtgatgtccctggagaagaaggccgaggagctgacccagaccaacatgcagctccagaacgaggtgagcatgctgaagaacgaggtcgcccagctgaagcagctcctgctgacgcacaaggactgccccatcaccgccatgcagaaggagtcccagggctacctcagccccgagtccagcccgcccgcgagccccgtgcccgcctgctcccagcagcaggtcatccagcacaacaccatcaccacgagctccagcgtgtccgaggtggtgggcagctccaccctgagccagctgaccacccaccgcacggacctcaacccgatcctgtga

SEQ ID NO: 8174 - RNA, 1527 nt, synthetic construct
  misc_feature 1..1527: note = derived and/or modified sequence opt2 fromCREB5__Homo_sapiens__CCDS5417.1
  source 1..1527: mol_type = other RNA
atgatctacgaggagtccaagatgaacctcgagcaggagcgccccttcgtctgctccgcccccggctgctcccagcgcttccccaccgaggaccacctcatgatccaccgccacaagcacgagatgaccctcaagttcccctccatcaagaccgacaacatgctctccgaccagacccccacccccacccgcttcctcaagaactgcgaggaggtcggcctcttctccgagctcgactgctccctcgagcacgagttccgcaaggcccaggaggaggagtcctccaagcgcaacatctccatgcacaacgccgtcggcggcgccatgaccggccccggcacccaccagctctcctccgcccgcctccccaaccacgacaccaacgtcgtcatccagcaggccatgccctccccccagtcctcctccgtcatcacccaggccccctccaccaaccgccagatcggccccgtccccggctccctctcctccctcctccacctccacaaccgccagcgccagcccatgcccgcctccatgcccggcaccctccccaaccccaccatgcccggctcctccgccgtcctcatgcccatggagcgccagatgtccgtcaactcctccatcatgggcatgcagggccccaacctctccaacccctgcgcctccccccaggtccagcccatgcactccgaggccaagatgcgcctcaaggccgccctcacccaccaccccgccgccatgtccaacggcaacatgaacaccatgggccacatgatggagatgatgggctcccgccaggaccagaccccccaccaccacatgcactcccacccccaccagcaccagaccctccccccccaccacccctacccccaccagcaccagcaccccgcccaccacccccacccccagccccaccaccagcagaaccacccccaccaccactcccactcccacctccacgcccaccccgcccaccaccagacctccccccacccccccctccacaccggcaaccaggcccaggtctcccccgccacccagcagatgcagcccacccagaccatccagcccccccagcccaccggcggccgccgccgccgcgtcgtcgacgaggaccccgacgagcgccgccgcaagttcctcgagcgcaaccgcgccgccgccacccgctgccgccagaagcgcaaggtctgggtcatgtccctcgagaagaaggccgaggagctcacccagaccaacatgcagctccagaacgaggtctccatgctcaagaacgaggtcgcccagctcaagcagctcctcctcacccacaaggactgccccatcaccgccatgcagaaggagtcccagggctacctctcccccgagtcctccccccccgcctcccccgtccccgcctgctcccagcagcaggtcatccagcacaacaccatcaccacctcctcctccgtctccgaggtcgtcggctcctccaccctctcccagctcaccacccaccgcaccgacctcaaccccatcctctga

SEQ ID NO: 8175 - RNA, 1527 nt, synthetic construct
  misc_feature 1..1527: note = derived and/or modified sequence opt3 fromCREB5__Homo_sapiens__CCDS5417.1
  source 1..1527: mol_type = other RNA
atgatctacgaggaaagcaagatgaacctggagcaggaaagacccttcgtgtgctccgcccctggctgttctcaaaggtttccaaccgaggaccacctcatgattcatcggcacaaacatgaaatgacacttaagttcccgtcaataaaaactgataatatgctgagtgaccagacgcccacccctacacgctttttgaagaactgcgaggaggtcgggttattcagcgaactggattgttccctagagcacgaatttcgaaaagctcaggaggaggaatcttcgaagcgtaatatctcaatgcataacgcagttggaggtgccatgactggcccagggacccaccagctcagcagtgcgagactgcccaatcacgacacaaacgtggtaattcaacaggctatgccttccccacagtctagctccgtgatcacccaggccccctcaactaataggcaaattggacctgtcccaggcagtcttagctctctgttgcatctccacaaccggcagcgccagccgatgcccgcatccatgcctggtacactgccaaatcccaccatgcctgggtcaagcgccgtgctgatgccaatggagagacagatgagtgttaactcttccatcatgggaatgcaaggccccaatctcagcaacccgtgcgcttcgcctcaggtgcagcccatgcattctgaagcaaagatgaggttaaaagccgctctgacgcaccacccagccgcgatgtccaatggcaacatgaatactatggggcatatgatggagatgatgggatcacggcaagatcagacccctcaccatcacatgcatagtcacccccaccagcatcagacacttccaccccaccatccttatccacaccaacaccagcatccggcacaccatccccaccctcagccacatcaccagcaaaaccacccccatcaccatagccactcccatttgcacgcccaccctgctcatcaccagacttctccacatcccccgctgcacaccggtaaccaggcccaggtcagccctgcaacacaacagatgcagccaacccagacgatacaaccccctcagcccactggcgggcgccgaagaagggtggtagacgaagatccagacgagcggcgtcgcaagttcctagagagaaatagggctgccgcgacacggtgtcgacagaaacgcaaggtttgggtgatgtcactcgagaaaaaggccgaagaactgacccaaactaacatgcagcttcagaatgaggtcagtatgctgaagaacgaagtggcacagttgaaacaactcctgttaacacacaaggattgccctatcaccgctatgcagaaagagtcccagggatacctgagccccgagtcttcaccaccggccagtcctgtgcccgcttgtagccagcaacaggtcattcagcataatacgatcaccacatcctcttcggttagcgaagtggtaggctcctcaactctcagtcagcttaccacacacagaactgacctgaacccaattttgtga

SEQ ID NO: 8176 - RNA, 1527 nt, synthetic construct
  misc_feature 1..1527: note = derived and/or modified sequence opt4 fromCREB5__Homo_sapiens__CCDS5417.1
  source 1..1527: mol_type = other RNA
atgatctacgaggagagcaagatgaacctggagcaggagagacccttcgtgtgcagcgcccccggctgcagccagagattccccaccgaggaccacctgatgatccacagacacaagcacgagatgaccctgaagttccccagcatcaagaccgacaacatgctgagcgaccagacccccacccccaccagattcctgaagaactgcgaggaggtgggcctgttcagcgagctggactgcagcctggagcacgagttcagaaaggcccaggaggaggagagcagcaagagaaacatcagcatgcacaacgccgtgggcggcgccatgaccggccccggcacccaccagctgagcagcgccagactgcccaaccacgacaccaacgtggtgatccagcaggccatgcccagcccccagagcagcagcgtgatcacccaggcccccagcaccaacagacagatcggccccgtgcccggcagcctgagcagcctgctgcacctgcacaacagacagagacagcccatgcccgccagcatgcccggcaccctgcccaaccccaccatgcccggcagcagcgccgtgctgatgcccatggagagacagatgagcgtgaacagcagcatcatgggcatgcagggccccaacctgagcaacccctgcgccagcccccaggtgcagcccatgcacagcgaggccaagatgagactgaaggccgccctgacccaccaccccgccgccatgagcaacggcaacatgaacaccatgggccacatgatggagatgatgggcagcagacaggaccagaccccccaccaccacatgcacagccacccccaccagcaccagaccctgcccccccaccacccctacccccaccagcaccagcaccccgcccaccacccccacccccagccccaccaccagcagaaccacccccaccaccacagccacagccacctgcacgcccaccccgcccaccaccagaccagcccccacccccccctgcacaccggcaaccaggcccaggtgagccccgccacccagcagatgcagcccacccagaccatccagcccccccagcccaccggcggcagaagaagaagagtggtggacgaggaccccgacgagagaagaagaaagttcctggagagaaacagagccgccgccaccagatgcagacagaagagaaaggtgtgggtgatgagcctggagaagaaggccgaggagctgacccagaccaacatgcagctgcagaacgaggtgagcatgctgaagaacgaggtggcccagctgaagcagctgctgctgacccacaaggactgccccatcaccgccatgcagaaggagagccagggctacctgagccccgagagcagcccccccgccagccccgtgcccgcctgcagccagcagcaggtgatccagcacaacaccatcaccaccagcagcagcgtgagcgaggtggtgggcagcagcaccctgagccagctgaccacccacagaaccgacctgaaccccatcctgtga

SEQ ID NO: 8177 - RNA, 1527 nt, synthetic construct
  misc_feature 1..1527: note = derived and/or modified sequence opt5 fromCREB5__Homo_sapiens__CCDS5417.1
  source 1..1527: mol_type = other RNA
atgatctacgaggaaagcaagatgaacctggagcaggaaagacccttcgtgtgctccgcccctggctgttctcaacggtttccgaccgaggaccacctcatgattcatcgccacaaacatgaaatgacactgaagttccccagcatcaaaacggataatatgctttccgaccagacccctacacccaccagatttctgaagaactgcgaggaggtcggactcttctctgaactggattgtagccttgagcacgaatttcggaaagctcaggaggaggaatcctctaagcgcaatattagcatgcataacgccgttgggggcgcgatgacagggcctggaacccaccagctgtccagcgctagactccccaatcacgacacaaacgtggtgatccaacaggccatgccttctccgcagtccagctctgtcattacccaggccccctccacgaatcggcaaatcggccctgtgcccgggagcctgtcttccctgctccatctgcacaaccgccagagacagcctatgcccgctagcatgccgggaacccttcctaatcccacaatgcctggctcctctgccgttctgatgcccatggagcggcagatgagcgtgaactccagcatcatgggcatgcaagggcccaatctctctaacccttgcgcttccccgcaggtccagcccatgcatagcgaagccaagatgcgcctgaaagcggcccttacccaccaccctgctgccatgtctaatggaaacatgaatacaatgggccatatgatggagatgatggggagcagacaagatcagacgccccaccatcacatgcattcccaccctcaccagcatcagaccctgcccccgcaccatccttatccccaccaacaccagcatcctgctcaccatccccaccctcagccccatcaccagcaaaaccacccgcatcaccattctcacagccatctccacgcccaccctgcgcatcaccagacaagcccccatccccctctgcacaccggaaaccaggcccaggtgtccccggctacacaacagatgcagcccacccagaccattcaacctccccagcctacaggcgggcggcgcagacgggttgtggacgaagatcccgacgagcgcagacggaagttcctggagagaaatcgcgccgctgccacgcggtgtagacagaaacgcaaggtctgggtgatgtctctcgagaaaaaggccgaagaactgacccaaacaaacatgcagcttcagaatgaggtgtccatgctgaagaacgaagtcgctcagctcaaacaactgcttctgacccacaaggattgccctatcacagcgatgcagaaagagagccagggatacctctctcccgagtccagcccgcctgcctcccccgttcctgcttgttctcagcaacaggtgattcagcataataccatcacgacaagctcctctgtgagcgaagtcgtgggctccagcaccctgtctcagctgaccacacaccggaccgacctcaaccccattctgtga

SEQ ID NO: 8178 - protein, 693 aa, synthetic construct
  REGION 1..693: note = CRTC2__Homo_sapiens__Q53ET0
MATSGANGPGSATASASNPRKFSEKIALQKQRQAEETAAFEEVMMDIGSTRLQAQKLRLAYTRSSHYGGSLPNVNQIGSGLAEFQSPLHSPLDSSRSTRHHGLVERVQRDPRRMVSPLRRYTRHIDSSPYSPAYLSPPPESSWRRTMAWGNFPAEKGQLFRLPSALNRTSSDSALHTSVMNPSPQDTYPGPTPPSILPSRRGGILDGEMDPKVPAIEENLLDDKHLLKPWDAKKLSSSSSRPRSCEVPGINIFPSPDQPANVPVLPPAMNTGGSLPDLTNLHFPPPLPTPLDPEETAYPSLSGGNSTSNLTHTMTHLGISRGMGLGPGYDAPGLHSPLSHPSLQSSLSNPNLQASLSSPQPQLQGSHSHPSLPASSLARHVLPTTSLGHPSLSAPALSSSSSSSSTSSPVLGAPSYPASTPGASPHHRRVPLSPLSLLAGPADARRSQQQLPKQFSPTMSPTLSSITQGVPLDTSKLSTDQRLPPYPYSSPSLVLPTQPHTPKSLQQPGLPSQSCSVQSSGGQPPGRQSHYGTPYPPGPSGHGQQSYHRPMSDFNLGNLEQFSMESPSASLVLDPPGFSEGPGFLGGEGPMGGPQDPHTFNHQNLTHCSRHGSGPNIILTGDSSPGFSKEIAAALAGVPGFEVSAAGLELGLGLEDELRMEPLGLEGLNMLSDPCALLPDPAVEESFRSDRLQ

SEQ ID NO: 8179 - RNA, 2082 nt, synthetic construct
  misc_feature 1..2082: note = CRTC2__Homo_sapiens__CCDS30875.1
  source 1..2082: mol_type = other RNA
atggcgacgtcgggggcgaacgggcctggttcggccacggcctcggcttccaatccgcgcaaatttagtgagaagattgcgctgcagaagcagcgtcaggccgaggagacggcggccttcgaggaggtgatgatggacatcggctccacccggttacaggcccaaaaactgcgactggcatacacaaggagctctcattatggtgggtctctgcccaatgttaaccagattggctctggcctggccgagttccagagccccctccactcacctttggattcatctcggagcactcggcaccatgggctggtggaacgggtgcagcgagatcctcgaagaatggtgtccccacttcgccgatacacccgccacattgacagctctccctatagtcctgcctacttatctcctcccccagagtctagctggcgaaggacgatggcctggggcaatttccctgcagagaaggggcagttgtttcgactaccatctgcacttaacaggacaagctctgactctgcccttcatacaagtgtgatgaaccccagtccccaggatacctacccaggccccacacctcccagcatcctgcccagccgacgtgggggtattctggatggtgaaatggaccccaaagtacctgctattgaggagaacttgctagatgacaagcatttgctgaagccatgggatgctaagaagctatcctcatcctcttcccgacctcggtcctgtgaagtccctggaattaacatctttccatctcctgaccagcctgccaatgtgcctgtcctcccacctgccatgaacacggggggctccctacctgacctcaccaacctgcactttcccccaccactgcccacccccctggaccctgaagagacagcctaccctagcctgagtgggggcaacagtacctccaatttgacccacaccatgactcacctgggcatcagcaggggcatgggcctgggcccaggctatgatgcaccaggacttcattcacctctcagccacccatccctgcagtcctccctaagcaatcccaacctccaggcttccctgagcagtcctcagccccagcttcagggctcccacagccacccctctctgcctgcctcctccttggcccgccatgtactgcccaccacctccctgggccacccctcactcagtgctccggctctctcctcctcctcttcctcctcctccacttcatctcctgttttgggcgccccctcttaccctgcttctacccctggggcctccccccaccaccgccgtgtgcccctcagccccctgagtttgctcgcgggcccagccgacgccagaaggtcccaacagcagctgcccaaacagttttcgccaacaatgtcacccaccttgtcttccatcactcagggcgtccccctggataccagtaaactgtccactgaccagcggttacccccatacccatacagctccccaagtctggttctgcctacccagccccacaccccaaagtctctacagcagccagggctgccctctcagtcttgttcagtgcagtcctcaggtgggcagcccccaggcaggcagtctcattatgggacaccgtacccacctgggcccagtgggcatgggcaacagtcttaccaccggccaatgagtgacttcaacctggggaatctggagcagttcagcatggagagcccatcagccagcctggtgctggatccccctggcttttctgaagggcctggatttttagggggtgaggggccaatgggtggcccccaggatccccacaccttcaaccaccagaacttgacccactgttcccgccatggctcagggcctaacatcatcctcacaggggactcctctccaggtttctctaaggagattgcagcagccctggccggagtgcctggctttgaggtgtcagcagctggattggagctagggcttgggctagaagatgagctgcgcatggagccactgggcctggaagggctaaacatgctgagtgacccctgtgccctgctgcctgatcctgctgtggaggagtcattccgcagtgaccggctccaatga

SEQ ID NO: 8180 - RNA, 2082 nt, synthetic construct
  misc_feature 1..2082: note = derived and/or modified sequence opt1 fromCRTC2__Homo_sapiens__CCDS30875.1
  source 1..2082: mol_type = other RNA
atggccaccagcggcgccaacgggcccggctccgcgaccgccagcgcctccaacccgcgcaagttcagcgagaagatcgccctgcagaagcagcggcaggccgaggagacggcggccttcgaggaggtgatgatggacatcgggtccacccgcctccaggcccagaagctgcggctggcctacacccgcagctcccactacggcgggagcctccccaacgtcaaccagatcggctccggcctggcggagttccagagccccctgcacagccccctcgactcctcccggagcacccgccaccacgggctggtggagcgggtgcagcgcgacccgcggcgcatggtcagccccctgcggcgctacacgcggcacatcgactcctccccctacagccccgcctacctctccccgccgcccgagagcagctggcgccggaccatggcctggggcaacttccccgccgagaaggggcagctgttccgcctgccctccgccctcaaccggaccagctccgacagcgcgctgcacacctccgtgatgaaccccagcccccaggacacgtaccccggcccgaccccgccctccatcctgcccagccgccgcgggggcatcctcgacggcgagatggaccccaaggtgcccgccatcgaggagaacctgctggacgacaagcacctcctgaagccctgggacgccaagaagctgtccagctccagctcccggccccggagctgcgaggtcccggggatcaacatcttcccctcccccgaccagcccgccaacgtgccggtgctcccgcccgccatgaacaccggcgggagcctgcccgacctgaccaacctccacttcccgccgcccctgcccacgcccctggaccccgaggagaccgcgtacccctccctcagcggcggcaactccaccagcaacctgacccacacgatgacccacctggggatcagccgcggcatggggctcggccccgggtacgacgcccccggcctgcacagccccctgtcccacccctccctccagagctccctgagcaacccgaacctgcaggcctccctcagcagcccccagccccagctgcagggctcccactcccaccccagcctgccggcctccagcctcgcccgccacgtcctgcccaccacctccctggggcaccccagcctctccgcgcccgccctgagcagctccagctccagctccagcacgtccagcccggtgctgggcgccccctcctaccccgccagcacccccggggcctccccgcaccaccggcgcgtgcccctcagccccctgtccctgctcgcgggcccggccgacgcccggcgcagccagcagcagctgcccaagcagttctcccccaccatgagccccaccctgtccagcatcacgcagggggtcccgctggacacctccaagctcagcaccgaccagcggctgccgccctacccctacagctcccccagcctggtgctccccacccagccccacacgcccaagtccctgcagcagccgggcctgcccagccagtcctgcagcgtgcagtccagcggcgggcagccgcccggccgccagtcccactacgggaccccctacccgcccggccccagcgggcacggccagcagtcctaccaccggcccatgagcgacttcaacctcggcaacctggagcagttctccatggagagcccctccgccagcctggtcctcgacccgcccgggttctccgagggccccgggttcctgggcggcgaggggcccatgggcgggccccaggacccccacaccttcaaccaccagaacctgacccactgcagccgccacggctccgggccgaacatcatcctcacgggcgacagcagccccggcttctccaaggagatcgcggccgccctggccggggtgcccggcttcgaggtgagcgccgcggggctggagctcggcctggggctggaggacgagctccggatggagccgctgggcctggagggcctcaacatgctgtccgacccctgcgccctgctccccgaccccgccgtcgaggagagcttccgctccgaccggctgcagtga

SEQ ID NO: 8181 - RNA, 2082 nt, synthetic construct
  misc_feature 1..2082: note = derived and/or modified sequence opt2 fromCRTC2__Homo_sapiens__CCDS30875.1
  source 1..2082: mol_type = other RNA
atggccacctccggcgccaacggccccggctccgccaccgcctccgcctccaacccccgcaagttctccgagaagatcgccctccagaagcagcgccaggccgaggagaccgccgccttcgaggaggtcatgatggacatcggctccacccgcctccaggcccagaagctccgcctcgcctacacccgctcctcccactacggcggctccctccccaacgtcaaccagatcggctccggcctcgccgagttccagtcccccctccactcccccctcgactcctcccgctccacccgccaccacggcctcgtcgagcgcgtccagcgcgacccccgccgcatggtctcccccctccgccgctacacccgccacatcgactcctccccctactcccccgcctacctctcccccccccccgagtcctcctggcgccgcaccatggcctggggcaacttccccgccgagaagggccagctcttccgcctcccctccgccctcaaccgcacctcctccgactccgccctccacacctccgtcatgaacccctccccccaggacacctaccccggccccacccccccctccatcctcccctcccgccgcggcggcatcctcgacggcgagatggaccccaaggtccccgccatcgaggagaacctcctcgacgacaagcacctcctcaagccctgggacgccaagaagctctcctcctcctcctcccgcccccgctcctgcgaggtccccggcatcaacatcttcccctcccccgaccagcccgccaacgtccccgtcctcccccccgccatgaacaccggcggctccctccccgacctcaccaacctccacttccccccccccctccccacccccctcgaccccgaggagaccgcctacccctccctctccggcggcaactccacctccaacctcacccacaccatgacccacctcggcatctcccgcggcatgggcctcggccccggctacgacgcccccggcctccactcccccctctcccacccctccctccagtcctccctctccaaccccaacctccaggcctccctctcctccccccagccccagctccagggctcccactcccacccctccctccccgcctcctccctcgcccgccacgtcctccccaccacctccctcggccacccctccctctccgcccccgccctctcctcctcctcctcctcctcctccacctcctcccccgtcctcggcgccccctcctaccccgcctccacccccggcgcctccccccaccaccgccgcgtccccctctcccccctctccctcctcgccggccccgccgacgcccgccgctcccagcagcagctccccaagcagttctcccccaccatgtcccccaccctctcctccatcacccagggcgtccccctcgacacctccaagctctccaccgaccagcgcctccccccctacccctactcctccccctccctcgtcctccccacccagccccacacccccaagtccctccagcagcccggcctcccctcccagtcctgctccgtccagtcctccggcggccagccccccggccgccagtcccactacggcaccccctacccccccggcccctccggccacggccagcagtcctaccaccgccccatgtccgacttcaacctcggcaacctcgagcagttctccatggagtccccctccgcctccctcgtcctcgacccccccggcttctccgagggccccggcttcctcggcggcgagggccccatgggcggcccccaggacccccacaccttcaaccaccagaacctcacccactgctcccgccacggctccggccccaacatcatcctcaccggcgactcctcccccggcttctccaaggagatcgccgccgccctcgccggcgtccccggcttcgaggtctccgccgccggcctcgagctcggcctcggcctcgaggacgagctccgcatggagcccctcggcctcgagggcctcaacatgctctccgacccctgcgccctcctccccgaccccgccgtcgaggagtccttccgctccgaccgcctccagtga

SEQ ID NO: 8182 - RNA, 2082 nt, synthetic construct
  misc_feature 1..2082: note = derived and/or modified sequence opt3 fromCRTC2__Homo_sapiens__CCDS30875.1
  source 1..2082: mol_type = other RNA
atggccaccagcggcgctaacgggcccggatccgcaacagcctctgcgtcaaatcctagaaagttcagtgagaaaatcgctctgcagaagcaaaggcaggccgaagagactgcagcctttgaagaggtgatgatggacattggtagcacgcggctccaggctcagaaacttcgcctggcatacacccgatcctctcactatggcgggtcgttgccaaacgtcaatcaaataggatcaggcttagccgagttccagagcccgctgcatagtcccctagattcctctcgtagcacaagacaccatggtctcgttgaaagggtgcagcgggaccctcgcagaatggtatccccactgaggcggtacactcgccacatcgattcaagtccctatagccctgcttacctttctccaccccctgagtcctcatggcgaagaaccatggcctgggggaactttccagcggaaaagggacagctgttcaggttgccgagcgcactcaatcggacaagttctgactccgccctgcataccagcgtgatgaacccctcgcctcaagatacttatccaggccccacacctccatctattctgccctcccgtcgcggcgggatcctcgacggagagatggatccgaaagtccctgctattgaagagaatttactggacgataagcaccttttgaagccctgggacgccaaaaagctgtcaagtagctcctctagaccaaggagctgcgaggtgcctggtatcaacatatttccctcaccagatcagcccgcaaatgttcctgtgctaccaccggctatgaacaccggcgggagtctccccgacctgacgaatcttcacttccctccacccctgcctactccattggatcccgaagagaccgcctacccgtccctcagcggaggcaactctacatcaaatctgactcataccatgacacacttaggtatcagtcgggggatgggactgggccctggctatgacgcgccagggctccatagccccctttcccacccttctctgcagtcgagcttgtccaaccccaatctacaggcctcactgagttctccacaacctcagctccagggaagccactcccatccctcactgccagcaagctctcttgctcgacacgtcctgccgaccacgtccttgggtcatcctagtctcagcgcccccgctctgtcttcctcaagtagctcgtcctctactagctcaccagtgttaggcgcccccagttaccctgcatccacaccaggggcctctccccaccatcgcagagtacctctgagcccgctatccctcctggctggaccagcggacgcaaggcggtcacaacagcagcttcccaaacagtttagccctaccatgagtccaactttgtcttccattacacaaggcgttcccctggataccagcaagctctcgacggaccagcgcctgcctccgtacccctattcatctccaagtcttgtgctgcctacccagccccacacaccaaaatccttgcagcaacctggtctccccagccagtcttgtagcgtccagtcctcagggggccagccaccgggaagacaaagtcactacggcactccttatcccccagggcccagcggacatggtcagcagtcttaccacaggcctatgtccgatttcaacctgggcaacttagaacagttttcaatggagagtccaagcgcctccctggtgctagatccccctgggttctctgaaggaccgggctttctcggtggggagggcccaatgggaggcccccaagaccctcataccttcaatcaccagaacctgacacactgctcgcgtcatgggagcggacccaatatcattcttactggtgactcatccccaggctttagtaaggagatcgctgccgcattggccggggtgcctggattcgaagtctctgctgccggcctggagctcggtctggggttagaagatgagctgcggatggaaccccttggcttggagggactcaacatgctgagcgacccatgtgcactactgcctgatccggcggttgaggaatccttccgatcagacagactccagtga

SEQ ID NO: 8183 - RNA, 2082 nt, synthetic construct
  misc_feature 1..2082: note = derived and/or modified sequence opt4 fromCRTC2__Homo_sapiens__CCDS30875.1
  source 1..2082: mol_type = other RNA
atggccaccagcggcgccaacggccccggcagcgccaccgccagcgccagcaaccccagaaagttcagcgagaagatcgccctgcagaagcagagacaggccgaggagaccgccgccttcgaggaggtgatgatggacatcggcagcaccagactgcaggcccagaagctgagactggcctacaccagaagcagccactacggcggcagcctgcccaacgtgaaccagatcggcagcggcctggccgagttccagagccccctgcacagccccctggacagcagcagaagcaccagacaccacggcctggtggagagagtgcagagagaccccagaagaatggtgagccccctgagaagatacaccagacacatcgacagcagcccctacagccccgcctacctgagccccccccccgagagcagctggagaagaaccatggcctggggcaacttccccgccgagaagggccagctgttcagactgcccagcgccctgaacagaaccagcagcgacagcgccctgcacaccagcgtgatgaaccccagcccccaggacacctaccccggccccaccccccccagcatcctgcccagcagaagaggcggcatcctggacggcgagatggaccccaaggtgcccgccatcgaggagaacctgctggacgacaagcacctgctgaagccctgggacgccaagaagctgagcagcagcagcagcagacccagaagctgcgaggtgcccggcatcaacatcttccccagccccgaccagcccgccaacgtgcccgtgctgccccccgccatgaacaccggcggcagcctgcccgacctgaccaacctgcacttccccccccccctgcccacccccctggaccccgaggagaccgcctaccccagcctgagcggcggcaacagcaccagcaacctgacccacaccatgacccacctgggcatcagcagaggcatgggcctgggccccggctacgacgcccccggcctgcacagccccctgagccaccccagcctgcagagcagcctgagcaaccccaacctgcaggccagcctgagcagcccccagccccagctgcagggcagccacagccaccccagcctgcccgccagcagcctggccagacacgtgctgcccaccaccagcctgggccaccccagcctgagcgcccccgccctgagcagcagcagcagcagcagcagcaccagcagccccgtgctgggcgcccccagctaccccgccagcacccccggcgccagcccccaccacagaagagtgcccctgagccccctgagcctgctggccggccccgccgacgccagaagaagccagcagcagctgcccaagcagttcagccccaccatgagccccaccctgagcagcatcacccagggcgtgcccctggacaccagcaagctgagcaccgaccagagactgcccccctacccctacagcagccccagcctggtgctgcccacccagccccacacccccaagagcctgcagcagcccggcctgcccagccagagctgcagcgtgcagagcagcggcggccagccccccggcagacagagccactacggcaccccctacccccccggccccagcggccacggccagcagagctaccacagacccatgagcgacttcaacctgggcaacctggagcagttcagcatggagagccccagcgccagcctggtgctggacccccccggcttcagcgagggccccggcttcctgggcggcgagggccccatgggcggcccccaggacccccacaccttcaaccaccagaacctgacccactgcagcagacacggcagcggccccaacatcatcctgaccggcgacagcagccccggcttcagcaaggagatcgccgccgccctggccggcgtgcccggcttcgaggtgagcgccgccggcctggagctgggcctgggcctggaggacgagctgagaatggagcccctgggcctggagggcctgaacatgctgagcgacccctgcgccctgctgcccgaccccgccgtggaggagagcttcagaagcgacagactgcagtga

SEQ ID NO: 8184 - RNA, 2082 nt, synthetic construct
  misc_feature 1..2082: note = derived and/or modified sequence opt5 fromCRTC2__Homo_sapiens__CCDS30875.1
  source 1..2082: mol_type = other RNA
atggccaccagcggcgctaacgggcccggatccgccacagcgtctgctagcaatcctagaaagttctccgagaaaatcgccctgcagaagcaacggcaggccgaagagacggctgcctttgaagaggtgatgatggacattggctctacccgcctccaggctcagaaactgagacttgcctacacacggagctcccactatgggggatctctgccgaacgtcaatcaaatcggcagcgggctcgcggagttccagagccccctgcattcccctcttgattcttcccgcagcaccagacaccatggactggttgaacgggtgcagcgcgaccccagacggatggtgtctcctctccgcagatacacacggcacattgattccagcccctattctcctgcctacctgtccccgccccctgagagctcctggcgcagaaccatggcttggggcaactttcccgccgaaaagggccagctgttccggctcccttctgctctgaatcgcacaagctccgacagcgcccttcatacctctgtcatgaacccctccccgcaagatacgtatcctgggcccacccctcccagcatcctgccctctagacggggaggcattctcgacggggagatggatcctaaagtgccggcgatcgaagagaatctgcttgacgataagcatctgctcaagccctgggacgccaaaaagctgagctcctctagctccagacctcgcagctgcgaggttcccggaatcaacatttttccttctcccgatcagccggctaatgtgcctgtcctgccccctgccatgaacacaggcgggtccctccccgacctgaccaatcttcacttccctcccccgctgcctacacccctcgatcccgaagagaccgcttaccctagcctgtctggaggcaactccacgagcaatcttacacacaccatgacacacctgggcatctcccgggggatgggactcggcccggggtatgacgcccccggactgcattctcctctgagccacccctccctccagtctagcctgtccaaccctaatcttcaggccagcctgtctagcccccaacctcagctccagggctcccactctcatccctccctgccggctagctctcttgcgagacacgtgctgcctaccaccagcctcgggcatccctccctgagcgcccctgctctgtcttccagctcctctagctcctctacaagctcccccgttctcggagccccgtcttaccctgccagcacgcccggcgcttcccctcaccatcgccgggtgcccctgagccccctttctctgctcgccggccctgcggacgctagacgctcccaacagcagctgccgaaacagtttagccccaccatgtctcctacactgtccagcattacccaaggggtcccccttgatacatctaagctctccaccgaccagcggctgcctccctacccttatagctccccgagcctggtgctccccacgcagcctcacacacccaaatctctgcagcaacctggacttcccagccagtcctgttctgtgcagagctccggcgggcagccgcctggaagacaatctcactacggcaccccctatccccctgggcccagcggccatggacagcagtcctaccaccgccctatgtctgatttcaacctgggcaacctcgaacagtttagcatggagtccccgagcgcctctctggtcctggatccccctgggttctccgaaggacccggctttcttgggggagagggccctatgggcgggccccaagacccgcataccttcaatcaccagaacctcacacactgcagccggcatggatctggccctaatatcattctgaccggggactccagccccggattttccaaggagatcgccgctgccctggctggcgttcctgggttcgaagtgtctgccgcgggactcgagctgggccttgggctggaagatgagctcagaatggaacccctgggcctggagggacttaacatgctcagcgacccttgtgccctgctgcccgatccggctgtggaggaatccttccgcagcgaccggctccagtga

SEQ ID NO: 8185 - protein, 358 aa, synthetic construct
  REGION 1..358: note = DJB11__Homo_sapiens__Q9UBS4
MAPQNLSTFCLLLLYLIGAVIAGRDFYKILGVPRSASIKDIKKAYRKLALQLHPDRNPDDPQAQEKFQDLGAAYEVLSDSEKRKQYDTYGEEGLKDGHQSSHGDIFSHFFGDFGFMFGGTPRQQDRNIPRGSDIIVDLEVTLEEVYAGNFVEVVRNKPVARQAPGKRKCNCRQEMRTTQLGPGRFQMTQEVVCDECPNVKLVNEERTLEVEIEPGVRDGMEYPFIGEGEPHVDGEPGDLRFRIKVVKHPIFERRGDDLYTNVTISLVESLVGFEMDITHLDGHKVHISRDKITRPGAKLWKKGEGLPNFDNNNIKGSLIITFDVDFPKEQLTEEAREGIKQLLKQGSVQKVYNGLQGY

SEQ ID NO: 8186 - RNA, 1077 nt, synthetic construct
  misc_feature 1..1077: note = DJB11__Homo_sapiens__AAF61711
  source 1..1077: mol_type = other RNA
atggctccgcagaacctgagcaccttttgcctgttgctgctatacctcatcggggcggtgattgccggacgagatttctataagatcttgggggtgcctcgaagtgcctctataaaggatattaaaaaggcctataggaaactagccctgcagcttcatcccgaccggaaccctgatgatccacaagcccaggagaaattccaggatctgggtgctgcttatgaggttctgtcagatagtgagaaacggaaacagtacgatacttatggtgaagaaggattaaaagatggtcatcagagctcccatggagacattttttcacacttctttggggattttggtttcatgtttggaggaacccctcgtcagcaagacagaaatattccaagaggaagtgatattattgtagatctagaagtcactttggaagaagtatatgcaggaaattttgtggaagtagttagaaacaaacctgtggcaaggcaggctcctggcaaacggaagtgcaattgtcggcaagagatgcggaccacccagctgggccctgggcgcttccaaatgacccaggaggtggtctgcgacgaatgccctaatgtcaaactagtgaatgaagaacgaacgctggaagtagaaatagagcctggggtgagagacggcatggagtacccctttattggagaaggtgagcctcacgtggatggggagcctggagatttacggttccgaatcaaagttgtcaagcacccaatatttgaaaggagaggagatgatttgtacacaaatgtgacaatctcattagttgagtcactggttggctttgagatggatattactcacttggatggtcacaaggtacatatttcccgggataagatcaccaggccaggagcgaagctatggaagaaaggggaagggctccccaactttgacaacaacaatatcaagggctctttgataatcacttttgatgtggattttccaaaagaacagttaacagaggaagcgagagaaggtatcaaacagctactgaaacaagggtcagtgcagaaggtatacaatggactgcaaggatattga

SEQ ID NO: 8187 - RNA, 1077 nt, synthetic construct
  misc_feature 1..1077: note = derived and/or modified sequence opt1 fromDJB11__Homo_sapiens__AAF61711
  source 1..1077: mol_type = other RNA
atggcgccccagaacctgagcaccttctgcctcctgctgctctacctgatcggcgccgtgatcgccgggcgcgacttctacaagatcctgggcgtcccgcggtccgccagcatcaaggacatcaagaaggcctaccgcaagctcgccctgcagctgcaccccgaccggaaccccgacgacccccaggcccaggagaagttccaggacctcggggcggcctacgaggtgctgtccgacagcgagaagcgcaagcagtacgacacctacggcgaggaggggctgaaggacggccaccagtccagccacggcgacatcttctcccacttcttcggggacttcggcttcatgttcgggggcacgccgcggcagcaggaccgcaacatcccccgggggagcgacatcatcgtggacctcgaggtcaccctggaggaggtgtacgccggcaacttcgtggaggtcgtgcgcaacaagcccgtggcccggcaggcgcccggcaagcgcaagtgcaactgccggcaggagatgcgcaccacccagctggggccgggccggttccagatgacgcaggaggtcgtgtgcgacgagtgccccaacgtgaagctcgtcaacgaggagcgcaccctggaggtggagatcgagcccggggtgcgggacggcatggagtaccccttcatcggcgagggggagccgcacgtcgacggcgagcccggggacctgcgcttccggatcaaggtggtgaagcaccccatcttcgagcgccggggcgacgacctctacaccaacgtcaccatctccctggtggagagcctggtggggttcgagatggacatcacgcacctcgacggccacaaggtccacatctcccgcgacaagatcacccggcccggcgccaagctgtggaagaagggggagggcctgccgaacttcgacaacaacaacatcaaggggagcctcatcatcaccttcgacgtggacttccccaaggagcagctgaccgaggaggcccgcgagggcatcaagcagctgctcaagcaggggtccgtgcagaaggtctacaacggcctgcagggctactga

SEQ ID NO: 8188 - RNA, 1077 nt, synthetic construct
  misc_feature 1..1077: note = derived and/or modified sequence opt2 fromDJB11__Homo_sapiens__AAF61711
  source 1..1077: mol_type = other RNA
atggccccccagaacctctccaccttctgcctcctcctcctctacctcatcggcgccgtcatcgccggccgcgacttctacaagatcctcggcgtcccccgctccgcctccatcaaggacatcaagaaggcctaccgcaagctcgccctccagctccaccccgaccgcaaccccgacgacccccaggcccaggagaagttccaggacctcggcgccgcctacgaggtcctctccgactccgagaagcgcaagcagtacgacacctacggcgaggagggcctcaaggacggccaccagtcctcccacggcgacatcttctcccacttcttcggcgacttcggcttcatgttcggcggcaccccccgccagcaggaccgcaacatcccccgcggctccgacatcatcgtcgacctcgaggtcaccctcgaggaggtctacgccggcaacttcgtcgaggtcgtccgcaacaagcccgtcgcccgccaggcccccggcaagcgcaagtgcaactgccgccaggagatgcgcaccacccagctcggccccggccgcttccagatgacccaggaggtcgtctgcgacgagtgccccaacgtcaagctcgtcaacgaggagcgcaccctcgaggtcgagatcgagcccggcgtccgcgacggcatggagtaccccttcatcggcgagggcgagccccacgtcgacggcgagcccggcgacctccgcttccgcatcaaggtcgtcaagcaccccatcttcgagcgccgcggcgacgacctctacaccaacgtcaccatctccctcgtcgagtccctcgtcggcttcgagatggacatcacccacctcgacggccacaaggtccacatctcccgcgacaagatcacccgccccggcgccaagctctggaagaagggcgagggcctccccaacttcgacaacaacaacatcaagggctccctcatcatcaccttcgacgtcgacttccccaaggagcagctcaccgaggaggcccgcgagggcatcaagcagctcctcaagcagggctccgtccagaaggtctacaacggcctccagggctactga

SEQ ID NO: 8189 - RNA, 1077 nt, synthetic construct
  misc_feature 1..1077: note = derived and/or modified sequence opt3 fromDJB11__Homo_sapiens__AAF61711
  source 1..1077: mol_type = other RNA
atggctccccagaacctgagcaccttctgcctccttctgttgtacttaatcggcgccgtgattgcagggagagacttttataagatactgggagtccctaggtccgcctctatcaaagatattaagaaagcgtaccggaagctagctctccaactgcacccagaccgcaatccggatgacccccaggcccaggagaaattccaggatcttggtgcagcctatgaagttctgtcagacagtgagaagcgaaagcaatacgatacatatggcgaagaggggttgaaagacggacatcagagctcccacggcgatatcttttctcatttctttggtgacttcgggtttatgttcggaggcactcctcgtcagcaggatagaaacattccaaggggctcggacatcatagtggatctcgaagtaacgctggaggaggtgtacgctgggaattttgtcgaagtggttcggaacaagcccgtggcacgccaagcccctggaaaaagaaagtgtaattgcaggcaggagatgcggaccacacagctgggtccaggccgcttccagatgactcaagaagtcgtgtgtgacgagtgccccaacgtaaaactcgttaatgaggaacgaaccttagaggtggaaatcgagcctggggtcagagacggaatggaatatccatttattggcgagggtgagccgcacgtggatggggaacccggagacctgaggttccggatcaaggtggtcaagcatcctatttttgagcgtcgcggcgatgacctttacacaaacgttaccatctcattggtggaaagcctggtaggcttcgagatggatataactcacctagacgggcacaaagtgcatattagtagagataagatcacaaggccaggagctaaactctggaagaaaggtgaaggcctgcccaatttcgacaacaataacattaaggggtcccttatcatcacctttgatgtcgacttccctaaagagcagctgacggaggaagcccgggagggaattaagcagttgctcaagcaaggctctgtgcagaaagtttacaatggtctgcaggggtattga

SEQ ID NO: 8190 - RNA, 1077 nt, synthetic construct
  misc_feature 1..1077: note = derived and/or modified sequence opt4 fromDJB11__Homo_sapiens__AAF61711
  source 1..1077: mol_type = other RNA
atggccccccagaacctgagcaccttctgcctgctgctgctgtacctgatcggcgccgtgatcgccggcagagacttctacaagatcctgggcgtgcccagaagcgccagcatcaaggacatcaagaaggcctacagaaagctggccctgcagctgcaccccgacagaaaccccgacgacccccaggcccaggagaagttccaggacctgggcgccgcctacgaggtgctgagcgacagcgagaagagaaagcagtacgacacctacggcgaggagggcctgaaggacggccaccagagcagccacggcgacatcttcagccacttcttcggcgacttcggcttcatgttcggcggcacccccagacagcaggacagaaacatccccagaggcagcgacatcatcgtggacctggaggtgaccctggaggaggtgtacgccggcaacttcgtggaggtggtgagaaacaagcccgtggccagacaggcccccggcaagagaaagtgcaactgcagacaggagatgagaaccacccagctgggccccggcagattccagatgacccaggaggtggtgtgcgacgagtgccccaacgtgaagctggtgaacgaggagagaaccctggaggtggagatcgagcccggcgtgagagacggcatggagtaccccttcatcggcgagggcgagccccacgtggacggcgagcccggcgacctgagattcagaatcaaggtggtgaagcaccccatcttcgagagaagaggcgacgacctgtacaccaacgtgaccatcagcctggtggagagcctggtgggcttcgagatggacatcacccacctggacggccacaaggtgcacatcagcagagacaagatcaccagacccggcgccaagctgtggaagaagggcgagggcctgcccaacttcgacaacaacaacatcaagggcagcctgatcatcaccttcgacgtggacttccccaaggagcagctgaccgaggaggccagagagggcatcaagcagctgctgaagcagggcagcgtgcagaaggtgtacaacggcctgcagggctactga

SEQ ID NO: 8191 - RNA, 1077 nt, synthetic construct
  misc_feature 1..1077: note = derived and/or modified sequence opt5 fromDJB11__Homo_sapiens__AAF61711
  source 1..1077: mol_type = other RNA
atggctccccagaacctgagcaccttctgcctcctgcttctgtacctcatcggcgccgtgattgccgggagagacttttataagatcctgggagtccctcggtccgcgtctattaaagatatcaagaaggcttaccgcaaacttgccctgcaactccacccggacagaaatcccgatgaccctcaggcccaggagaaattccaggatctgggcgctgcctatgaagttctgagcgactccgagaagcggaagcaatacgatacatatggggaagagggactcaaagacggccatcagtctagccacggggatatcttttcccatttctttggagacttcggctttatgttcggcgggacgccccgccagcaggatagaaacattcctcggggatctgacatcattgtggatctggaagtgacccttgaggaggtctacgctggcaattttgtggaagttgtgcgcaacaagcccgtcgccagacaagcgcctgggaaacggaagtgtaattgccgccaggagatgagaacaacccagctgggaccgggccggttccagatgacacaagaagtggtttgtgacgagtgccccaacgtgaaactcgtcaatgaggaacgcaccctggaggtggaaatcgagcctggggtgagagacggaatggaatatccctttattggcgagggcgagcctcacgtcgatggggaacccggagaccttcggttccgcatcaaggttgtgaagcatccgatttttgagagacggggcgatgacctgtacacaaacgtgaccatcagcctcgtcgaatccctggtggggttcgagatggatattacgcacctggacggacacaaagttcatatcagcagagataagatcacccgccctggcgccaaactctggaagaaaggggaaggactgcccaatttcgacaacaataacattaagggctctcttatcattacatttgatgtggacttccctaaagagcagctgaccgaggaagctcgggagggcatcaagcagctcctgaagcaagggtccgtccagaaagtgtacaatggacttcagggctattga

SEQ ID NO: 8192 - protein, 316 aa, synthetic construct
  REGION 1..316: note = DJB13__Homo_sapiens__P59910
MGQDYYSVLGITRNSEDAQIKQAYRRLALKHHPLKSNEPSSAEIFRQIAEAYDVLSDPMKRGIYDKFGEEGLKGGIPLEFGSQTPWTTGYVFHGKPEKVFHEFFGGNNPFSEFFDAEGSEVDLNFGGLQGRGVKKQDPQVERDLYLSLEDLFFGCTKKIKISRRVLNEDGYSSTIKDKILTIDVKPGWRQGTRITFEKEGDQGPNIIPADIIFIVKEKLHPRFRRENDNLFFVNPIPLGKALTCCTVEVRTLDDRLLNIPINDIIHPKYFKKVPGEGMPLPEDPTKKGDLFIFFDIQFPTRLTPQKKQMLRQALLT

SEQ ID NO: 8193 - RNA, 951 nt, synthetic construct
  misc_feature 1..951: note = DJB13__Homo_sapiens__AAN15929
  source 1..951: mol_type = other RNA
atgggccaggattattactctgtgctcgggatcactcgcaattcagaggatgcccagatcaagcaggcgtaccgcagactcgcccttaagcaccacccgttgaagtcaaatgagccgtcttcagcagagattttcaggcaaatagcagaggcctacgacgtgctgagtgaccccatgaagagaggcatctacgacaagtttggagaagagggcctgaagggtgggattcctttggagtttggatcccagaccccatggacaactggttacgtcttccacggcaaacctgaaaaggtgttccacgagttctttggtggaaacaaccccttcagtgagttttttgatgcagaaggaagtgaggtagatttgaactttggggggctccagggccgaggggtcaagaagcaggacccccaagtcgaacgggatctctacctgtccctggaggacttattctttggctgcaccaaaaaaattaagatctccagaagggtgctgaacgaggatgggtactcctccaccatcaaggacaagatcctgaccattgatgtgaagcccggttggaggcagggcacacgcatcacctttgagaaggaaggggaccagggccccaacatcatcccagcagacatcattttcatcgtaaaggagaagctacaccctcgcttccgcagggagaatgacaacctcttcttcgtgaaccccatccctcttggcaaggctctcacctgctgcactgtggaggtgaggaccctagatgaccgtctgctcaacatccccatcaatgacatcatccaccccaaatacttcaagaaggtgccaggggaggggatgccattgccggaggaccccactaagaaaggggatctcttcatcttcttcgacatccagttccccacccgcctcacaccccagaagaagcagatgctgcgccaggcattgctgacatga

SEQ ID NO: 8194 - RNA, 951 nt, synthetic construct
  misc_feature 1..951: note = derived and/or modified sequence opt1 fromDJB13__Homo_sapiens__AAN15929
  source 1..951: mol_type = other RNA
atgggccaggactactacagcgtgctggggatcacccgcaactccgaggacgcccagatcaagcaggcctaccggcgcctcgcgctgaagcaccaccccctcaagagcaacgagccgtccagcgccgagatcttccggcagatcgccgaggcctacgacgtcctgtccgaccccatgaagcgcggcatctacgacaagttcggggaggagggcctgaagggcgggatccccctggagttcggcagccagaccccctggacgaccgggtacgtgttccacggcaagccggagaaggtgttccacgagttcttcgggggcaacaaccccttctccgagttcttcgacgccgaggggagcgaggtcgacctcaacttcggcggcctgcaggggcggggcgtgaagaagcaggacccccaggtggagcgcgacctgtacctctccctggaggacctgttcttcgggtgcaccaagaagatcaagatcagccggcgcgtcctcaacgaggacggctactccagcaccatcaaggacaagatcctgacgatcgacgtgaagcccggctggcggcaggggacccgcatcaccttcgagaaggagggcgaccaggggccgaacatcatccccgcggacatcatcttcatcgtgaaggagaagctgcacccccggttccgccgggagaacgacaacctcttcttcgtcaaccccatcccgctgggcaaggccctgacctgctgcacggtggaggtgcgcaccctcgacgaccggctgctgaacatccccatcaacgacatcatccaccccaagtacttcaagaaggtccccggggagggcatgccgctccccgaggaccccaccaagaagggcgacctgttcatcttcttcgacatccagttccccacccgcctgacgccgcagaagaagcagatgctccggcaggccctgctgacctga

SEQ ID NO: 8195 - RNA, 951 nt, synthetic construct
  misc_feature 1..951: note = derived and/or modified sequence opt2 fromDJB13__Homo_sapiens__AAN15929
  source 1..951: mol_type = other RNA
atgggccaggactactactccgtcctcggcatcacccgcaactccgaggacgcccagatcaagcaggcctaccgccgcctcgccctcaagcaccaccccctcaagtccaacgagccctcctccgccgagatcttccgccagatcgccgaggcctacgacgtcctctccgaccccatgaagcgcggcatctacgacaagttcggcgaggagggcctcaagggcggcatccccctcgagttcggctcccagaccccctggaccaccggctacgtcttccacggcaagcccgagaaggtcttccacgagttcttcggcggcaacaaccccttctccgagttcttcgacgccgagggctccgaggtcgacctcaacttcggcggcctccagggccgcggcgtcaagaagcaggacccccaggtcgagcgcgacctctacctctccctcgaggacctcttcttcggctgcaccaagaagatcaagatctcccgccgcgtcctcaacgaggacggctactcctccaccatcaaggacaagatcctcaccatcgacgtcaagcccggctggcgccagggcacccgcatcaccttcgagaaggagggcgaccagggccccaacatcatccccgccgacatcatcttcatcgtcaaggagaagctccacccccgcttccgccgcgagaacgacaacctcttcttcgtcaaccccatccccctcggcaaggccctcacctgctgcaccgtcgaggtccgcaccctcgacgaccgcctcctcaacatccccatcaacgacatcatccaccccaagtacttcaagaaggtccccggcgagggcatgcccctccccgaggaccccaccaagaagggcgacctcttcatcttcttcgacatccagttccccacccgcctcaccccccagaagaagcagatgctccgccaggccctcctcacctga

SEQ ID NO: 8196 - RNA, 951 nt, synthetic construct
  misc_feature 1..951: note = derived and/or modified sequence opt3 fromDJB13__Homo_sapiens__AAN15929
  source 1..951: mol_type = other RNA
atgggccaggactactatagcgtgctggggatcaccagaaactccgaggatgcccaaattaagcaggcttacaggcggctcgcacttaaacaccatcccctgaagtctaatgaaccttcaagtgccgagatattccgccagatcgcggaggcttatgacgtcttgagcgatccaatgaaacgaggaatttacgacaagtttggtgaagaaggcttaaaagggggaatcccgctggagttcggctcccagacaccctggactacgggttatgtttttcacgggaagcctgagaaggtgttccatgaatttttcggaggcaacaatccattttctgagttctttgatgccgaaggctcggaggtagacctaaacttcgggggactccaaggtcgtggcgtgaaaaagcaggatccccaggtcgagagagacctgtacctttcactggaagatttgtttttcgggtgcaccaaaaagattaaaatcagcaggcgggtgctcaatgaggacggatatagttccacaataaaggataagatcctgactattgacgttaaacctggctggcgccagggtaccagaatcacatttgaaaaggagggggatcaaggaccaaacattatccccgcagacataattttcatcgtgaaagaaaagctgcaccctaggttccggcgcgagaatgacaacctctttttcgtcaatccaattccgttaggcaaagccctgacctgttgcactgtggaggtacgaacacttgatgacagattgctgaacatccccatcaatgatattatacatcctaagtactttaaaaaggttccaggcgaagggatgcccctacctgaggacccaaccaagaaaggagatctcttcatctttttcgacattcagtttcccacgaggctgactccgcagaagaaacagatgcttcggcaagctctgttgacctga

SEQ ID NO: 8197 - RNA, 951 nt, synthetic construct
  misc_feature 1..951: note = derived and/or modified sequence opt4 fromDJB13__Homo_sapiens__AAN15929
  source 1..951: mol_type = other RNA
atgggccaggactactacagcgtgctgggcatcaccagaaacagcgaggacgcccagatcaagcaggcctacagaagactggccctgaagcaccaccccctgaagagcaacgagcccagcagcgccgagatcttcagacagatcgccgaggcctacgacgtgctgagcgaccccatgaagagaggcatctacgacaagttcggcgaggagggcctgaagggcggcatccccctggagttcggcagccagaccccctggaccaccggctacgtgttccacggcaagcccgagaaggtgttccacgagttcttcggcggcaacaaccccttcagcgagttcttcgacgccgagggcagcgaggtggacctgaacttcggcggcctgcagggcagaggcgtgaagaagcaggacccccaggtggagagagacctgtacctgagcctggaggacctgttcttcggctgcaccaagaagatcaagatcagcagaagagtgctgaacgaggacggctacagcagcaccatcaaggacaagatcctgaccatcgacgtgaagcccggctggagacagggcaccagaatcaccttcgagaaggagggcgaccagggccccaacatcatccccgccgacatcatcttcatcgtgaaggagaagctgcaccccagattcagaagagagaacgacaacctgttcttcgtgaaccccatccccctgggcaaggccctgacctgctgcaccgtggaggtgagaaccctggacgacagactgctgaacatccccatcaacgacatcatccaccccaagtacttcaagaaggtgcccggcgagggcatgcccctgcccgaggaccccaccaagaagggcgacctgttcatcttcttcgacatccagttccccaccagactgaccccccagaagaagcagatgctgagacaggccctgctgacctga

SEQ ID NO: 8198 - RNA, 951 nt, synthetic construct
  misc_feature 1..951: note = derived and/or modified sequence opt5 fromDJB13__Homo_sapiens__AAN15929
  source 1..951: mol_type = other RNA
atgggccaggactactatagcgtgctggggatcaccagaaactccgaggatgcccaaattaagcaggcttaccggcgcctcgccctgaaacaccatccccttaagtctaatgaacctagctccgcggagatcttcagacagattgctgaagcctatgacgtcctgtctgatccgatgaaacggggaatctacgacaagtttggcgaggaagggctcaaaggaggcattcccctggagttcgggagccagacaccttggacgaccggatatgtttttcacggcaagcccgagaaggtgttccatgaatttttcggcgggaacaatcctttttccgagttctttgatgccgaaggatctgaggtggaccttaacttcggcgggctgcaaggacgcggcgtcaaaaagcaggatccccaggtggagagagacctctacctgagcctggaagatctctttttcgggtgcaccaaaaagatcaaaatctcccggcgcgttctgaatgaggacggatatagctctacaattaaggataagatccttacaattgacgtgaaacctggctggagacagggcacccggatcacatttgaaaaggagggggatcaaggaccgaacattatccccgctgacattatcttcatcgtcaaagaaaagctgcaccctcgcttcagacgggagaatgacaacctctttttcgtgaatcccattcctctgggcaaagcccttacctgttgcacggttgaggtgcgcaccctggatgacagactcctgaacatccccattaatgatatcattcatccgaagtactttaaaaaggtccctggggaaggaatgcccctgcctgaggaccccacaaagaaaggcgatctcttcatctttttcgacatccagtttcccacccggctgacacctcagaagaaacagatgcttcgccaagctctgctcacctga

SEQ ID NO: 8199 - protein, 379 aa, synthetic construct
  REGION 1..379: note = DJB14__Homo_sapiens__Q8TBM8
MEGNRDEAEKCVEIAREALNAGNREKAQRFLQKAEKLYPLPSARALLEIIMKNGSTAGNSPHCRKPSGSGDQSKPNCTKDSTSGSGEGGKGYTKDQVDGVLSINKCKNYYEVLGVTKDAGDEDLKKAYRKLALKFHPDKNHAPGATDAFKKIGNAYAVLSNPEKRKQYDLTGNEEQACNHQNNGRFNFHRGCEADITPEDLFNIFFGGGFPSGSVHSFSNGRAGYSQQHQHRHSGHEREEERGDGGFSVFIQLMPIIVLILVSLLSQLMVSNPPYSLYPRSGTGQTIKMQTENLGVVYYVNKDFKNEYKGMLLQKVEKSVEEDYVTNIRNNCWKERQQKTDMQYAAKVYRDDRLRRKADALSMDNCKELERLTSLYKGG

SEQ ID NO: 8200 - RNA, 1140 nt, synthetic construct
  misc_feature 1..1140: note = DJB14__Homo_sapiens__AAH22248
  source 1..1140: mol_type = other RNA
atggaggggaacagggatgaggctgagaaatgtgtcgagatcgcccgggaggccctgaacgccggcaaccgcgagaaggcccagcgcttcctgcagaaggccgagaagctctacccactgccctcggcccgcgcactattggaaataattatgaaaaatggaagcacggctggaaatagccctcattgccgaaaaccatcaggtagtggcgatcaaagcaagcctaattgcacaaaggacagcacatctggtagtggtgaaggtggaaaaggctataccaaagaccaagtagatggagttctcagcataaacaaatgtaaaaattactatgaagtacttggagttacgaaagatgctggtgatgaagatttgaaaaaagcttatagaaagcttgctttgaagtttcatccagacaaaaaccatgcacctggagcaacagatgcttttaaaaagattggaaatgcttatgctgttttaagtaatccagaaaagcgaaaacagtatgacctcacgggcaatgaagaacaagcatgtaaccaccaaaacaatggcagatttaatttccatagaggttgtgaagctgatataactccagaagacttgtttaatatattttttgggggtggatttccttcaggtagtgtacattctttttcaaatggaagagctggttatagccaacaacatcagcatcgacatagtggacatgaaagagaagaggaaagaggagatggaggtttttctgtgtttatccagctgatgcccataattgtattgatcctcgtgtcattattaagccagttgatggtctctaatcctccttattccttatatcccagatctggaactgggcaaactattaaaatgcaaacagaaaacttgggtgttgtttattatgtcaacaaggacttcaaaaatgaatataaaggaatgttattacaaaaggtagaaaagagtgtggaggaagattatgtgactaatattcgaaataactgctggaaagaaagacaacaaaaaacagatatgcagtatgcagcaaaagtataccgtgatgatcgactccgaaggaaggcagatgccttgagcatggacaactgtaaagaattagagcggcttaccagtctttataaaggaggatga

SEQ ID NO: 8201 - RNA, 1140 nt, synthetic construct
  misc_feature 1..1140: note = derived and/or modified sequence opt1 fromDJB14__Homo_sapiens__AAH22248
  source 1..1140: mol_type = other RNA
atggagggcaaccgcgacgaggccgagaagtgcgtggagatcgcccgggaggcgctgaacgccgggaaccgcgagaaggcccagcggttcctccagaaggccgagaagctgtaccccctgccgagcgcccgcgcgctcctggagatcatcatgaagaacggctccaccgccgggaacagcccccactgccggaagccctccggcagcggggaccagtccaagcccaactgcaccaaggacagcacgtccggcagcggcgagggcgggaaggggtacaccaaggaccaggtcgacggcgtgctgtccatcaacaagtgcaagaactactacgaggtgctcggggtcaccaaggacgccggcgacgaggacctgaagaaggcctaccgcaagctggcgctcaagttccacccggacaagaaccacgcccccggcgccaccgacgccttcaagaagatcgggaacgcctacgcggtgctgagcaaccccgagaagcggaagcagtacgacctgacgggcaacgaggagcaggcctgcaaccaccagaacaacgggcgcttcaacttccaccggggctgcgaggccgacatcacccccgaggacctcttcaacatcttcttcggcgggggcttcccgtccgggagcgtgcactccttcagcaacggccgcgccgggtactcccagcagcaccagcaccggcacagcggccacgagcgcgaggaggagcggggcgacgggggcttctccgtcttcatccagctgatgcccatcatcgtgctgatcctcgtgagcctgctgtcccagctcatggtcagcaacccgccctacagcctgtacccccgctccgggaccggccagaccatcaagatgcagacggagaacctgggggtggtgtactacgtcaacaaggacttcaagaacgagtacaagggcatgctcctgcagaaggtggagaagtccgtggaggaggactacgtcaccaacatccggaacaactgctggaaggagcgccagcagaagaccgacatgcagtacgccgcgaaggtgtaccgggacgaccgcctgcggcgcaaggccgacgccctcagcatggacaactgcaaggagctggagcggctgaccagcctctacaagggcgggtga

SEQ ID NO: 8202 - RNA, 1140 nt, synthetic construct
  misc_feature 1..1140: note = derived and/or modified sequence opt2 fromDJB14__Homo_sapiens__AAH22248
  source 1..1140: mol_type = other RNA
atggagggcaaccgcgacgaggccgagaagtgcgtcgagatcgcccgcgaggccctcaacgccggcaaccgcgagaaggcccagcgcttcctccagaaggccgagaagctctaccccctcccctccgcccgcgccctcctcgagatcatcatgaagaacggctccaccgccggcaactccccccactgccgcaagccctccggctccggcgaccagtccaagcccaactgcaccaaggactccacctccggctccggcgagggcggcaagggctacaccaaggaccaggtcgacggcgtcctctccatcaacaagtgcaagaactactacgaggtcctcggcgtcaccaaggacgccggcgacgaggacctcaagaaggcctaccgcaagctcgccctcaagttccaccccgacaagaaccacgcccccggcgccaccgacgccttcaagaagatcggcaacgcctacgccgtcctctccaaccccgagaagcgcaagcagtacgacctcaccggcaacgaggagcaggcctgcaaccaccagaacaacggccgcttcaacttccaccgcggctgcgaggccgacatcacccccgaggacctcttcaacatcttcttcggcggcggcttcccctccggctccgtccactccttctccaacggccgcgccggctactcccagcagcaccagcaccgccactccggccacgagcgcgaggaggagcgcggcgacggcggcttctccgtcttcatccagctcatgcccatcatcgtcctcatcctcgtctccctcctctcccagctcatggtctccaaccccccctactccctctacccccgctccggcaccggccagaccatcaagatgcagaccgagaacctcggcgtcgtctactacgtcaacaaggacttcaagaacgagtacaagggcatgctcctccagaaggtcgagaagtccgtcgaggaggactacgtcaccaacatccgcaacaactgctggaaggagcgccagcagaagaccgacatgcagtacgccgccaaggtctaccgcgacgaccgcctccgccgcaaggccgacgccctctccatggacaactgcaaggagctcgagcgcctcacctccctctacaagggcggctga

SEQ ID NO: 8203 - RNA, 1140 nt, synthetic construct
  misc_feature 1..1140: note = derived and/or modified sequence opt3 fromDJB14__Homo_sapiens__AAH22248
  source 1..1140: mol_type = other RNA
atggagggcaacagagacgaagccgagaagtgcgtggaaatcgctagggaggcactgaatgccgggaaccgggaaaaagcgcagcgcttcctccaaaaggctgagaaactttaccccctgcctagcgcccgagcattgttagagattataatgaagaatggatccaccgccggtaactctccacactgtcgtaaaccgtcaggcagtggggatcagagcaagcccaattgcacaaaggactccacttctggatcgggcgaaggtgggaaaggatatacgaaggatcaggtcgacggcgttctgtcaatcaacaaatgtaagaattactatgaggtgctaggcgtaaccaaagatgctggggacgaagatctcaagaaggcatacagaaaactggcccttaagtttcatcctgacaaaaaccacgctccaggagccacagatgcgttcaagaaaattggtaatgcatatgccgtgctgagcaaccccgagaagaggaaacagtacgacttgactggcaatgaggaacaggcttgcaaccatcaaaataacgggcggtttaatttccaccgcggatgtgaggccgatatcacccctgaagacctctttaacattttctttggcggtgggttcccaagtggatccgtccattcttttagcaacggcagagcaggctattcccagcagcaccaacacaggcattcagggcacgagcgggaagaggagcgcggagatggtggcttcagtgtgtttatccagctgatgcccataatcgttctgattctcgtgagcttactgtctcagcttatggtctccaatcctccatactcattgtacccgcgaagcgggacaggacagaccatcaagatgcaaactgaaaacctgggcgtggtatattacgttaataaggacttcaaaaacgagtataagggtatgctactccagaaagtggaaaagagtgtcgaggaagactacgtgacaaatattagaaacaattgctggaaagagaggcagcaaaagaccgatatgcagtatgctgccaaggtgtaccgggacgatcgtctgcgcagaaaagcggacgccctttctatggataactgtaaggagctggaaaggttgacgtccctctataaagggggctga

SEQ ID NO: 8204 - RNA, 1140 nt, synthetic construct
  misc_feature 1..1140: note = derived and/or modified sequence opt4 fromDJB14__Homo_sapiens__AAH22248
  source 1..1140: mol_type = other RNA
atggagggcaacagagacgaggccgagaagtgcgtggagatcgccagagaggccctgaacgccggcaacagagagaaggcccagagattcctgcagaaggccgagaagctgtaccccctgcccagcgccagagccctgctggagatcatcatgaagaacggcagcaccgccggcaacagcccccactgcagaaagcccagcggcagcggcgaccagagcaagcccaactgcaccaaggacagcaccagcggcagcggcgagggcggcaagggctacaccaaggaccaggtggacggcgtgctgagcatcaacaagtgcaagaactactacgaggtgctgggcgtgaccaaggacgccggcgacgaggacctgaagaaggcctacagaaagctggccctgaagttccaccccgacaagaaccacgcccccggcgccaccgacgccttcaagaagatcggcaacgcctacgccgtgctgagcaaccccgagaagagaaagcagtacgacctgaccggcaacgaggagcaggcctgcaaccaccagaacaacggcagattcaacttccacagaggctgcgaggccgacatcacccccgaggacctgttcaacatcttcttcggcggcggcttccccagcggcagcgtgcacagcttcagcaacggcagagccggctacagccagcagcaccagcacagacacagcggccacgagagagaggaggagagaggcgacggcggcttcagcgtgttcatccagctgatgcccatcatcgtgctgatcctggtgagcctgctgagccagctgatggtgagcaaccccccctacagcctgtaccccagaagcggcaccggccagaccatcaagatgcagaccgagaacctgggcgtggtgtactacgtgaacaaggacttcaagaacgagtacaagggcatgctgctgcagaaggtggagaagagcgtggaggaggactacgtgaccaacatcagaaacaactgctggaaggagagacagcagaagaccgacatgcagtacgccgccaaggtgtacagagacgacagactgagaagaaaggccgacgccctgagcatggacaactgcaaggagctggagagactgaccagcctgtacaagggcggctga

SEQ ID NO: 8205 - RNA, 1140 nt, synthetic construct
  misc_feature 1..1140: note = derived and/or modified sequence opt5 fromDJB14__Homo_sapiens__AAH22248
  source 1..1140: mol_type = other RNA
atggagggcaacagagacgaagccgagaagtgcgtggaaatcgctcgggaggccctgaatgcggggaaccgcgaaaaagctcagagattcctccaaaaggccgagaaactgtacccccttcctagcgcccgggctctgctcgagattatcatgaagaatggatccaccgccggcaactctccgcactgtcgcaaacccagcgggtccggagatcagtctaagcctaattgcacaaaggacagcacgtccggctctggggaaggaggcaaaggctataccaaggatcaggtcgacggggttctgagcattaacaaatgtaagaattactatgaggtgcttggagtgacaaaagatgctggcgacgaagatctgaagaaggcctacagaaaactcgcgctgaagtttcatcccgacaaaaaccacgcccctggggctaccgatgccttcaagaaaatcggaaatgcttatgccgtcctgtccaaccccgagaagcggaaacagtacgacctcacaggcaatgaggaacaagcgtgcaaccatcagaataacgggcgctttaatttccacagaggatgtgaggccgatattacccctgaagacctgtttaacatcttctttggcggcgggttcccgagcggatctgtgcattcctttagcaacggccgggctgggtattctcagcagcaccaacaccgccattccggacacgagagagaagaggagcggggcgatgggggattcagcgtttttatccagcttatgcccattatcgtgctgattctcgtctctctgctttcccagctgatggtgagcaatcctccctactccctctaccctcgctctggcacaggccagaccatcaagatgcaaacggaaaacctgggggttgtgtattacgtcaataaggacttcaaaaacgagtataagggaatgctgctccagaaagtggaaaagagcgtggaggaagactacgtcaccaatattagaaacaattgctggaaagagcggcagcaaaagacagatatgcagtatgccgctaaggtttaccgcgacgatagactgcggagaaaagccgacgccctttccatggataactgtaaggagctggaacgcctcaccagcctgtataaaggcgggtga

SEQ ID NO: 8206 - protein, 793 aa, synthetic construct
  REGION 1..793: note = DJC10__Homo_sapiens__Q8IXB1
MGVWLNKDDYIRDLKRIILCFLIVYMAILVGTDQDFYSLLGVSKTASSREIRQAFKKLALKLHPDKNPNNPNAHGDFLKINRAYEVLKDEDLRKKYDKYGEKGLEDNQGGQYESWNYYRYDFGIYDDDPEIITLERREFDAAVNSGELWFVNFYSPGCSHCHDLAPTWRDFAKEVDGLLRIGAVNCGDDRMLCRMKGVNSYPSLFIFRSGMAPVKYHGDRSKESLVSFAMQHVRSTVTELWTGNFVNSIQTAFAAGIGWLITFCSKGGDCLTSQTRLRLSGMLDGLVNVGWMDCATQDNLCKSLDITTSTTAYFPPGATLNNKEKNSILFLNSLDAKEIYLEVIHNLPDFELLSANTLEDRLAHHRWLLFFHFGKNENSNDPELKKLKTLLKNDHIQVGRFDCSSAPDICSNLYVFQPSLAVFKGQGTKEYEIHHGKKILYDILAFAKESVNSHVTTLGPQNFPANDKEPWLVDFFAPWCPPCRALLPELRRASNLLYGQLKFGTLDCTVHEGLCNMYNIQAYPTTVVFNQSNIHEYEGHHSAEQILEFIEDLMNPSVVSLTPTTFNELVTQRKHNEVWMVDFYSPWCHPCQVLMPEWKRMARTLTGLINVGSIDCQQYHSFCAQENVQRYPEIRFFPPKSNKAYHYHSYNGWNRDAYSLRIWGLGFLPQVSTDLTPQTFSEKVLQGKNHWVIDFYAPWCGPCQNFAPEFELLARMIKGKVKAGKVDCQAYAQTCQKAGIRAYPTVKFYFYERAKRNFQEEQINTRDAKAIAALISEKLETLRNQGKRNKDEL

SEQ ID NO: 8207 - RNA, 2382 nt, synthetic construct
  misc_feature 1..2382: note = DJC10__Homo_sapiens__BAB55263
  source 1..2382: mol_type = other RNA
atgggagtctggttaaataaagatgactatatcagagacttgaaaaggatcattctctgttttctgatagtgtatatggccattttagtgggcacagatcaggatttttacagtttacttggagtgtccaaaactgcaagcagtagagaaataagacaagctttcaagaaattggcattgaagttacatcctgataaaaacccgaataacccaaatgcacatggcgattttttaaaaataaatagagcatatgaagtactcaaagatgaagatctacggaaaaagtatgacaaatatggagaaaagggacttgaggataatcaaggtggccagtatgaaagctggaactattatcgttatgattttggtatttatgatgatgatcctgaaatcataacattggaaagaagagaatttgatgctgctgttaattctggagaactgtggtttgtaaatttttactccccaggctgttcacactgccatgatttagctcccacatggagagactttgctaaagaagtggatgggttacttcgaattggagctgttaactgtggtgatgatagaatgctttgccgaatgaaaggagtcaacagctatcccagcctcttcatttttcggtctggaatggccccagtgaaatatcatggagacagatcaaaggagagtttagtgagttttgcaatgcagcatgttagaagtacagtgacagaactttggacaggaaattttgtcaactccatacaaactgcctttgctgctggtattggctggctgatcactttttgttcaaaaggaggagattgtttgacttcacagacacgactcaggcttagtggcatgttggatggtcttgttaatgtaggatggatggactgtgccacccaggataacctttgtaaaagcttagatattacaacaagtactactgcttattttcctcctggagccactttaaataacaaagagaaaaacagtattttgtttctcaactcattggatgctaaagaaatatatttggaagtaatacataatcttccagattttgaactactttcggcaaacacactagaggatcgtttggctcatcatcggtggctgttattttttcattttggaaaaaatgaaaattcaaatgatcctgagctgaaaaaactaaaaactctacttaaaaatgatcatattcaagttggcaggtttgactgttcctctgcaccagacatctgtagtaatctgtatgtttttcagccgtctctagcagtatttaaaggacaaggaaccaaagaatatgaaattcatcatggaaagaagattctatatgatatacttgcctttgccaaagaaagtgtgaattctcatgttaccacgcttggacctcaaaattttcctgccaatgacaaagaaccatggcttgttgatttctttgccccctggtgtccaccatgtcgagctttactaccagagttacgaagagcatcaaatcttctttatggtcagcttaagtttggtacactagattgtacagttcatgagggactctgtaacatgtataacattcaggcttatccaacgacagtggtattcaaccagtccaacattcatgagtatgaaggacatcactctgctgaacaaatcttggagttcatagaggatcttatgaatccttcagtggtctcccttacacccaccaccttcaacgaactagttacacaaagaaaacacaacgaagtctggatggttgatttctattctccgtggtgtcatccttgccaagtcttaatgccagaatggaaaagaatggcccggacattaactggactgatcaacgtgggcagtatagattgccaacagtatcattctttttgtgcccaggaaaacgttcaaagataccctgagataagattttttcccccaaaatcaaataaagcttatcattatcacagttacaatggttggaatagggatgcttattccctgagaatctggggtctaggatttttacctcaagtatccacagatctaacacctcagactttcagtgaaaaagttctacaagggaaaaatcattgggtgattgatttctatgctccttggtgtggaccttgccagaattttgctccagaatttgagctcttggctaggatgattaaaggaaaagtgaaagctggaaaagtagactgtcaggcttatgctcagacatgccagaaagctgggatcagggcctatccaactgttaaattttatttctacgaaagagcaaagagaaattttcaagaagagcagataaataccagagatgcaaaagcaatcgctgccttaataagtgaaaaattggaaactctccgaaatcaaggcaagaggaataaggatgaactttga

SEQ ID NO: 8208 - RNA, 2382 nt, synthetic construct
  misc_feature 1..2382: note = derived and/or modified sequence opt1 fromDJC10__Homo_sapiens__BAB55263
  source 1..2382: mol_type = other RNA
atgggcgtgtggctgaacaaggacgactacatccgcgacctcaagcggatcatcctgtgcttcctgatcgtctacatggccatcctcgtggggaccgaccaggacttctacagcctgctgggcgtgtccaagaccgccagctcccgcgagatccggcaggcgttcaagaagctcgccctgaagctgcaccccgacaagaacccgaacaaccccaacgcccacggggacttcctcaagatcaaccgcgcctacgaggtcctgaaggacgaggacctgcggaagaagtacgacaagtacggcgagaaggggctcgaggacaaccagggcggccagtacgagagctggaactactaccgctacgacttcgggatctacgacgacgaccccgagatcatcacgctggagcggcgcgagttcgacgccgcggtgaactccggcgagctgtggttcgtgaacttctacagccccgggtgctcccactgccacgacctcgccccgacctggcgggacttcgccaaggaggtcgacggcctgctgcgcatcggggccgtgaactgcggcgacgaccggatgctctgccgcatgaagggcgtgaacagctacccctccctgttcatcttccggagcgggatggcgcccgtcaagtaccacggcgaccgctccaaggagagcctggtgtccttcgccatgcagcacgtgcggagcaccgtcaccgagctctggacggggaacttcgtgaactccatccagaccgccttcgccgccggcatcggctggctgatcaccttctgcagcaagggcggggactgcctgacctcccagacgcgcctccggctgagcgggatgctggacggcctcgtgaacgtcgggtggatggactgcgcgacccaggacaacctgtgcaagtccctggacatcaccaccagcacgaccgcctacttcccgccgggcgccaccctcaacaacaaggagaagaacagcatcctgttcctgaactccctcgacgccaaggagatctacctggaggtgatccacaacctgcccgacttcgagctcctgagcgccaacaccctggaggaccgcctcgcgcaccaccggtggctgctgttcttccacttcggcaagaacgagaactccaacgaccccgagctcaagaagctgaagacgctgctcaagaacgaccacatccaggtggggcgcttcgactgcagctccgcccccgacatctgcagcaacctgtacgtcttccagccgtccctggccgtgttcaagggccaggggaccaaggagtacgagatccaccacggcaagaagatcctctacgacatcctggccttcgccaaggagagcgtgaactcccacgtcaccaccctggggccccagaacttccccgcgaacgacaaggagccctggctggtggacttcttcgccccgtggtgcccgccctgccgggccctcctgcccgagctgcgccgcgccagcaacctcctgtacggccagctgaagttcggcacgctcgactgcaccgtgcacgaggggctgtgcaacatgtacaacatccaggcctaccccaccaccgtcgtgttcaaccagtccaacatccacgagtacgagggccaccacagcgcggagcagatcctggagttcatcgaggacctcatgaacccctccgtcgtgagcctgacgcccaccaccttcaacgagctggtgacccagcggaagcacaacgaggtctggatggtggacttctactccccctggtgccacccgtgccaggtgctcatgcccgagtggaagcgcatggcccggacgctgaccgggctgatcaacgtcggcagcatcgactgccagcagtaccactccttctgcgcccaggagaacgtgcagcgctaccccgagatccggttcttcccgcccaagagcaacaaggcctaccactaccactcctacaacgggtggaaccgcgacgcgtacagcctccggatctggggcctgggcttcctgccccaggtgagcaccgacctcacgccccagaccttctccgagaaggtcctgcaggggaagaaccactgggtgatcgacttctacgccccctggtgcggcccctgccagaacttcgcccccgagttcgagctgctcgcccgcatgatcaaggggaaggtgaaggccggcaaggtcgactgccaggcgtacgcccagacctgccagaaggccggcatccgggcctaccccaccgtgaagttctacttctacgagcgcgccaagcggaacttccaggaggagcagatcaacacccgcgacgcgaaggccatcgccgccctgatcagcgagaagctggagacgctccggaaccaggggaagcgcaacaaggacgagctgtga

SEQ ID NO: 8209 - RNA, 2382 nt, synthetic construct
  misc_feature 1..2382: note = derived and/or modified sequence opt2 fromDJC10__Homo_sapiens__BAB55263
  source 1..2382: mol_type = other RNA
atgggcgtctggctcaacaaggacgactacatccgcgacctcaagcgcatcatcctctgcttcctcatcgtctacatggccatcctcgtcggcaccgaccaggacttctactccctcctcggcgtctccaagaccgcctcctcccgcgagatccgccaggccttcaagaagctcgccctcaagctccaccccgacaagaaccccaacaaccccaacgcccacggcgacttcctcaagatcaaccgcgcctacgaggtcctcaaggacgaggacctccgcaagaagtacgacaagtacggcgagaagggcctcgaggacaaccagggcggccagtacgagtcctggaactactaccgctacgacttcggcatctacgacgacgaccccgagatcatcaccctcgagcgccgcgagttcgacgccgccgtcaactccggcgagctctggttcgtcaacttctactcccccggctgctcccactgccacgacctcgcccccacctggcgcgacttcgccaaggaggtcgacggcctcctccgcatcggcgccgtcaactgcggcgacgaccgcatgctctgccgcatgaagggcgtcaactcctacccctccctcttcatcttccgctccggcatggcccccgtcaagtaccacggcgaccgctccaaggagtccctcgtctccttcgccatgcagcacgtccgctccaccgtcaccgagctctggaccggcaacttcgtcaactccatccagaccgccttcgccgccggcatcggctggctcatcaccttctgctccaagggcggcgactgcctcacctcccagacccgcctccgcctctccggcatgctcgacggcctcgtcaacgtcggctggatggactgcgccacccaggacaacctctgcaagtccctcgacatcaccacctccaccaccgcctacttcccccccggcgccaccctcaacaacaaggagaagaactccatcctcttcctcaactccctcgacgccaaggagatctacctcgaggtcatccacaacctccccgacttcgagctcctctccgccaacaccctcgaggaccgcctcgcccaccaccgctggctcctcttcttccacttcggcaagaacgagaactccaacgaccccgagctcaagaagctcaagaccctcctcaagaacgaccacatccaggtcggccgcttcgactgctcctccgcccccgacatctgctccaacctctacgtcttccagccctccctcgccgtcttcaagggccagggcaccaaggagtacgagatccaccacggcaagaagatcctctacgacatcctcgccttcgccaaggagtccgtcaactcccacgtcaccaccctcggcccccagaacttccccgccaacgacaaggagccctggctcgtcgacttcttcgccccctggtgccccccctgccgcgccctcctccccgagctccgccgcgcctccaacctcctctacggccagctcaagttcggcaccctcgactgcaccgtccacgagggcctctgcaacatgtacaacatccaggcctaccccaccaccgtcgtcttcaaccagtccaacatccacgagtacgagggccaccactccgccgagcagatcctcgagttcatcgaggacctcatgaacccctccgtcgtctccctcacccccaccaccttcaacgagctcgtcacccagcgcaagcacaacgaggtctggatggtcgacttctactccccctggtgccacccctgccaggtcctcatgcccgagtggaagcgcatggcccgcaccctcaccggcctcatcaacgtcggctccatcgactgccagcagtaccactccttctgcgcccaggagaacgtccagcgctaccccgagatccgcttcttcccccccaagtccaacaaggcctaccactaccactcctacaacggctggaaccgcgacgcctactccctccgcatctggggcctcggcttcctcccccaggtctccaccgacctcaccccccagaccttctccgagaaggtcctccagggcaagaaccactgggtcatcgacttctacgccccctggtgcggcccctgccagaacttcgcccccgagttcgagctcctcgcccgcatgatcaagggcaaggtcaaggccggcaaggtcgactgccaggcctacgcccagacctgccagaaggccggcatccgcgcctaccccaccgtcaagttctacttctacgagcgcgccaagcgcaacttccaggaggagcagatcaacacccgcgacgccaaggccatcgccgccctcatctccgagaagctcgagaccctccgcaaccagggcaagcgcaacaaggacgagctctga

SEQ ID NO: 8210 - RNA, 2382 nt, synthetic construct
  misc_feature 1..2382: note = derived and/or modified sequence opt3 fromDJC10__Homo_sapiens__BAB55263
  source 1..2382: mol_type = other RNA
atgggcgtgtggctgaacaaggacgattacatcagagacctcaaaaggattatactttgcttcctgatcgtctatatggccattttggttgggaccgatcaggacttttacagcttactgggagtgtccaagacagcttcttcacgggagatccgccaagcattcaaaaagctagccctcaaactgcaccccgataagaatcctaacaatccaaacgcgcatggtgactttcttaagattaatcgagcttatgaagtactgaaagatgaggacttgcgtaagaaatacgataagtatggcgaaaaagggctcgaggacaaccagggaggccagtacgaaagttggaattattacagatacgatttcggtatctatgacgatgacccggagataatcactctggagaggcgggaatttgacgccgcagtgaacagcggggagctgtggttcgtcaatttttactcccccggatgttctcactgccatgatctcgcccctacgtggcgcgacttcgctaaggaagtggatggcttactgagaattggcgcagttaactgtggggacgataggatgctttgccggatgaagggagtcaattcgtatccatcattgtttatcttccgcagcggtatggcccccgtgaaataccacggcgaccgaagtaaggagtccctggtgtcttttgctatgcagcatgtaagaagcaccgttacagagctatggactgggaacttcgtcaattccattcaaaccgcctttgcggcaggaatcggctggctcataacattctgttcaaaaggtggggattgcctgaccagtcagactaggcttcggctgagcggaatgttggacggcctcgtgaacgtgggctggatggattgtgccacacaggacaatctgtgcaagtctttagatattaccacgtccactaccgcttatttccctccaggggccacactgaacaacaaagaaaagaactcaatcctctttcttaatagcctggacgcaaaagagatttacttggaagtgatccacaatctacccgacttcgagctgctcagtgctaacactctggaagatcgtcttgcccaccatcgctggctgttgtttttccactttggaaagaatgagaactctaatgaccctgagctcaagaaactgaagaccttactgaaaaacgatcatatccaggtcggtagattcgactgttccagcgcgccagatatttgctcgaatctatatgtttttcaaccgtctctcgccgtgttcaagggccaggggacaaaagaatacgagatacaccacggaaagaagatcctgtacgacattcttgcatttgctaaagaatccgtaaactcacatgtgaccacgttgggcccccagaatttccctgccaacgataaggagccatggctggtcgactttttcgctccctggtgtcctccatgcagggccctcctgcccgaacttcggcgagcaagtaatctgttgtatggtcagctcaaatttgggactctggattgcacagtgcacgagggcttatgtaacatgtacaatatccaagcctatccgaccactgttgtgttcaaccagagcaacatacatgagtacgaaggacaccattccgctgagcagattctggagttcatcgaagacctaatgaatccttctgtcgtgagcctcacacccaccacgtttaacgaactggtaacccaacgcaagcacaatgaggtttggatggtggatttctattcaccatggtgccacccttgtcaggtccttatgcccgagtggaaaagaatggcgaggacattgactggcctgatcaacgtggggagtattgactgccagcagtaccattccttttgtgcacaagaaaatgtccagcggtatccagagatccgcttctttccccctaagagcaacaaggcctaccactaccattcttataatggatggaacagagatgcttactcactcaggatttggggtctgggcttcttaccacaggtgagtaccgacctgacaccgcagacttttagcgaaaaagttcttcaagggaagaatcactgggtgatagacttctatgccccctggtgcggaccttgtcagaactttgcaccagagttcgagttgctcgcccgtatgatcaaaggcaaggtaaaagctggtaaggtcgattgccaggcctacgcacagacctgtcaaaaggcggggattcgggcttatcccacagtgaaattttacttctatgaacgagccaagagaaattttcaggaggaacagatcaacaccagggacgcaaaagccatcgctgccctgatttccgagaagctagaaactctgcgcaatcagggcaaacggaacaaggatgagctctga

SEQ ID NO: 8211 - RNA, 2382 nt, synthetic construct
  misc_feature 1..2382: note = derived and/or modified sequence opt4 fromDJC10__Homo_sapiens__BAB55263
  source 1..2382: mol_type = other RNA
atgggcgtgtggctgaacaaggacgactacatcagagacctgaagagaatcatcctgtgcttcctgatcgtgtacatggccatcctggtgggcaccgaccaggacttctacagcctgctgggcgtgagcaagaccgccagcagcagagagatcagacaggccttcaagaagctggccctgaagctgcaccccgacaagaaccccaacaaccccaacgcccacggcgacttcctgaagatcaacagagcctacgaggtgctgaaggacgaggacctgagaaagaagtacgacaagtacggcgagaagggcctggaggacaaccagggcggccagtacgagagctggaactactacagatacgacttcggcatctacgacgacgaccccgagatcatcaccctggagagaagagagttcgacgccgccgtgaacagcggcgagctgtggttcgtgaacttctacagccccggctgcagccactgccacgacctggcccccacctggagagacttcgccaaggaggtggacggcctgctgagaatcggcgccgtgaactgcggcgacgacagaatgctgtgcagaatgaagggcgtgaacagctaccccagcctgttcatcttcagaagcggcatggcccccgtgaagtaccacggcgacagaagcaaggagagcctggtgagcttcgccatgcagcacgtgagaagcaccgtgaccgagctgtggaccggcaacttcgtgaacagcatccagaccgccttcgccgccggcatcggctggctgatcaccttctgcagcaagggcggcgactgcctgaccagccagaccagactgagactgagcggcatgctggacggcctggtgaacgtgggctggatggactgcgccacccaggacaacctgtgcaagagcctggacatcaccaccagcaccaccgcctacttcccccccggcgccaccctgaacaacaaggagaagaacagcatcctgttcctgaacagcctggacgccaaggagatctacctggaggtgatccacaacctgcccgacttcgagctgctgagcgccaacaccctggaggacagactggcccaccacagatggctgctgttcttccacttcggcaagaacgagaacagcaacgaccccgagctgaagaagctgaagaccctgctgaagaacgaccacatccaggtgggcagattcgactgcagcagcgcccccgacatctgcagcaacctgtacgtgttccagcccagcctggccgtgttcaagggccagggcaccaaggagtacgagatccaccacggcaagaagatcctgtacgacatcctggccttcgccaaggagagcgtgaacagccacgtgaccaccctgggcccccagaacttccccgccaacgacaaggagccctggctggtggacttcttcgccccctggtgccccccctgcagagccctgctgcccgagctgagaagagccagcaacctgctgtacggccagctgaagttcggcaccctggactgcaccgtgcacgagggcctgtgcaacatgtacaacatccaggcctaccccaccaccgtggtgttcaaccagagcaacatccacgagtacgagggccaccacagcgccgagcagatcctggagttcatcgaggacctgatgaaccccagcgtggtgagcctgacccccaccaccttcaacgagctggtgacccagagaaagcacaacgaggtgtggatggtggacttctacagcccctggtgccacccctgccaggtgctgatgcccgagtggaagagaatggccagaaccctgaccggcctgatcaacgtgggcagcatcgactgccagcagtaccacagcttctgcgcccaggagaacgtgcagagataccccgagatcagattcttcccccccaagagcaacaaggcctaccactaccacagctacaacggctggaacagagacgcctacagcctgagaatctggggcctgggcttcctgccccaggtgagcaccgacctgaccccccagaccttcagcgagaaggtgctgcagggcaagaaccactgggtgatcgacttctacgccccctggtgcggcccctgccagaacttcgcccccgagttcgagctgctggccagaatgatcaagggcaaggtgaaggccggcaaggtggactgccaggcctacgcccagacctgccagaaggccggcatcagagcctaccccaccgtgaagttctacttctacgagagagccaagagaaacttccaggaggagcagatcaacaccagagacgccaaggccatcgccgccctgatcagcgagaagctggagaccctgagaaaccagggcaagagaaacaaggacgagctgtga

SEQ ID NO: 8212 - RNA, 2382 nt, synthetic construct
  misc_feature 1..2382: note = derived and/or modified sequence opt5 fromDJC10__Homo_sapiens__BAB55263
  source 1..2382: mol_type = other RNA
atgggcgtgtggctgaacaaggacgattacatcagagacctcaaacggattatcctgtgcttccttattgtctatatggccatcctggttgggaccgatcaggacttttacagcctcctgggagtgtccaagacagcttctagccgcgagattagacaagccttcaaaaagctggcgcttaaactccaccccgataagaatcctaacaatccgaacgctcatggcgactttctgaagatcaatcgggcctatgaagtgctgaaagatgaggacctccgcaagaaatacgataagtatggggaaaaaggactggaggacaaccagggcgggcagtacgaatcctggaattattacagatacgatttcggaatctatgacgatgaccccgagattatcacgcttgagcggcgcgaatttgacgccgctgtcaactctggcgagctgtggttcgtgaatttttacagccctggctgttcccactgccatgatctcgcccccacctggagagacttcgctaaggaagttgatgggctgcttcggattggagccgtgaactgtggcgacgatcgcatgctgtgcagaatgaagggggtcaattcttatcctagcctctttatcttccggtccggaatggcgcccgtgaaataccacggcgaccgcagcaaggagtctctggtttcctttgccatgcagcatgtgagaagcacagtcaccgagctgtggacagggaacttcgtcaattctattcaaaccgcttttgccgctggaatcggctggctcattacattctgttccaaaggcggggattgcctgaccagccagacgcggcttcgcctgtctggaatgctcgacggcctggtgaacgtggggtggatggattgtgccacccaggacaatctttgcaagtccctggatatcacaaccagcacaaccgcgtatttccctccgggagccacgctcaacaacaaagaaaagaactccatcctgtttctcaattctctggacgctaaagagatttacctggaagttatccacaatcttcccgacttcgagctgctcagcgccaacacactggaagatagacttgctcaccatcggtggctgctctttttccactttggcaagaatgagaactccaatgaccctgagctgaagaaactgaagaccctcctgaaaaacgatcatattcaggtggggagattcgactgtagctctgcccccgatatctgctccaatctttatgtgtttcaacctagcctggccgtcttcaagggacagggcacaaaagaatacgagattcaccacggcaagaagatcctctacgacatcctggcttttgcgaaagaatctgtgaacagccatgttaccaccctggggccccagaatttcccggccaacgataaggagccttggcttgtggactttttcgctccctggtgtcctccctgccgcgccctcctgcccgaactgcggagagcctccaatctcctgtatggacagcttaaatttggcacactggattgcacggtccacgaggggctctgtaacatgtacaatattcaggcttatcctaccacagtggttttcaaccaatctaacatccatgagtacgaaggacaccatagcgccgagcagattctggagttcatcgaagacctgatgaatccgtccgtggtcagccttacccccacaacctttaacgaactcgtgacgcaacgcaagcacaatgaggtctggatggtggatttctattctccttggtgccacccctgtcaggttctgatgcctgagtggaaacggatggcgagaacactgaccggcctcattaacgtggggtccatcgactgccagcagtaccatagcttttgtgctcaagaaaatgtccagcgctatcccgagatccggttctttccgcctaagtctaacaaggcctaccactaccattcctataatggctggaacagagatgcctacagcctgcgcatttggggacttggcttcctgccccaggtgtccaccgacctcacacctcagaccttttctgaaaaagttctgcaagggaagaatcactgggtgatcgacttctatgctccctggtgcggaccttgtcagaactttgcccccgagttcgagctgcttgctcggatgattaaaggcaaggtcaaagccgggaaggtggattgccaggcgtacgcccagacatgtcaaaaggctggaatcagagcctatccgacggtgaaattttacttctatgaacgcgctaagcggaattttcaggaggaacagattaacaccagagacgccaaagcgatcgccgctctcattagcgagaagctggaaacactgcggaatcagggcaaacgcaacaaggatgagctctga

SEQ ID NO: 8213 - protein, 198 aa, synthetic construct
  REGION 1..198: note = DJC12__Homo_sapiens__Q9UKB3
MDAILNYRSEDTEDYYTLLGCDELSSVEQILAEFKVRALECHPDKHPENPKAVETFQKLQKAKEILTNEESRARYDHWRRSQMSMPFQQWEALNDSVKTSMHWVVRGKKDLMLEESDKTHTTKMENEECNEQRERKKEELASTAEKTEQKEPKPLEKSVSPQNSDSSGFADVNGWHLRFRWSKDAPSELLRKFRNYEI

SEQ ID NO: 8214 - RNA, 597 nt, synthetic construct
  misc_feature 1..597: note = DJC12__Homo_sapiens__AAD52650
  source 1..597: mol_type = other RNA
atggatgcaatactgaattacaggtcagaagatactgaagattactacacattactgggatgtgatgaactatcttcggttgaacaaatcctggcagaatttaaagtcagagctctggaatgtcacccagacaagcatcctgaaaaccccaaagctgtggagacttttcagaaactgcagaaggcaaaggagattctgaccaatgaagagagtcgagcccgctatgaccactggcgaaggagccagatgtcgatgccattccagcagtgggaagctttgaatgactcagtgaagacgtcaatgcactgggttgtcagaggtaaaaaagacctgatgctggaagaatctgacaagactcataccaccaagatggaaaatgaggaatgtaatgagcaaagagaaagaaagaaagaggagctggcttcaaccgcagagaaaacggagcagaaagaacccaagcccctagagaagtcagtctccccgcaaaattcagattcttcaggttttgcagatgtgaatggttggcaccttcgtttccgctggtccaaggatgctccctcagaactcctgaggaagttcagaaactatgaaatatga

SEQ ID NO: 8215 - RNA, 597 nt, synthetic construct
  misc_feature 1..597: note = derived and/or modified sequence opt1 fromDJC12__Homo_sapiens__AAD52650
  source 1..597: mol_type = other RNA
atggacgccatcctgaactaccgcagcgaggacaccgaggactactacaccctcctgggctgcgacgagctgtccagcgtggagcagatcctcgccgagttcaaggtccgggcgctggagtgccaccccgacaagcacccggagaaccccaaggccgtggagacgttccagaagctgcagaaggccaaggagatcctcaccaacgaggagtcccgcgcccggtacgaccactggcgccggagccagatgtccatgcccttccagcagtgggaggccctgaacgacagcgtgaagacctccatgcactgggtcgtgcgcgggaagaaggacctgatgctcgaggagagcgacaagacccacacgaccaagatggagaacgaggagtgcaacgagcagcgggagcgcaagaaggaggagctggcgtccaccgccgagaagaccgagcagaaggagcccaagccgctggagaagtccgtgagcccccagaacagcgactccagcggcttcgccgacgtcaacgggtggcacctccggttccgctggtccaaggacgcccccagcgagctgctgcggaagttccgcaactacgagatctga

SEQ ID NO: 8216 - RNA, 597 nt, synthetic construct
  misc_feature 1..597: note = derived and/or modified sequence opt2 fromDJC12__Homo_sapiens__AAD52650
  source 1..597: mol_type = other RNA
atggacgccatcctcaactaccgctccgaggacaccgaggactactacaccctcctcggctgcgacgagctctcctccgtcgagcagatcctcgccgagttcaaggtccgcgccctcgagtgccaccccgacaagcaccccgagaaccccaaggccgtcgagaccttccagaagctccagaaggccaaggagatcctcaccaacgaggagtcccgcgcccgctacgaccactggcgccgctcccagatgtccatgcccttccagcagtgggaggccctcaacgactccgtcaagacctccatgcactgggtcgtccgcggcaagaaggacctcatgctcgaggagtccgacaagacccacaccaccaagatggagaacgaggagtgcaacgagcagcgcgagcgcaagaaggaggagctcgcctccaccgccgagaagaccgagcagaaggagcccaagcccctcgagaagtccgtctccccccagaactccgactcctccggcttcgccgacgtcaacggctggcacctccgcttccgctggtccaaggacgccccctccgagctcctccgcaagttccgcaactacgagatctga

SEQ ID NO: 8217 - RNA, 597 nt, synthetic construct
  misc_feature 1..597: note = derived and/or modified sequence opt3 fromDJC12__Homo_sapiens__AAD52650
  source 1..597: mol_type = other RNA
atggacgccatcctgaactacagaagcgaggataccgaagactattacacactccttggctgcgatgagctgtcctctgtggaacagattttggctgagttcaaggtcagggcattagaatgtcaccccgacaaacatcctgagaatccaaaggccgttgagacttttcaaaaactgcagaaggcgaaagaaatactaacgaacgaggaatcacgggctcgctatgatcactggcgacgtagtcagatgagcatgccgttccagcaatgggaggccctcaatgactccgtgaagacctctatgcattgggtagtgagagggaagaaagatctgatgcttgaggaatcggacaagacacacactaccaaaatggagaacgaagagtgcaatgaacagagggagcggaagaaagaggaactggcatcaacagccgagaagaccgaacagaaggagcccaaacctttggaaaagagcgtcagtccacagaactccgattctagcggatttgctgacgtgaatggttggcatctccgcttcagatggtccaaagatgcaccctcagagctgctgaggaagtttcggaactacgagatctga

SEQ ID NO: 8218 - RNA, 597 nt, synthetic construct
  misc_feature 1..597: note = derived and/or modified sequence opt4 fromDJC12__Homo_sapiens__AAD52650
  source 1..597: mol_type = other RNA
atggacgccatcctgaactacagaagcgaggacaccgaggactactacaccctgctgggctgcgacgagctgagcagcgtggagcagatcctggccgagttcaaggtgagagccctggagtgccaccccgacaagcaccccgagaaccccaaggccgtggagaccttccagaagctgcagaaggccaaggagatcctgaccaacgaggagagcagagccagatacgaccactggagaagaagccagatgagcatgcccttccagcagtgggaggccctgaacgacagcgtgaagaccagcatgcactgggtggtgagaggcaagaaggacctgatgctggaggagagcgacaagacccacaccaccaagatggagaacgaggagtgcaacgagcagagagagagaaagaaggaggagctggccagcaccgccgagaagaccgagcagaaggagcccaagcccctggagaagagcgtgagcccccagaacagcgacagcagcggcttcgccgacgtgaacggctggcacctgagattcagatggagcaaggacgcccccagcgagctgctgagaaagttcagaaactacgagatctga

SEQ ID NO: 8219 - RNA, 597 nt, synthetic construct
  misc_feature 1..597: note = derived and/or modified sequence opt5 fromDJC12__Homo_sapiens__AAD52650
  source 1..597: mol_type = other RNA
atggacgccatcctgaactacagaagcgaggataccgaagactattacacactcctgggctgcgatgagctttcctctgtggaacagattctggctgagttcaaggtccgggccctcgaatgtcaccccgacaaacatcctgagaatccgaaggcggttgagacgtttcaaaaactgcagaaggctaaagaaatccttaccaacgaggaaagccgcgccagatatgatcactggcggcgctcccagatgtctatgcccttccagcaatgggaggccctgaatgacagcgtgaagacatccatgcattgggtggtcagagggaagaaagatctcatgctggaggaatctgacaagacccacacaaccaaaatggagaacgaagagtgcaatgaacagcgggagcgcaagaaagaggaactggctagcacagccgagaagaccgaacagaaggagcctaaacccctcgaaaagtccgtgagccctcagaactctgattccagcggatttgctgacgttaatggctggcatctgagattccggtggtctaaagatgccccctccgagcttctgcgcaagtttagaaactacgagatttga

SEQ ID NO: 8220 - protein, 702 aa, synthetic construct
  REGION 1..702: note = DJC14__Homo_sapiens__Q6Y2X3
MAQKHPGERGLYGAHHSGGASLRTLGPSVDPEIPSFSGLRDSAGTAPNGTRCLTEHSGPKHTQHPNPAHWLDPSHGPPGGPGPPRDAEDPDQSETSSEEESGVDQELSKENETGNQKDGNSFLSIPSACNCQGTPGIPEGPYSEGGNGSSSNFCHHCTSPALGEDELEEEYDDEESLKFPSDFSRVSSGKKPPSRRQRHRFPTKEDTREGGRRDPRSPGRHRLGRKRSQADKRKGLGLWGAEELCQLGQAGFWWLIELLVLVGEYVETCGHLIYACRQLKSSDLDLFRVWMGVWTGRLGGWAQVMFQFLSQGFYCGVGLFTRFLKLLGALLLLALALFLGFLQLGWRFLVGLGDRLGWRDKATWLFSWLDSPALQRCLTLLRDSRPWQRLVRIVQWGWLELPWVKQNINRQGNAPVASGRYCQPEEEVARLLTMAGVPEDELNPFHVLGVEATASDVELKKAYRQLAVMVHPDKNHHPRAEEAFKVLRAAWDIVSNAEKRKEYEMKRMAENELSRSVNEFLSKLQDDLKEAMNTMMCSRCQGKHRRFEMDREPKSARYCAECNRLHPAEEGDFWAESSMLGLKITYFALMDGKVYDITEWAGCQRVGISPDTHRVPYHISFGSRIPGTRGRQRATPDAPPADLQDFLSRIFQVPPGQMPNGNFFAAPQPAPGAAAASKPNSTVPKGEAKPKRRKKVRRPFQR

SEQ ID NO: 8221 - RNA, 2109 nt, synthetic construct
  misc_feature 1..2109: note = DJC14__Homo_sapiens__AAI17147
  source 1..2109: mol_type = other RNA
atggcccagaagcaccccggagaaagagggttgtatggagcccaccacagtggtggtgcctccctcaggactttaggaccctccgtggaccctgaaataccttcattctcaggactcagggactcagcagggactgctcctaatggtacccgctgcctcacagagcactctggtcctaagcacacacagcacccaaacccagcccattggttggacccaagccatggccccccagggggtccaggaccacctagagatgcagaggaccctgatcagagtgagacgtcttcagaagaagaatcaggagtggaccaggaactctcaaaagaaaacgagactgggaaccagaaggatgggaactcttttctttccattccatctgcttgcaactgccagggaacacctggaattccagaagggccttactctgagggaggaaatggttcttctagcaacttttgccaccactgtacctctccagctttgggggaagatgagttggaagaggaatatgatgatgaagaatctctcaagttccccagtgatttttcgcgtgtgtccagcggaaagaaacccccatcccggagacagcggcaccgctttccaacgaaggaggatactcgggagggtggacgtagggatcccaggtcccctggtcgacatcggctgggtcggaaacgaagtcaggcagataagcgcaaaggcctgggattgtggggagccgaggaactatgtcaacttggacaggcaggcttttggtggctgattgaactgctggtattggtgggagagtacgtagaaacttgtggccatctcatctatgcctgcaggcaactgaaaagcagtgatttggacctttttcgagtttggatgggagtgtggacagggcggttagggggctgggcccaggtcatgtttcagtttctaagccaggggttttactgtggagtaggactgtttactcgttttcttaagctgctgggtgctttgctgctcctggctctggccctctttttgggctttctacagttgggatggcggtttctggtgggactaggtgaccggttaggctggagggataaggctacctggctcttctcttggctggattctccagccttgcagcgttgcttgactctgctgagagatagcaggccatggcagcggctggtaagaatagttcagtggggctggctggagttgccttgggtcaagcagaatattaataggcaggggaatgcacctgtagctagtgggcgctactgccagcctgaagaggaagtggctcgactcttgaccatggctggggttcctgaggatgagctaaaccctttccatgtactgggggttgaggccacagcatcagatgttgaactgaagaaggcctatagacagctggcagtgatggttcatcctgacaaaaatcatcatccccgggctgaggaggccttcaaggttttgcgagcagcttgggacattgtcagcaatgctgaaaagcgaaaggagtatgagatgaaacgaatggcagagaatgagctgagccggtcagtaaatgagtttctgtccaagctgcaagatgacctcaaggaggcaatgaatactatgatgtgtagccgatgccaaggaaagcataggaggtttgaaatggaccgggaacctaagagtgccagatactgtgctgagtgtaataggctgcatcctgctgaggaaggagacttttgggcagagtcaagcatgttgggcctcaagatcacctactttgcactgatggatggaaaggtgtatgacatcacagagtgggctggatgccagcgtgtaggtatctccccagatacccacagagtcccctatcacatctcatttggttctcggattccaggcaccagagggcggcagagagccaccccagatgcccctcctgctgatcttcaggatttcttgagtcggatctttcaagtacccccagggcagatgcccaatgggaacttctttgcagctcctcagcctgcccctggagccgctgcagcctctaagcccaacagcacagtacccaagggagaagccaaacctaagcggcggaagaaagtgaggaggcccttccaacgttga

SEQ ID NO: 8222 - RNA, 2109 nt, synthetic construct
  misc_feature 1..2109: note = derived and/or modified sequence opt1 fromDJC14__Homo_sapiens__AAI17147
  source 1..2109: mol_type = other RNA
atggcccagaagcaccccggcgagcgcgggctgtacggcgcccaccacagcgggggcgcgtccctccggaccctggggccgagcgtggaccccgagatcccctccttcagcggcctgcgcgactccgccggcaccgcccccaacgggacgcggtgcctcaccgagcacagcggcccgaagcacacccagcaccccaaccccgcccactggctggacccctcccacgggccgcccggcgggcccgggcccccgcgcgacgccgaggaccccgaccagagcgagacctccagcgaggaggagtccggcgtcgaccaggagctgagcaaggagaacgagacggggaaccagaaggacggcaactccttcctcagcatcccctccgcgtgcaactgccaggggacccccggcatcccggagggcccctacagcgagggcggcaacgggtccagctccaacttctgccaccactgcaccagccccgccctgggcgaggacgagctggaggaggagtacgacgacgaggagagcctcaagttcccctccgacttcagccgggtgtccagcgggaagaagccgccctcccgccggcagcgccaccggttccccaccaaggaggacacgcgcgagggcggccggcgcgacccccggagcccggggcgccaccggctgggccgcaagcggtcccaggccgacaagcgcaaggggctgggcctctggggcgccgaggagctgtgccagctggggcaggcgggcttctggtggctcatcgagctgctggtgctcgtcggggagtacgtggagacctgcggccacctgatctacgcctgccggcagctcaagagctccgacctggacctgttccgcgtgtggatgggggtctggaccggccggctcgggggctgggcccaggtgatgttccagttcctgagccagggcttctactgcggggtgggcctgttcacccgcttcctgaagctcctgggggccctgctcctgctggccctcgcgctgttcctgggcttcctccagctgggctggcgcttcctggtcgggctcggcgaccggctggggtggcgcgacaaggccacgtggctgttctcctggctcgacagccccgccctgcagcggtgcctgaccctcctgcgcgactcccggccctggcagcgcctggtgcggatcgtgcagtggggctggctcgagctgccctgggtcaagcagaacatcaaccgccaggggaacgccccggtggccagcggccggtactgccagcccgaggaggaggtggcgcgcctgctgaccatggccggcgtccccgaggacgagctcaacccgttccacgtgctgggggtggaggccaccgcctccgacgtcgagctgaagaaggcctaccggcagctcgcggtgatggtgcaccccgacaagaaccaccacccccgcgccgaggaggccttcaaggtcctgcgggccgcctgggacatcgtgagcaacgcggagaagcgcaaggagtacgagatgaagcggatggccgagaacgagctgtcccgcagcgtgaacgagttcctctccaagctgcaggacgacctgaaggaggccatgaacacgatgatgtgcagccggtgccagggcaagcaccgccggttcgagatggaccgcgagcccaagagcgcccgctactgcgcggagtgcaaccggctccacccggccgaggagggggacttctgggccgagtccagcatgctgggcctgaagatcacctacttcgccctcatggacgggaaggtctacgacatcaccgagtgggccggctgccagcgcgtgggcatctcccccgacacccaccgggtcccctaccacatcagcttcgggtcccgcatccccggcacgcgggggcgccagcgggcgaccccggacgccccgcccgccgacctgcaggacttcctgagccgcatcttccaggtgccgcccggccagatgcccaacgggaacttcttcgccgcgccccagcccgcccccggcgccgccgccgcctccaagcccaacagcaccgtgcccaagggcgaggcgaagcccaagcggcgcaagaaggtccggcgcccgttccagcggtga

SEQ ID NO: 8223 - RNA, 2109 nt, synthetic construct
  misc_feature 1..2109: note = derived and/or modified sequence opt2 fromDJC14__Homo_sapiens__AAI17147
  source 1..2109: mol_type = other RNA
atggcccagaagcaccccggcgagcgcggcctctacggcgcccaccactccggcggcgcctccctccgcaccctcggcccctccgtcgaccccgagatcccctccttctccggcctccgcgactccgccggcaccgcccccaacggcacccgctgcctcaccgagcactccggccccaagcacacccagcaccccaaccccgcccactggctcgacccctcccacggcccccccggcggccccggccccccccgcgacgccgaggaccccgaccagtccgagacctcctccgaggaggagtccggcgtcgaccaggagctctccaaggagaacgagaccggcaaccagaaggacggcaactccttcctctccatcccctccgcctgcaactgccagggcacccccggcatccccgagggcccctactccgagggcggcaacggctcctcctccaacttctgccaccactgcacctcccccgccctcggcgaggacgagctcgaggaggagtacgacgacgaggagtccctcaagttcccctccgacttctcccgcgtctcctccggcaagaagcccccctcccgccgccagcgccaccgcttccccaccaaggaggacacccgcgagggcggccgccgcgacccccgctcccccggccgccaccgcctcggccgcaagcgctcccaggccgacaagcgcaagggcctcggcctctggggcgccgaggagctctgccagctcggccaggccggcttctggtggctcatcgagctcctcgtcctcgtcggcgagtacgtcgagacctgcggccacctcatctacgcctgccgccagctcaagtcctccgacctcgacctcttccgcgtctggatgggcgtctggaccggccgcctcggcggctgggcccaggtcatgttccagttcctctcccagggcttctactgcggcgtcggcctcttcacccgcttcctcaagctcctcggcgccctcctcctcctcgccctcgccctcttcctcggcttcctccagctcggctggcgcttcctcgtcggcctcggcgaccgcctcggctggcgcgacaaggccacctggctcttctcctggctcgactcccccgccctccagcgctgcctcaccctcctccgcgactcccgcccctggcagcgcctcgtccgcatcgtccagtggggctggctcgagctcccctgggtcaagcagaacatcaaccgccagggcaacgcccccgtcgcctccggccgctactgccagcccgaggaggaggtcgcccgcctcctcaccatggccggcgtccccgaggacgagctcaaccccttccacgtcctcggcgtcgaggccaccgcctccgacgtcgagctcaagaaggcctaccgccagctcgccgtcatggtccaccccgacaagaaccaccacccccgcgccgaggaggccttcaaggtcctccgcgccgcctgggacatcgtctccaacgccgagaagcgcaaggagtacgagatgaagcgcatggccgagaacgagctctcccgctccgtcaacgagttcctctccaagctccaggacgacctcaaggaggccatgaacaccatgatgtgctcccgctgccagggcaagcaccgccgcttcgagatggaccgcgagcccaagtccgcccgctactgcgccgagtgcaaccgcctccaccccgccgaggagggcgacttctgggccgagtcctccatgctcggcctcaagatcacctacttcgccctcatggacggcaaggtctacgacatcaccgagtgggccggctgccagcgcgtcggcatctcccccgacacccaccgcgtcccctaccacatctccttcggctcccgcatccccggcacccgcggccgccagcgcgccacccccgacgccccccccgccgacctccaggacttcctctcccgcatcttccaggtcccccccggccagatgcccaacggcaacttcttcgccgccccccagcccgcccccggcgccgccgccgcctccaagcccaactccaccgtccccaagggcgaggccaagcccaagcgccgcaagaaggtccgccgccccttccagcgctga

SEQ ID NO: 8224 - RNA, 2109 nt, synthetic construct
  misc_feature 1..2109: note = derived and/or modified sequence opt3 fromDJC14__Homo_sapiens__AAI17147
  source 1..2109: mol_type = other RNA
atggcccagaagcaccccggcgagagagggctgtacggagctcatcacagcggtggcgcatccctcaggacccttgggccttctgtggacccagaaatcccgtcattcagtggactgcgggatagcgccggcacagcgcccaacggtactcgctgcttgacggagcattccgggcctaaacacacccaacatccaaatcccgctcactggttagacccttctcacggaccacccggcggccctgggccaccgcgagatgccgaagaccccgatcagtcggagacatcaagcgaagaggagagtggagtcgaccaggaactgtccaaggagaacgaaactggtaatcagaaagatggcaactcttttctaagcattccttccgcatgtaattgccaagggaccccaggaatacccgagggcccttattcagagggtgggaacggaagtagctctaatttctgtcatcactgcacatccccagccctcggcgaagacgagctggaagaggaatacgatgacgaggagtcacttaagtttcccagcgatttcagtcgtgtttcttccggcaaaaagccgcctagcagaaggcagcggcatcgctttcccaccaaggaagacactagagaagggggaaggcgggatccacgctcgcctggtcgacacagactgggcaggaaacggtctcaggctgacaagcgtaaagggttgggactctggggcgcagaggagctgtgtcagctgggtcaagccgggttctggtggctcatcgaattactggtgcttgtaggcgagtatgtggagacatgcggacacttgatttacgcttgtcgccagctgaagtcctcagacctagatctctttagagtctggatgggcgtgtggaccgggaggctgggaggttgggcccaggttatgttccagtttcttagtcaaggcttctattgcggggtgggactgtttacgcggttcttgaaactcctgggcgcgttactgctccttgcactggccttgtttctaggtttcctgcagctcgggtggcgattcctggtcggccttggagaccgcctgggctggagagataaggctacttggttgtttagctggctcgactcccccgccctgcagaggtgtttaaccctgctacgggattctcgcccatggcaaagactcgtgaggatcgtacagtgggggtggctggaacttccctgggttaagcagaacattaatcgtcagggaaacgcacctgtggctagcggtcggtactgccaaccagaggaagaggtcgcccgattgctgacaatggcgggcgtgccggaagacgagctcaatcccttccatgtgctgggggtcgaggccactgcatcagatgttgaacttaaaaaggcttatagacagctggccgtgatggtacaccctgacaaaaaccatcacccaagggctgaggaagcctttaaggtgttgcgcgcagcctgggatatcgtcagtaatgctgagaaacggaaggagtacgaaatgaaaagaatggcggagaacgaactctccaggagcgtgaatgagttcctgtctaagttacaggacgatctgaaggaagcaatgaacaccatgatgtgttcacgctgccagggaaaacatcgacggtttgagatggaccgtgagcccaagagtgccagatactgcgctgaatgtaacaggctacaccctgccgaggaaggcgacttctgggcagagagctccatgctcggtctgaaaataacatattttgcccttatggatgggaaggtttacgacatcaccgaatgggctggctgccaacgcgtgggaatttctccagatacgcaccgggtcccctatcatatctcgttcggcagcaggattccggggactagaggacgacagcgcgccacacctgacgcaccacccgcggatttgcaggactttctgtcccggatcttccaggtgcctcccggccaaatgccaaatggtaactttttcgctgcccctcagcccgcaccaggggccgctgccgcatcaaaaccgaatagtaccgtacctaagggagaggctaagcccaaaagaaggaagaaagttcgtcgcccatttcagcggtga

SEQ ID NO: 8225 - RNA, 2109 nt, synthetic construct
  misc_feature 1..2109: note = derived and/or modified sequence opt4 fromDJC14__Homo_sapiens__AAI17147
  source 1..2109: mol_type = other RNA
atggcccagaagcaccccggcgagagaggcctgtacggcgcccaccacagcggcggcgccagcctgagaaccctgggccccagcgtggaccccgagatccccagcttcagcggcctgagagacagcgccggcaccgcccccaacggcaccagatgcctgaccgagcacagcggccccaagcacacccagcaccccaaccccgcccactggctggaccccagccacggcccccccggcggccccggcccccccagagacgccgaggaccccgaccagagcgagaccagcagcgaggaggagagcggcgtggaccaggagctgagcaaggagaacgagaccggcaaccagaaggacggcaacagcttcctgagcatccccagcgcctgcaactgccagggcacccccggcatccccgagggcccctacagcgagggcggcaacggcagcagcagcaacttctgccaccactgcaccagccccgccctgggcgaggacgagctggaggaggagtacgacgacgaggagagcctgaagttccccagcgacttcagcagagtgagcagcggcaagaagccccccagcagaagacagagacacagattccccaccaaggaggacaccagagagggcggcagaagagaccccagaagccccggcagacacagactgggcagaaagagaagccaggccgacaagagaaagggcctgggcctgtggggcgccgaggagctgtgccagctgggccaggccggcttctggtggctgatcgagctgctggtgctggtgggcgagtacgtggagacctgcggccacctgatctacgcctgcagacagctgaagagcagcgacctggacctgttcagagtgtggatgggcgtgtggaccggcagactgggcggctgggcccaggtgatgttccagttcctgagccagggcttctactgcggcgtgggcctgttcaccagattcctgaagctgctgggcgccctgctgctgctggccctggccctgttcctgggcttcctgcagctgggctggagattcctggtgggcctgggcgacagactgggctggagagacaaggccacctggctgttcagctggctggacagccccgccctgcagagatgcctgaccctgctgagagacagcagaccctggcagagactggtgagaatcgtgcagtggggctggctggagctgccctgggtgaagcagaacatcaacagacagggcaacgcccccgtggccagcggcagatactgccagcccgaggaggaggtggccagactgctgaccatggccggcgtgcccgaggacgagctgaaccccttccacgtgctgggcgtggaggccaccgccagcgacgtggagctgaagaaggcctacagacagctggccgtgatggtgcaccccgacaagaaccaccaccccagagccgaggaggccttcaaggtgctgagagccgcctgggacatcgtgagcaacgccgagaagagaaaggagtacgagatgaagagaatggccgagaacgagctgagcagaagcgtgaacgagttcctgagcaagctgcaggacgacctgaaggaggccatgaacaccatgatgtgcagcagatgccagggcaagcacagaagattcgagatggacagagagcccaagagcgccagatactgcgccgagtgcaacagactgcaccccgccgaggagggcgacttctgggccgagagcagcatgctgggcctgaagatcacctacttcgccctgatggacggcaaggtgtacgacatcaccgagtgggccggctgccagagagtgggcatcagccccgacacccacagagtgccctaccacatcagcttcggcagcagaatccccggcaccagaggcagacagagagccacccccgacgccccccccgccgacctgcaggacttcctgagcagaatcttccaggtgccccccggccagatgcccaacggcaacttcttcgccgccccccagcccgcccccggcgccgccgccgccagcaagcccaacagcaccgtgcccaagggcgaggccaagcccaagagaagaaagaaggtgagaagacccttccagagatga

SEQ ID NO: 8226 - RNA, 2109 nt, synthetic construct
  misc_feature 1..2109: note = derived and/or modified sequence opt5 fromDJC14__Homo_sapiens__AAI17147
  source 1..2109: mol_type = other RNA
atggcccagaagcaccccggcgagagagggctgtacggagctcatcacagcggcggggcctccctccggaccctgggaccttctgtggacccggaaatccccagcttctccggccttcgcgattctgcggggacagctcctaacggaacgagatgcctgaccgagcatagcggccccaaacacacacaacatcctaatcccgcccactggctcgacccttcccacggcccgcccgggggacctgggccccctcgggatgccgaagaccccgatcagtctgagaccagctccgaagaggagagcggggtcgaccaggaactgtctaaggagaacgaaacaggaaatcagaaagatggcaactcctttcttagcattccgtctgcttgtaattgccaagggacccctggaatccccgagggcccttattccgagggcgggaacggatctagctccaatttctgtcatcactgcacaagccccgccctgggcgaagacgagctcgaagaggaatacgatgacgaggagtccctgaagtttccctctgatttcagccgcgtttccagcgggaaaaagcctccgtctagacggcagcgccatagatttcccaccaaggaagacacgcgggagggaggccgcagagatcctcggtcccccgggcgccacagactgggacggaaacgcagccaggctgacaagagaaaaggcctcggcctgtggggcgccgaggaactttgtcagctgggacaagcgggcttctggtggctcattgaactgcttgtgctggtgggggagtatgtcgagacctgcggacacctcatctacgcctgtcggcagctgaagtctagcgacctggatctctttagagtgtggatgggcgtttggacagggcgcctgggcggatgggctcaggtgatgttccagtttctttcccaaggcttctattgcggggtcggactgtttacccggttcctcaaactgcttggcgccctgctcctgctggctctcgccctgtttcttgggttcctgcagctcggatggagattcctggtgggccttggggaccgcctgggctggcgggataaggcgacatggctcttttcttggctggacagccctgccctgcagagatgtctcaccctgcttcgcgattcccggccctggcaaagactggttcgcattgtgcagtggggatggctcgaactgccgtgggtcaagcagaacatcaatcggcagggcaacgctcctgtggccagcgggagatactgccaacccgaggaagaggtggctcgcctgcttacgatggccggagtccctgaagacgagctcaatcccttccatgttctgggcgtggaggccacagcttctgatgtggaactgaaaaaggcgtatcggcagctcgccgtcatggtgcaccctgacaaaaaccatcaccccagagctgaggaagcctttaaggttctgcgggccgcttgggatatcgtgtccaatgccgagaaacgcaaggagtacgaaatgaaaagaatggcggagaacgaacttagccggtctgtcaatgagttcctgtccaagctccaggacgatctgaaggaagctatgaacaccatgatgtgtagcagatgccaggggaaacatcgccggtttgagatggacagagagccgaagtccgcccgctactgcgccgaatgtaacagactgcaccctgctgaggaaggagacttctgggccgagtctagcatgcttggcctcaaaattacatattttgctctgatggatgggaaggtgtacgacatcaccgaatgggccggctgccaacgggttggaatttcccccgatacccaccgcgtgccctatcatatctctttcggcagccggattcctgggacaagaggacgccagagagcgacgccggacgctccccctgccgatctgcaggactttctctcccggatcttccaggtgccccctggccaaatgcccaatgggaactttttcgccgctcctcagcccgccccgggagcggccgctgccagcaaacctaattctaccgtccccaagggcgaggctaagcctaaacgcagaaagaaagtccggcgcccctttcagagatga

SEQ ID NO: 8227 - protein, 150 aa, synthetic construct
  REGION 1..150: note = DJC15__Homo_sapiens__Q9Y5T4
MAARGVIAPVGESLRYAEYLQPSAKRPDADVDQQRLVRSLIAVGLGVAALAFAGRYAFRIWKPLEQVITETAKKISTPSFSSYYKGGFEQKMSRREAGLILGVSPSAGKAKIRTAHRRVMILNHPDKGGSPYVAAKINEAKDLLETTTKH

SEQ ID NO: 8228 - RNA, 453 nt, synthetic construct
  misc_feature 1..453: note = DJC15__Homo_sapiens__AAH95400
  source 1..453: mol_type = other RNA
atggctgcccgtggtgtcatcgctccagttggcgagagtttgcgctacgctgagtacttgcagccctcggccaaacggccagacgccgacgtcgaccagcagagactggtaagaagtttgatagctgtaggcctgggtgttgcagctcttgcatttgcaggtcgctacgcatttcggatctggaaacctctagaacaagttatcacagaaactgcaaagaagatttcaactcctagcttttcatcctactataaaggaggatttgaacagaaaatgagtaggcgagaagctggtcttattttaggtgtaagcccatctgctggcaaggctaagattagaacagctcataggagagtcatgattttgaatcacccagataaaggtggatctccttacgtagcagccaaaataaatgaagcaaaagacttgctagaaacaaccaccaaacattga

SEQ ID NO: 8229 - RNA, 453 nt, synthetic construct
  misc_feature 1..453: note = derived and/or modified sequence opt1 fromDJC15__Homo_sapiens__AAH95400
  source 1..453: mol_type = other RNA
atggccgcccgcggcgtgatcgcgcccgtcggggagagcctgcggtacgccgagtacctccagccgtccgccaagcgccccgacgccgacgtggaccagcagcggctggtgcgcagcctgatcgccgtcggcctcggggtggcggccctggccttcgccggccggtacgcgttccgcatctggaagcccctggagcaggtcatcaccgagaccgccaagaagatctccacgcccagcttctccagctactacaagggcgggttcgagcagaagatgtcccggcgcgaggccggcctcatcctgggggtgagcccgtccgccggcaaggccaagatccggaccgcgcaccgccgggtgatgatcctgaaccaccccgacaagggcgggagcccctacgtggccgccaagatcaacgaggccaaggacctcctggagaccaccacgaagcactga

SEQ ID NO: 8230 - RNA, 453 nt, synthetic construct
  misc_feature 1..453: note = derived and/or modified sequence opt2 fromDJC15__Homo_sapiens__AAH95400
  source 1..453: mol_type = other RNA
atggccgcccgcggcgtcatcgcccccgtcggcgagtccctccgctacgccgagtacctccagccctccgccaagcgccccgacgccgacgtcgaccagcagcgcctcgtccgctccctcatcgccgtcggcctcggcgtcgccgccctcgccttcgccggccgctacgccttccgcatctggaagcccctcgagcaggtcatcaccgagaccgccaagaagatctccaccccctccttctcctcctactacaagggcggcttcgagcagaagatgtcccgccgcgaggccggcctcatcctcggcgtctccccctccgccggcaaggccaagatccgcaccgcccaccgccgcgtcatgatcctcaaccaccccgacaagggcggctccccctacgtcgccgccaagatcaacgaggccaaggacctcctcgagaccaccaccaagcactga

SEQ ID NO: 8231 - RNA, 453 nt, synthetic construct
  misc_feature 1..453: note = derived and/or modified sequence opt3 fromDJC15__Homo_sapiens__AAH95400
  source 1..453: mol_type = other RNA
atggccgctagaggcgtgatcgcacccgtcggggagagcctgaggtacgccgaatatctccagccttccgcgaagcggccagacgctgatgttgaccaacagcgccttgtgcgatctctgattgccgtaggattgggtgtggcagccttagctttcgcaggccgttacgcctttagaatatggaaaccgctggagcaggtcatcaccgaaacagctaagaaaatttcaactcccagtttcagctcctattacaaagggggatttgagcagaagatgtctaggcgggaagccggcctaatcctcggtgtgtcgccttcagcggggaaggcaaagattcgcacggcccacagaagggttatgatcctgaaccatccagataaaggaggcagcccctatgtggctgccaagataaatgaggcaaaagaccttctggagaccacaactaagcactga

SEQ ID NO: 8232 - RNA, 453 nt, synthetic construct
  misc_feature 1..453: note = derived and/or modified sequence opt4 fromDJC15__Homo_sapiens__AAH95400
  source 1..453: mol_type = other RNA
atggccgccagaggcgtgatcgcccccgtgggcgagagcctgagatacgccgagtacctgcagcccagcgccaagagacccgacgccgacgtggaccagcagagactggtgagaagcctgatcgccgtgggcctgggcgtggccgccctggccttcgccggcagatacgccttcagaatctggaagcccctggagcaggtgatcaccgagaccgccaagaagatcagcacccccagcttcagcagctactacaagggcggcttcgagcagaagatgagcagaagagaggccggcctgatcctgggcgtgagccccagcgccggcaaggccaagatcagaaccgcccacagaagagtgatgatcctgaaccaccccgacaagggcggcagcccctacgtggccgccaagatcaacgaggccaaggacctgctggagaccaccaccaagcactga

SEQ ID NO: 8233 - RNA, 453 nt, synthetic construct
  misc_feature 1..453: note = derived and/or modified sequence opt5 fromDJC15__Homo_sapiens__AAH95400
  source 1..453: mol_type = other RNA
atggccgctagaggcgtgatcgcccccgtcggggagagcctgcggtacgcggaatatctccagccttccgctaagcgcccggacgccgatgttgaccaacagagactggtgcggtctcttattgccgtgggactgggcgtcgctgccctcgctttcgccgggcgctacgcgtttagaatctggaaacccctggaacaggtgattaccgagacagccaagaaaatcagcacgccttccttctctagctattacaagggaggctttgagcagaaaatgtcccggcgcgaagctgggcttattctgggagtttctcccagcgccggcaaggctaagatcagaaccgcccaccggcgcgtgatgatcctcaaccatcctgataaaggcgggtccccctatgtcgcggccaagattaatgaggctaaagacctgctggagacaaccacaaagcactga

SEQ ID NO: 8234 - protein, 782 aa, synthetic construct
  REGION 1..782: note = DJC16__Homo_sapiens__Q9Y2G8
MEVRKLSISWQFLIVLVLILQILSALDFDPYRVLGVSRTASQADIKKAYKKLAREWHPDKNKDPGAEDKFIQISKAYEILSNEEKRSNYDQYGDAGENQGYQKQQQQREYRFRHFHENFYFDESFFHFPFNSERRDSIDEKYLLHFSHYVNEVVPDSFKKPYLIKITSDWCFSCIHIEPVWKEVIQELEELGVGIGVVHAGYERRLAHHLGAHSTPSILGIINGKISFFHNAVVRENLRQFVESLLPGNLVEKVTNKNYVRFLSGWQQENKPHVLLFDQTPIVPLLYKLTAFAYKDYLSFGYVYVGLRGTEEMTRRYNINIYAPTLLVFKEHINRPADVIQARGMKKQIIDDFITRNKYLLAARLTSQKLFHELCPVKRSHRQRKYCVVLLTAETTKLSKPFEAFLSFALANTQDTVRFVHVYSNRQQEFADTLLPDSEAFQGKSAVSILERRNTAGRVVYKTLEDPWIGSESDKFILLGYLDQLRKDPALLSSEAVLPDLTDELAPVFLLRWFYSASDYISDCWDSIFHNNWREMMPLLSLIFSALFILFGTVIVQAFSDSNDERESSPPEKEEAQEKTGKTEPSFTKENSSKIPKKGFVEVTELTDVTYTSNLVRLRPGHMNVVLILSNSTKTSLLQKFALEVYTFTGSSCLHFSFLSLDKHREWLEYLLEFAQDAAPIPNQYDKHFMERDYTGYVLALNGHKKYFCLFKPQKTVEEEEAIGSCSDVDSSLYLGESRGKPSCGLGSRPIKGKLSKLSLWMERLLEGSLQRFYIPSWPELD

SEQ ID NO: 8235 - RNA, 2349 nt, synthetic construct
  misc_feature 1..2349: note = DJC16__Homo_sapiens__AAH47363
  source 1..2349: mol_type = other RNA
atggaagtgagaaagttgagcatttcctggcagttcttgatagttctggttctgatcctgcaaattctgtctgcgttggattttgacccatacagagtcctaggggtcagccgaacagccagtcaggctgatattaaaaaggcttataagaagctcgcccgggaatggcatcctgacaaaaacaaagatcctggagcagaagacaagttcattcaaatcagtaaggcttacgagattctttcaaatgaagaaaagagatcaaattatgatcaatatggagacgctggagagaaccagggctaccagaagcagcaacagcagcgagagtatcgcttccgccatttccatgaaaatttttattttgatgaatccttttttcacttcccttttaattctgaacggcgggactcaattgacgaaaagtatttattgcacttttcacattatgtgaatgaagtggttccagatagcttcaagaaaccctacctcatcaagatcacctccgattggtgctttagctgcattcatatcgagcctgtgtggaaagaagtcattcaagaactggaagaattgggtgtaggaattggcgtggtccatgctgggtatgagagacgcctggcccatcacctaggggcacacagcacgccctctatcctaggaatcattaacgggaaaatctccttcttccacaatgcagttgtccgtgaaaatctgcgacaatttgtagaaagtcttcttccagggaacttggtggagaaagttacaaataaaaattacgtcagattcctctctggctggcagcaagagaataagcctcatgtccttctgtttgaccaaacgcccattgtgccactgttatacaagttgactgcctttgcatacaaagattatttatcatttggatatgtatatgtgggtttgagagggacggaagagatgacaaggcggtacaacatcaatatctacgcccctaccctcttggtctttaaagaacatataaacaggcctgccgatgttatccaggcccgaggtatgaagaagcaaatcattgacgacttcatcacccgaaacaaatatctattggcagccaggctcaccagccagaagttgttccatgaactctgccctgtgaaacggtcgcatcgacagaggaagtactgtgtggttttattgactgctgagactaccaagttgagcaaaccctttgaggctttcctgtcctttgccctggcaaacactcaagacacagtgagatttgtgcatgtctacagcaatcggcagcaggagtttgccgacaccttactaccagacagtgaggcgtttcaagggaaatcagcggtgtctattttagaaaggcgcaacacagcaggaagggtggtgtataaaaccctggaagacccttggattgggagtgagagtgacaaatttatcctcttgggctatctcgaccagctgcgtaaagatccagctcttctgtcctctgaagcagtgcttcctgacctgaccgatgaacttgcccctgtttttctccttcgatggttctactctgcttctgactacatctcagactgctgggatagcatttttcacaacaactggagggaaatgatgcccctgctgtccctgatcttctctgccctcttcatcctcttcggcactgtcatcgttcaggctttcagcgactctaatgatgagcgagagtcaagccctccagaaaaagaggaagcccaagagaagactgggaaaactgagccaagcttcaccaaagaaaacagcagcaagattcctaaaaaaggctttgtggaggtaactgaactcacagatgtaacatacaccagtaacttggtacgtctgaggccaggccacatgaatgtggtcctcatcctgtcgaattctaccaagaccagcctactacagaaatttgctttggaggtctacacatttactgggagcagctgcctacacttctccttcctgagtctagataaacacagagaatggctagaatacttactagaatttgctcaagatgcagctccaatcccaaaccaatatgataagcatttcatggagcgtgactacactggttatgtactggctctgaatggccacaagaaatacttctgcctcttcaagccccaaaagacagtcgaagaggaggaagccatagggtcgtgcagtgatgttgactcttccctctacctgggtgaatctcgagggaaaccttcctgtggccttggatccaggcccatcaaaggaaagttgagcaagctctctttatggatggaacgcctgctggagggctccttacagaggttttatatcccatcatggcctgaactagactga

SEQ ID NO: 8236 - RNA, 2349 nt, synthetic construct
  misc_feature 1..2349: note = derived and/or modified sequence opt1 fromDJC16__Homo_sapiens__AAH47363
  source 1..2349: mol_type = other RNA
atggaggtgcgcaagctgagcatctcctggcagttcctcatcgtcctggtgctgatcctccagatcctgagcgccctggacttcgacccctaccgggtgctcggcgtctcccgcaccgccagccaggcggacatcaagaaggcctacaagaagctggcccgggagtggcacccggacaagaacaaggaccccggggccgaggacaagttcatccagatctccaaggcctacgagatcctgagcaacgaggagaagcgctccaactacgaccagtacggcgacgcgggggagaaccagggctaccagaagcagcagcagcagcgggagtaccgcttccggcacttccacgagaacttctacttcgacgagagcttcttccacttccccttcaactccgagcgccgggacagcatcgacgagaagtacctcctgcacttctcccactacgtgaacgaggtggtccccgacagcttcaagaagccgtacctgatcaagatcacctccgactggtgcttcagctgcatccacatcgagcccgtgtggaaggaggtgatccaggagctcgaggagctgggggtcggcatcggcgtggtgcacgccgggtacgagcgccggctggcccaccacctcggcgcccactccacgcccagcatcctggggatcatcaacggcaagatctccttcttccacaacgcggtcgtgcgcgagaacctgcggcagttcgtggagagcctcctgcccgggaacctggtcgagaaggtgaccaacaagaactacgtgcgcttcctctccggctggcagcaggagaacaagccgcacgtcctgctgttcgaccagacccccatcgtgcccctcctgtacaagctgaccgccttcgcctacaaggactacctcagcttcggctacgtgtacgtcgggctgcggggcacggaggagatgacccgccggtacaacatcaacatctacgcccccaccctgctcgtgttcaaggagcacatcaaccgcccggccgacgtgatccaggcgcgggggatgaagaagcagatcatcgacgacttcatcacccgcaacaagtacctgctggccgcccggctcacgagccagaagctgttccacgagctgtgccccgtcaagcgctcccaccgccagcggaagtactgcgtggtcctcctgaccgccgagaccaccaagctgagcaagcccttcgaggccttcctctccttcgcgctggccaacacgcaggacaccgtgcgcttcgtgcacgtctacagcaaccggcagcaggagttcgccgacaccctgctccccgactccgaggccttccagggcaagagcgccgtgtccatcctggagcgccggaacaccgcgggccgcgtggtctacaagacgctggaggacccgtggatcgggagcgagtccgacaagttcatcctcctgggctacctggaccagctccggaaggaccccgccctgctgagctccgaggccgtgctgcccgacctcaccgacgagctggcccccgtgttcctgctccgctggttctacagcgcctccgactacatcagcgactgctgggactccatcttccacaacaactggcgggagatgatgccgctgctgagcctcatcttctccgcgctgttcatcctgttcgggaccgtcatcgtgcaggccttcagcgactccaacgacgagcgcgagagcagcccgcccgagaaggaggaggcccaggagaagaccggcaagacggagccctccttcaccaaggagaacagctccaagatccccaagaaggggttcgtggaggtcaccgagctcaccgacgtgacgtacaccagcaacctggtgcggctgcgccccggccacatgaacgtcgtgctcatcctgtccaacagcaccaagacctccctgctccagaagttcgccctggaggtgtacacgttcaccggcagctcctgcctgcacttcagcttcctctccctggacaagcaccgggagtggctggagtacctcctggagttcgcgcaggacgccgcccccatccccaaccagtacgacaagcacttcatggagcgcgactacaccgggtacgtcctggccctcaacggccacaagaagtacttctgcctgttcaagccgcagaagaccgtggaggaggaggaggccatcgggagctgctccgacgtggacagctccctgtacctcggcgagagccgggggaagccctcctgcggcctgggcagccgccccatcaaggggaagctgagcaagctctccctgtggatggagcggctgctcgagggcagcctgcagcgcttctacatcccgtcctggcccgagctggactga

SEQ ID NO: 8237 - RNA, 2349 nt, synthetic construct
  misc_feature 1..2349: note = derived and/or modified sequence opt2 fromDJC16__Homo_sapiens__AAH47363
  source 1..2349: mol_type = other RNA
atggaggtccgcaagctctccatctcctggcagttcctcatcgtcctcgtcctcatcctccagatcctctccgccctcgacttcgacccctaccgcgtcctcggcgtctcccgcaccgcctcccaggccgacatcaagaaggcctacaagaagctcgcccgcgagtggcaccccgacaagaacaaggaccccggcgccgaggacaagttcatccagatctccaaggcctacgagatcctctccaacgaggagaagcgctccaactacgaccagtacggcgacgccggcgagaaccagggctaccagaagcagcagcagcagcgcgagtaccgcttccgccacttccacgagaacttctacttcgacgagtccttcttccacttccccttcaactccgagcgccgcgactccatcgacgagaagtacctcctccacttctcccactacgtcaacgaggtcgtccccgactccttcaagaagccctacctcatcaagatcacctccgactggtgcttctcctgcatccacatcgagcccgtctggaaggaggtcatccaggagctcgaggagctcggcgtcggcatcggcgtcgtccacgccggctacgagcgccgcctcgcccaccacctcggcgcccactccaccccctccatcctcggcatcatcaacggcaagatctccttcttccacaacgccgtcgtccgcgagaacctccgccagttcgtcgagtccctcctccccggcaacctcgtcgagaaggtcaccaacaagaactacgtccgcttcctctccggctggcagcaggagaacaagccccacgtcctcctcttcgaccagacccccatcgtccccctcctctacaagctcaccgccttcgcctacaaggactacctctccttcggctacgtctacgtcggcctccgcggcaccgaggagatgacccgccgctacaacatcaacatctacgcccccaccctcctcgtcttcaaggagcacatcaaccgccccgccgacgtcatccaggcccgcggcatgaagaagcagatcatcgacgacttcatcacccgcaacaagtacctcctcgccgcccgcctcacctcccagaagctcttccacgagctctgccccgtcaagcgctcccaccgccagcgcaagtactgcgtcgtcctcctcaccgccgagaccaccaagctctccaagcccttcgaggccttcctctccttcgccctcgccaacacccaggacaccgtccgcttcgtccacgtctactccaaccgccagcaggagttcgccgacaccctcctccccgactccgaggccttccagggcaagtccgccgtctccatcctcgagcgccgcaacaccgccggccgcgtcgtctacaagaccctcgaggacccctggatcggctccgagtccgacaagttcatcctcctcggctacctcgaccagctccgcaaggaccccgccctcctctcctccgaggccgtcctccccgacctcaccgacgagctcgcccccgtcttcctcctccgctggttctactccgcctccgactacatctccgactgctgggactccatcttccacaacaactggcgcgagatgatgcccctcctctccctcatcttctccgccctcttcatcctcttcggcaccgtcatcgtccaggccttctccgactccaacgacgagcgcgagtcctccccccccgagaaggaggaggcccaggagaagaccggcaagaccgagccctccttcaccaaggagaactcctccaagatccccaagaagggcttcgtcgaggtcaccgagctcaccgacgtcacctacacctccaacctcgtccgcctccgccccggccacatgaacgtcgtcctcatcctctccaactccaccaagacctccctcctccagaagttcgccctcgaggtctacaccttcaccggctcctcctgcctccacttctccttcctctccctcgacaagcaccgcgagtggctcgagtacctcctcgagttcgcccaggacgccgcccccatccccaaccagtacgacaagcacttcatggagcgcgactacaccggctacgtcctcgccctcaacggccacaagaagtacttctgcctcttcaagccccagaagaccgtcgaggaggaggaggccatcggctcctgctccgacgtcgactcctccctctacctcggcgagtcccgcggcaagccctcctgcggcctcggctcccgccccatcaagggcaagctctccaagctctccctctggatggagcgcctcctcgagggctccctccagcgcttctacatcccctcctggcccgagctcgactga

SEQ ID NO: 8238 - RNA, 2349 nt, synthetic construct
  misc_feature 1..2349: note = derived and/or modified sequence opt3 fromDJC16__Homo_sapiens__AAH47363
  source 1..2349: mol_type = other RNA
atggaggtgagaaagctgagcatctcctggcagttcctcattgtccttgttctgatattgcaaatcttatctgccctggactttgatccctacagggtgctaggcgtatcacggaccgctagtcaggcagacattaaaaaggcctataaaaagctcgcgcgcgaatggcaccctgataaaaacaaggacccaggggctgaggataagttcatccagattagcaaagcctacgaaatcctgtccaatgaggaaaagcgatctaactatgaccagtacggagatgccggtgagaatcaaggctatcagaaacagcagcaacagcgtgagtacagatttaggcatttccacgaaaacttttatttcgacgagtcgtttttccattttccgttcaattcagaacggcgcgatagcatagacgagaagtaccttctgcactttagtcattacgtgaacgaggtcgtgcccgattccttcaaaaagccttatttgatcaagattacatctgactggtgctttagctgtatccacattgaaccagtttggaaagaggtgatccaggaactcgaggaactgggggtcggaataggcgtggtacacgcaggttacgagagaaggctggctcatcacctcggggcacattccactccctcaattttaggaatcattaatggcaagatcagtttcttccacaacgccgttgtgcgggagaatctgcgccagtttgtcgaaagccttttgcctggcaacctggtggagaaagtgacgaataagaactatgtccgattcctatctgggtggcaacaggaaaataaaccacacgttctcctgtttgatcagacccccatcgtgcctcttctgtacaagttgacagctttcgcctataaagactacctctcctttggatatgtatacgtgggtctgagaggcactgaggaaatgaccaggcggtacaacattaatatatatgcgccaacattactggtcttcaaggagcatatcaaccgtccggcagacgtgattcaagcccgcgggatgaagaaacagatcatagatgactttattaccagaaacaagtacctccttgctgccaggctgacttcacagaaattgttccacgagctatgccccgttaagcggagccatcgacagcgcaaatattgtgtggtcctgctcacagcagaaaccacgaagctgagtaagccttttgaggctttcctttcttttgccctggcgaatactcaagataccgtgagattcgtacacgtttactccaacaggcagcaggaatttgccgacacattgctcccagatagcgaggcattccagggaaaatcggctgtgtctatcctggaacggcgcaatactgccggcagagtcgtgtataagaccttagaggacccctggatcggttccgagtcagataaattcattctgctagggtacctcgaccaactgaggaaggatcctgctcttttgagtagcgaagccgtcctgccagacctcacagatgagctggcacccgtgtttcttctgcgttggttctattccgcctctgactacatcagcgactgctgggattcaatttttcataacaattggcgggaaatgatgccgttgctcagtctgatattctccgctttatttatcctgttcggaaccgttattgtgcaggcgtttagcgactctaacgatgagcgagagtcaagtcctcccgaaaaagaggaagcacaggagaagacgggcaagactgaaccatccttcacaaaagaaaatagctctaagatccctaaaaagggctttgtagaggtcaccgaactaactgacgtgacatacacctcgaacctcgttagactgaggcccgggcacatgaatgtggtccttatcttgagcaactccacgaaaacctcactgctccagaagttcgccctggaggtgtatacatttactggaagttcttgtttacacttcagctttctgtcccttgataagcatcgcgaatggttggagtacctcctggagttcgctcaagacgccgcaccaattcccaatcagtatgataaacacttcatggagcgggactacaccggttatgtactagccctgaacggccataagaaatacttttgcctcttcaagcctcagaaaacagtggaggaagaggaagctatagggtcatgtagcgatgttgactcttccctgtatcttggagagagtagaggcaagccaagctgcggtttggggtctaggccgatcaaaggcaagctgtccaagttatcactctggatggaacgcctgcttgagggaagtctgcagcgattttacattcccagctggcctgagttggattga

SEQ ID NO: 8239 - RNA, 2349 nt, synthetic construct
  misc_feature 1..2349: note = derived and/or modified sequence opt4 fromDJC16__Homo_sapiens__AAH47363
  source 1..2349: mol_type = other RNA
atggaggtgagaaagctgagcatcagctggcagttcctgatcgtgctggtgctgatcctgcagatcctgagcgccctggacttcgacccctacagagtgctgggcgtgagcagaaccgccagccaggccgacatcaagaaggcctacaagaagctggccagagagtggcaccccgacaagaacaaggaccccggcgccgaggacaagttcatccagatcagcaaggcctacgagatcctgagcaacgaggagaagagaagcaactacgaccagtacggcgacgccggcgagaaccagggctaccagaagcagcagcagcagagagagtacagattcagacacttccacgagaacttctacttcgacgagagcttcttccacttccccttcaacagcgagagaagagacagcatcgacgagaagtacctgctgcacttcagccactacgtgaacgaggtggtgcccgacagcttcaagaagccctacctgatcaagatcaccagcgactggtgcttcagctgcatccacatcgagcccgtgtggaaggaggtgatccaggagctggaggagctgggcgtgggcatcggcgtggtgcacgccggctacgagagaagactggcccaccacctgggcgcccacagcacccccagcatcctgggcatcatcaacggcaagatcagcttcttccacaacgccgtggtgagagagaacctgagacagttcgtggagagcctgctgcccggcaacctggtggagaaggtgaccaacaagaactacgtgagattcctgagcggctggcagcaggagaacaagccccacgtgctgctgttcgaccagacccccatcgtgcccctgctgtacaagctgaccgccttcgcctacaaggactacctgagcttcggctacgtgtacgtgggcctgagaggcaccgaggagatgaccagaagatacaacatcaacatctacgcccccaccctgctggtgttcaaggagcacatcaacagacccgccgacgtgatccaggccagaggcatgaagaagcagatcatcgacgacttcatcaccagaaacaagtacctgctggccgccagactgaccagccagaagctgttccacgagctgtgccccgtgaagagaagccacagacagagaaagtactgcgtggtgctgctgaccgccgagaccaccaagctgagcaagcccttcgaggccttcctgagcttcgccctggccaacacccaggacaccgtgagattcgtgcacgtgtacagcaacagacagcaggagttcgccgacaccctgctgcccgacagcgaggccttccagggcaagagcgccgtgagcatcctggagagaagaaacaccgccggcagagtggtgtacaagaccctggaggacccctggatcggcagcgagagcgacaagttcatcctgctgggctacctggaccagctgagaaaggaccccgccctgctgagcagcgaggccgtgctgcccgacctgaccgacgagctggcccccgtgttcctgctgagatggttctacagcgccagcgactacatcagcgactgctgggacagcatcttccacaacaactggagagagatgatgcccctgctgagcctgatcttcagcgccctgttcatcctgttcggcaccgtgatcgtgcaggccttcagcgacagcaacgacgagagagagagcagcccccccgagaaggaggaggcccaggagaagaccggcaagaccgagcccagcttcaccaaggagaacagcagcaagatccccaagaagggcttcgtggaggtgaccgagctgaccgacgtgacctacaccagcaacctggtgagactgagacccggccacatgaacgtggtgctgatcctgagcaacagcaccaagaccagcctgctgcagaagttcgccctggaggtgtacaccttcaccggcagcagctgcctgcacttcagcttcctgagcctggacaagcacagagagtggctggagtacctgctggagttcgcccaggacgccgcccccatccccaaccagtacgacaagcacttcatggagagagactacaccggctacgtgctggccctgaacggccacaagaagtacttctgcctgttcaagccccagaagaccgtggaggaggaggaggccatcggcagctgcagcgacgtggacagcagcctgtacctgggcgagagcagaggcaagcccagctgcggcctgggcagcagacccatcaagggcaagctgagcaagctgagcctgtggatggagagactgctggagggcagcctgcagagattctacatccccagctggcccgagctggactga

SEQ ID NO: 8240 - RNA, 2349 nt, synthetic construct
  misc_feature 1..2349: note = derived and/or modified sequence opt5 fromDJC16__Homo_sapiens__AAH47363
  source 1..2349: mol_type = other RNA
atggaggtgagaaagctgagcatctcctggcagttcctcattgtcctggttcttatcctgcaaattctctctgccctggactttgatccctaccgggtgcttggcgtgagccgcaccgcttcccaggccgacatcaaaaaggcgtataaaaagctggctagagaatggcaccctgataaaaacaaggacccgggggccgaggataagttcattcagatctctaaagcctacgaaatcctcagcaatgaggaaaagcggtccaactatgaccagtacggagatgctggcgagaatcaagggtatcagaaacagcagcaacagcgcgagtacagatttcggcatttccacgaaaacttttatttcgacgagtctttcttccattttcccttcaatagcgaacgcagagattccattgacgagaagtacctgctgcactttagccattacgtcaacgaggtggttcctgattctttcaaaaagccctatctcatcaagattacatccgactggtgctttagctgtatccacattgaacctgtgtggaaagaggtcatccaggaactggaggaacttggagtgggcattggggttgtgcacgccggatacgagcggcgcctggctcatcacctcggcgcccattctacgccctccatcctgggcatcattaatgggaagatcagcttcttccacaacgcggtcgtgagagagaatcttcggcagtttgtggaatctctgctccctggaaacctggtcgagaaagttaccaataagaactatgtgcgcttcctgtccggctggcaacaggaaaataaaccgcacgtgctcctgtttgatcagacacccattgtccctcttctgtacaagctcaccgccttcgcttataaagactacctgagctttgggtatgtgtacgttggacttagaggcacagaggaaatgacccggcgctacaacatcaatatttatgcccccacactgctcgtgttcaaggagcatatcaacagacctgctgacgtcatccaagcccgggggatgaagaaacagattatcgatgactttattaccagaaacaagtacctgctggcggcccgcctcacgtcccagaaactgttccacgagctttgccccgtgaagcggtctcatagacagcgcaaatattgtgttgtgctgctcaccgctgaaacaaccaagctgagcaagccgtttgaggccttcctttcctttgctctggccaatacacaagataccgtccggttcgtgcacgtctacagcaacagacagcaggaatttgccgacacgctcctgcctgattctgaggctttccagggaaaatccgcggtgagcatcctggaacgccggaatacagccggcagagttgtgtataagaccctcgaggacccctggattggctctgagagcgataaattcatcctgcttgggtacctggaccaactccgcaaggatcctgctctgctgtcctctgaagccgtccttcccgacctcacagatgagctggcccccgtgtttctgctccggtggttctatagcgcttccgactacatcagcgactgctgggattctatttttcataacaattggagagaaatgatgcctctgctttccctgatcttcagcgccctctttattctgttcggaaccgttatcgtgcaggcgttttctgactccaacgatgagcgcgagagctccccgcccgaaaaagaggaagctcaggagaagaccggcaagacagaaccttctttcacgaaagagaatagctccaagattcccaaaaaggggtttgtcgaggtgaccgaactgacagacgtgacctacacatctaaccttgttcggctcagacctggacacatgaatgtcgtgctgatcctgagcaactccaccaaaacgagcctcctgcagaagttcgcccttgaggtgtatacatttaccgggtcttcctgtctgcacttcagctttctctctctggataagcatcgggaatggctggagtaccttctcgaatttgcccaagacgctgcccccattccgaatcagtatgataaacacttcatggagcgcgactacaccggctatgtcctggctctgaacggacataagaaatacttttgcctcttcaagcctcagaaaacagtggaggaagaggaagccatcggctcctgtagcgatgttgactctagcctgtatcttggcgagtccagagggaagcccagctgcggactgggctctcggcctatcaaagggaagctctccaagctgagcctgtggatggaaagacttctcgagggatccctgcagcgcttttacattccctcttggcctgagctggattga

SEQ ID NO: 8241 - protein, 304 aa, synthetic construct
  REGION 1..304: note = DJC17__Homo_sapiens__Q9NVM6
MAVTKELLQMDLYALLGIEEKAADKEVKKAYRQKALSCHPDKNPDNPRAAELFHQLSQALEVLTDAAARAAYDKVRKAKKQAAERTQKLDEKRKKVKLDLEARERQAQAQESEEEEESRSTRTLEQEIERLREEGSRQLEEQQRLIREQIRQERDQRLRGKAENTEGQGTPKLKLKWKCKKEDESKGGYSKDVLLRLLQKYGEVLNLVLSSKKPGTAVVEFATVKAAELAVQNEVGLVDNPLKISWLEGQPQDAVGRSHSGLSKGSVLSERDYESLVMMRMRQAAERQQLIARMQQEDQEGPPT

SEQ ID NO: 8242 - RNA, 915 nt, synthetic construct
  misc_feature 1..915: note = DJC17__Homo_sapiens__AAH00048
  source 1..915: mol_type = other RNA
atggcagtgaccaaggagctcttacagatggacctgtacgcgctgctaggcattgaggagaaggcagcggacaaagaggtaaagaaggcgtataggcagaaggccctctcctgccacccagacaaaaatccagataatcccagagcagctgaactcttccaccagctttctcaggccttggaggtgctgaccgatgctgcagccagggctgcatatgacaaggtcaggaaagccaagaagcaagcagcagagaggacccagaaacttgatgagaaaaggaagaaagtgaagcttgacctggaggcccgggagcggcaggcccaggcccaggagagtgaggaggaagaggagagccggagcaccaggacactagagcaagagatcgaacgcctgagagaagagggttcccggcagctggaggaacagcagaggctcatccgggagcagatacgccaggagcgtgaccagaggttgagaggaaaggcagaaaatactgaaggccaaggaacccccaaactaaagctaaaatggaagtgcaagaaggaggatgagtcaaaaggtggctactccaaagacgtcctcctacggcttttgcagaagtatggtgaggttctcaacctggtgctttccagtaagaagccaggcactgctgtggtggagtttgcaaccgtcaaggcagcggagctggctgtccagaatgaagttggcctggtggataaccctctgaagatttcctggttggagggacagccccaggatgccgtgggccgcagccactcaggactgtcaaagggctcagtgctgtcagagagggactacgagagcctcgtcatgatgcgcatgcgccaggcggccgagcggcaacagctgatcgcacggatgcagcaggaagaccaggaggggccgcctacgtag

SEQ ID NO: 8243 - RNA, 915 nt, synthetic construct
  misc_feature 1..915: note = derived and/or modified sequence opt1 fromDJC17__Homo_sapiens__AAH00048
  source 1..915: mol_type = other RNA
atggccgtgaccaaggagctgctccagatggacctgtacgccctgctcggcatcgaggagaaggcggccgacaaggaggtcaagaaggcctaccgccagaaggccctgagctgccaccccgacaagaaccccgacaacccccgggccgcggagctgttccaccagctctcccaggccctggaggtgctgaccgacgccgccgcgcgcgccgcctacgacaaggtgcggaaggccaagaagcaggccgcggagcgcacgcagaagctcgacgagaagcggaagaaggtcaagctggacctggaggcccgcgagcggcaggcccaggcccaggagagcgaggaggaggaggagtcccgcagcacccggaccctcgagcaggagatcgagcgcctgcgggaggaggggtcccgccagctggaggagcagcagcggctcatccgcgagcagatccggcaggagcgcgaccagcggctgcgcggcaaggccgagaacaccgaggggcagggcacgcccaagctgaagctcaagtggaagtgcaagaaggaggacgagagcaagggcgggtactccaaggacgtgctgctgcggctcctgcagaagtacggcgaggtgctgaacctcgtcctgagctccaagaagcccgggaccgcggtggtggagttcgccaccgtcaaggccgccgagctggccgtgcagaacgaggtgggcctcgtcgacaacccgctgaagatcagctggctggaggggcagccccaggacgcggtgggccgctcccacagcgggctctccaagggcagcgtgctgtccgagcgggactacgagagcctggtcatgatgcgcatgcgccaggccgccgagcggcagcagctcatcgcccgcatgcagcaggaggaccaggagggcccgcccacctga

SEQ ID NO: 8244 - RNA, 915 nt, synthetic construct
  misc_feature 1..915: note = derived and/or modified sequence opt2 fromDJC17__Homo_sapiens__AAH00048
  source 1..915: mol_type = other RNA
atggccgtcaccaaggagctcctccagatggacctctacgccctcctcggcatcgaggagaaggccgccgacaaggaggtcaagaaggcctaccgccagaaggccctctcctgccaccccgacaagaaccccgacaacccccgcgccgccgagctcttccaccagctctcccaggccctcgaggtcctcaccgacgccgccgcccgcgccgcctacgacaaggtccgcaaggccaagaagcaggccgccgagcgcacccagaagctcgacgagaagcgcaagaaggtcaagctcgacctcgaggcccgcgagcgccaggcccaggcccaggagtccgaggaggaggaggagtcccgctccacccgcaccctcgagcaggagatcgagcgcctccgcgaggagggctcccgccagctcgaggagcagcagcgcctcatccgcgagcagatccgccaggagcgcgaccagcgcctccgcggcaaggccgagaacaccgagggccagggcacccccaagctcaagctcaagtggaagtgcaagaaggaggacgagtccaagggcggctactccaaggacgtcctcctccgcctcctccagaagtacggcgaggtcctcaacctcgtcctctcctccaagaagcccggcaccgccgtcgtcgagttcgccaccgtcaaggccgccgagctcgccgtccagaacgaggtcggcctcgtcgacaaccccctcaagatctcctggctcgagggccagccccaggacgccgtcggccgctcccactccggcctctccaagggctccgtcctctccgagcgcgactacgagtccctcgtcatgatgcgcatgcgccaggccgccgagcgccagcagctcatcgcccgcatgcagcaggaggaccaggagggcccccccacctga

SEQ ID NO: 8245 - RNA, 915 nt, synthetic construct
  misc_feature 1..915: note = derived and/or modified sequence opt3 fromDJC17__Homo_sapiens__AAH00048
  source 1..915: mol_type = other RNA
atggccgtgaccaaggagctgctccagatggacctttacgctctgttgggcatcgaagagaaagcagccgataaggaagtcaaaaaggcgtatagacaaaaggctttaagctgccaccccgacaagaaccctgataatccaagggccgcagagctgttccatcagctatcccaggccctcgaagttctgacagacgctgcagcccgggctgcctacgataaggtgcgcaaagcgaagaaacaggcagccgagcgaactcaaaaacttgacgagaaacgtaagaaggtaaaactggatttggaagctagagagaggcaggcccaggcacaggaatctgaggaggaagaggaatcacggagtacgcgcaccctcgagcaagaaattgagagactgagggaggaagggagccggcagctggaggaacagcagcgcctcatacgagagcaaatcagacaggaaagggaccagcggttacgtggaaaggctgagaacacagagggtcaaggcactccgaaactgaaacttaaatggaagtgtaaaaaggaagatgagtccaaagggggatattctaaggacgtgttgctgcgcctactccagaagtacggcgaagtcctgaatcttgtgctgtcgtcaaagaagcccggtaccgccgttgtggagtttgcgacagtcaaagccgcagaattggctgtgcagaacgaggtagggctcgttgataatcctctgaagattagctggttagagggacagccacaagacgccgtgggcagaagtcactccggcctgtctaaggggagcgtcctctccgaaagggattatgagtcacttgtgatgatgcggatgcgacaggctgccgaacgccagcagctgatcgcaagaatgcaacaggaggaccaggagggaccccctacctga

SEQ ID NO: 8246 - RNA, 915 nt, synthetic construct
  misc_feature 1..915: note = derived and/or modified sequence opt4 fromDJC17__Homo_sapiens__AAH00048
  source 1..915: mol_type = other RNA
atggccgtgaccaaggagctgctgcagatggacctgtacgccctgctgggcatcgaggagaaggccgccgacaaggaggtgaagaaggcctacagacagaaggccctgagctgccaccccgacaagaaccccgacaaccccagagccgccgagctgttccaccagctgagccaggccctggaggtgctgaccgacgccgccgccagagccgcctacgacaaggtgagaaaggccaagaagcaggccgccgagagaacccagaagctggacgagaagagaaagaaggtgaagctggacctggaggccagagagagacaggcccaggcccaggagagcgaggaggaggaggagagcagaagcaccagaaccctggagcaggagatcgagagactgagagaggagggcagcagacagctggaggagcagcagagactgatcagagagcagatcagacaggagagagaccagagactgagaggcaaggccgagaacaccgagggccagggcacccccaagctgaagctgaagtggaagtgcaagaaggaggacgagagcaagggcggctacagcaaggacgtgctgctgagactgctgcagaagtacggcgaggtgctgaacctggtgctgagcagcaagaagcccggcaccgccgtggtggagttcgccaccgtgaaggccgccgagctggccgtgcagaacgaggtgggcctggtggacaaccccctgaagatcagctggctggagggccagccccaggacgccgtgggcagaagccacagcggcctgagcaagggcagcgtgctgagcgagagagactacgagagcctggtgatgatgagaatgagacaggccgccgagagacagcagctgatcgccagaatgcagcaggaggaccaggagggcccccccacctga

SEQ ID NO: 8247 - RNA, 915 nt, synthetic construct
  misc_feature 1..915: note = derived and/or modified sequence opt5 fromDJC17__Homo_sapiens__AAH00048
  source 1..915: mol_type = other RNA
atggccgtgaccaaggagctgctccagatggacctgtacgcccttctgggcatcgaagagaaagctgcggataaggaagtcaaaaaggcttatagacaaaaagccctcagctgccaccccgacaagaaccctgataatccgcgggccgctgagctgttccatcagctttcccaggccctggaagttctcacagacgctgccgcgcgcgccgcttacgataaggtgagaaaagccaagaaacaggctgccgagcggacgcaaaagctggacgagaaacgcaagaaggtgaaactggatctcgaagcgagagagcggcaggcccaggctcaggaatctgaggaggaagaggaaagccgctccaccagaacactggagcaagaaattgagcggcttcgcgaggaagggtctagacagctggaggaacagcagcggctcatccgcgagcaaattagacaggaacgggaccagcgcctgagaggaaaggccgagaacaccgagggccaagggacacccaaacttaagctgaaatggaagtgtaaaaaggaagatgagagcaagggaggctattccaaagacgtcctcctgcggctgctccagaagtacggggaagtgctgaatcttgttctgtctagcaaaaagcctggaaccgctgtggtcgagtttgccacagtgaaagccgctgaactcgcggttcagaacgaggtgggcctggtcgataatccccttaagatctcctggctggagggccagcctcaagacgccgtggggagaagccactctggactctccaagggcagcgtgctgtctgaacgcgattatgagtccctggtcatgatgcggatgagacaggctgccgaacgccagcagctcattgcccggatgcaacaggaggaccaggaggggccccctacctga

SEQ ID NO: 8248 - protein, 358 aa, synthetic construct
  REGION 1..358: note = DJC18__Homo_sapiens__Q9H819
MAATLGSGERWTEAYIDAVRRNKYPEDTPPESHDPCGCCNCMKAQKEKKSENEWTQTRQGEGNSTYSEEQLLGVQRIKKCRNYYEILGVSRDASDEELKKAYRKLALKFHPDKNCAPGATDAFKAIGNAFAVLSNPDKRLRYDEYGDEQVTFTAPRARPYNYYRDFEADITPEELFNVFFGGHFPTGNIHMFSNVTDDTYYYRRRHRHERTQTQKEEEEEKPQTTYSAFIQLLPVLVIVIISVITQLLATNPPYSLFYKSTLGYTISRETQNLQVPYFVDKNFDKAYRGASLHDLEKTIEKDYIDYIQTSCWKEKQQKSELTNLAGLYRDERLKQKAESLKLENCEKLSKLIGLRRGG

SEQ ID NO: 8249 - RNA, 1077 nt, synthetic construct
  misc_feature 1..1077: note = DJC18__Homo_sapiens__AAH30162
  source 1..1077: mol_type = other RNA
atggcggcgactctgggcagcggggagcgctggacggaagcttacattgacgcagttagaagaaacaaatacccagaagacacacctcctgagagtcatgacccctgtggctgctgtaactgcatgaaggcacaaaaggaaaagaagtctgagaatgagtggactcagacccggcagggtgaggggaactccacgtacagtgaggaacagctgcttggggtacaaaggatcaagaaatgcagaaattactatgaaattctgggagtttctcgagatgctagtgacgaagagcttaagaaagcttacagaaaactcgccctgaaatttcaccctgacaagaactgtgctcctggagcaacagatgctttcaaagcaataggaaatgcatttgcagtcctgagcaatcctgataagagacttcgctatgatgaatacggagatgaacaggtgactttcactgcccctcgagccagaccttataattattacagggattttgaagctgacatcactccagaagagctgttcaacgtcttctttggaggacattttcctacaggaaatattcatatgttttcaaatgtgacagatgacacttactattaccgtcgacggcaccgacatgagaggacacagactcagaaggaggaggaagaagagaaacctcagactacatattctgcatttattcagctacttccagttcttgtgattgtgattatatctgtcattactcagctgctggctactaatcccccatatagtctgttctataaatcgaccttgggctacaccatttctagagaaactcagaacctgcaggtgccttactttgtggataaaaactttgacaaggcctacagaggagcttctctgcatgacttggagaaaacaatagagaaggattacattgattatatccagactagttgttggaaggagaaacaacaaaagtcagagctgacaaatttggcaggattatacagagatgaacgattgaaacagaaagcagagtcgctgaaacttgaaaactgtgagaaactttccaaactcattggcctacgcagaggtggctga

SEQ ID NO: 8250 - RNA, 1077 nt, synthetic construct
  misc_feature 1..1077: note = derived and/or modified sequence opt1 fromDJC18__Homo_sapiens__AAH30162
  source 1..1077: mol_type = other RNA
atggccgccaccctgggcagcggggagcgctggaccgaggcgtacatcgacgccgtgcggcgcaacaagtaccccgaggacacgccgcccgagtcccacgacccctgcggctgctgcaactgcatgaaggcccagaaggagaagaagtccgagaacgagtggacccagacccggcagggggagggcaacagcacctacagcgaggagcagctcctgggggtccagcgcatcaagaagtgccggaactactacgagatcctgggcgtgtcccgcgacgccagcgacgaggagctcaagaaggcctaccggaagctggcgctgaagttccaccccgacaagaactgcgccccgggcgccacggacgccttcaaggcgatcgggaacgccttcgccgtgctctccaaccccgacaagcgcctgcggtacgacgagtacggcgacgagcaggtcaccttcaccgcgccccgcgcccggccctacaactactaccgcgacttcgaggccgacatcaccccggaggagctgttcaacgtgttcttcgggggccacttccccacggggaacatccacatgttcagcaacgtgaccgacgacacctactactaccggcgccggcaccgccacgagcggacccagacgcagaaggaggaggaggaggagaagccccagaccacctactccgccttcatccagctcctgcccgtcctggtgatcgtgatcatcagcgtcatcacccagctcctggccacgaacccgccctactccctgttctacaagagcaccctcggctacaccatctcccgcgagacccagaacctccaggtgccctacttcgtggacaagaacttcgacaaggcctaccggggcgccagcctgcacgacctggagaagacgatcgagaaggactacatcgactacatccagacctcctgctggaaggagaagcagcagaagtccgagctgaccaacctggcggggctctaccgcgacgagcggctgaagcagaaggccgagagcctgaagctcgagaactgcgagaagctgagcaagctgatcggcctccgccgcgggggctga

SEQ ID NO: 8251 - RNA, 1077 nt, synthetic construct
  misc_feature 1..1077: note = derived and/or modified sequence opt2 fromDJC18__Homo_sapiens__AAH30162
  source 1..1077: mol_type = other RNA
atggccgccaccctcggctccggcgagcgctggaccgaggcctacatcgacgccgtccgccgcaacaagtaccccgaggacaccccccccgagtcccacgacccctgcggctgctgcaactgcatgaaggcccagaaggagaagaagtccgagaacgagtggacccagacccgccagggcgagggcaactccacctactccgaggagcagctcctcggcgtccagcgcatcaagaagtgccgcaactactacgagatcctcggcgtctcccgcgacgcctccgacgaggagctcaagaaggcctaccgcaagctcgccctcaagttccaccccgacaagaactgcgcccccggcgccaccgacgccttcaaggccatcggcaacgccttcgccgtcctctccaaccccgacaagcgcctccgctacgacgagtacggcgacgagcaggtcaccttcaccgccccccgcgcccgcccctacaactactaccgcgacttcgaggccgacatcacccccgaggagctcttcaacgtcttcttcggcggccacttccccaccggcaacatccacatgttctccaacgtcaccgacgacacctactactaccgccgccgccaccgccacgagcgcacccagacccagaaggaggaggaggaggagaagccccagaccacctactccgccttcatccagctcctccccgtcctcgtcatcgtcatcatctccgtcatcacccagctcctcgccaccaaccccccctactccctcttctacaagtccaccctcggctacaccatctcccgcgagacccagaacctccaggtcccctacttcgtcgacaagaacttcgacaaggcctaccgcggcgcctccctccacgacctcgagaagaccatcgagaaggactacatcgactacatccagacctcctgctggaaggagaagcagcagaagtccgagctcaccaacctcgccggcctctaccgcgacgagcgcctcaagcagaaggccgagtccctcaagctcgagaactgcgagaagctctccaagctcatcggcctccgccgcggcggctga

SEQ ID NO: 8252 - RNA, 1077 nt, synthetic construct
  misc_feature 1..1077: note = derived and/or modified sequence opt3 fromDJC18__Homo_sapiens__AAH30162
  source 1..1077: mol_type = other RNA
atggccgctaccctgggcagcggggagagatggacagaagcatacatcgacgccgtgaggcggaacaagtatcccgaggatactcctccagaatcccacgacccgtgcggatgttgcaattgtatgaaagcgcagaaggagaaaaagtctgaaaacgagtggacgcaaacccgccagggtgagggcaattcaacatacagtgaggaacagctccttggggtccagcgaattaaaaagtgccgtaactattacgaaatactgggagttagcagagatgcttccgacgaggagttgaagaaagcctataggaagttagcactgaaattccatcccgataagaattgtgcccctggcgctactgacgcatttaaagccatcggtaacgctttcgccgtgctatctaatccagataagcggctccgctacgacgaatatggggatgagcaagtaacctttacagcgcccagagcaaggccttacaactactatcgggacttcgaagccgatattaccccagaggaactgtttaatgtgttctttggaggccacttccccactggcaacatccatatgttttcgaatgtcacagacgatacctactattaccgccgaagacacaggcatgagcggacgcagactcagaaggaggaagaggaagagaaacctcagaccacatattcagctttcattcaacttctgccagtgttggttatcgtgataatcagcgtcattactcagctcctggccaccaacccgccctacagtctgttttataagtccacactcgggtacaccatctctcgtgaaacgcagaatttacaggtgccttacttcgtagacaaaaactttgacaaggcatatcgcggagctagcctgcacgatcttgagaaaactattgagaaggactacatcgattatatacaaacatcctgctggaaagaaaagcagcagaagtcagagttgaccaatctggccggtctatacagagacgaaaggctcaaacaaaaggcggagagtctgaaacttgaaaactgtgagaagctgagcaaattgattggcctccggcgagggggatga

SEQ ID NO: 8253 - RNA, 1077 nt, synthetic construct
  misc_feature 1..1077: note = derived and/or modified sequence opt4 fromDJC18__Homo_sapiens__AAH30162
  source 1..1077: mol_type = other RNA
atggccgccaccctgggcagcggcgagagatggaccgaggcctacatcgacgccgtgagaagaaacaagtaccccgaggacaccccccccgagagccacgacccctgcggctgctgcaactgcatgaaggcccagaaggagaagaagagcgagaacgagtggacccagaccagacagggcgagggcaacagcacctacagcgaggagcagctgctgggcgtgcagagaatcaagaagtgcagaaactactacgagatcctgggcgtgagcagagacgccagcgacgaggagctgaagaaggcctacagaaagctggccctgaagttccaccccgacaagaactgcgcccccggcgccaccgacgccttcaaggccatcggcaacgccttcgccgtgctgagcaaccccgacaagagactgagatacgacgagtacggcgacgagcaggtgaccttcaccgcccccagagccagaccctacaactactacagagacttcgaggccgacatcacccccgaggagctgttcaacgtgttcttcggcggccacttccccaccggcaacatccacatgttcagcaacgtgaccgacgacacctactactacagaagaagacacagacacgagagaacccagacccagaaggaggaggaggaggagaagccccagaccacctacagcgccttcatccagctgctgcccgtgctggtgatcgtgatcatcagcgtgatcacccagctgctggccaccaaccccccctacagcctgttctacaagagcaccctgggctacaccatcagcagagagacccagaacctgcaggtgccctacttcgtggacaagaacttcgacaaggcctacagaggcgccagcctgcacgacctggagaagaccatcgagaaggactacatcgactacatccagaccagctgctggaaggagaagcagcagaagagcgagctgaccaacctggccggcctgtacagagacgagagactgaagcagaaggccgagagcctgaagctggagaactgcgagaagctgagcaagctgatcggcctgagaagaggcggctga

SEQ ID NO: 8254 - RNA, 1077 nt, synthetic construct
  misc_feature 1..1077: note = derived and/or modified sequence opt5 fromDJC18__Homo_sapiens__AAH30162
  source 1..1077: mol_type = other RNA
atggccgctaccctgggcagcggggagagatggacagaagcctacatcgacgcggtgcggcgcaacaagtatcccgaggatacgcctccggaatcccacgacccctgcggatgttgcaattgtatgaaagctcagaaggagaaaaagtctgaaaacgagtggacccaaacaagacagggcgaggggaatagcacctactccgaggaacagctcctgggagtccagcggattaaaaagtgccgcaactattacgaaatccttggcgtttctagagatgccagcgacgaggagctgaagaaagcctatcggaagctcgctctgaaattccatcctgataagaattgtgcccccggggctacagacgcctttaaagcgattggaaacgccttcgctgtgctttccaatcctgataagcgcctgagatacgacgaatatggcgatgagcaagtgacctttacagctccccgggcccgcccttacaactactatagagacttcgaagccgatatcaccccggaggaactctttaatgtcttctttggcgggcacttccccacgggaaacattcatatgttttctaatgtgaccgacgatacatactattaccggcgcagacaccggcatgagcgcacccagacacagaaggaggaagaggaagagaaacctcagaccacgtatagcgcgttcatccaactgctgcccgttctcgtgatcgtcattatctccgtgattacacagctgcttgccaccaaccctccctacagcctgttttataagtctacactcggctacaccatctccagagaaacccagaatctgcaggttccgtacttcgtggacaaaaactttgacaaggcttatagaggggccagccttcacgatctggagaaaacaattgagaaggactacatcgattatattcaaacgtcttgctggaaagaaaagcagcagaagtccgagctcaccaatctggctggactgtaccgggacgaacgcctcaaacaaaaggccgagagcctgaaacttgaaaactgtgagaagctgtctaaactcatcggcctgcggagagggggatga

SEQ ID NO: 8255 - protein, 341 aa, synthetic construct
  REGION 1..341: note = DJC22__Homo_sapiens__Q8N4W6
MAKGLLVTYALWAVGGPAGLHHLYLGRDSHALLWMLTLGGGGLGWLWEFWKLPSFVAQANRAQGQRQSPRGVTPPLSPIRFAAQVIVGIYFGLVALISLSSMVNFYIVALPLAVGLGVLLVAAVGNQTSDFKNTLGSAFLTSPIFYGRPIAILPISVAASITAQRHRRYKALVASEPLSVRLYRLGLAYLAFTGPLAYSALCNTAATLSYVAETFGSFLNWFSFFPLLGRLMEFVLLLPYRIWRLLMGETGFNSSCFQEWAKLYEFVHSFQDEKRQLAYQVLGLSEGATNEEIHRSYQELVKVWHPDHNLDQTEEAQRHFLEIQAAYEVLSQPRKPWGSRR

SEQ ID NO: 8256 - RNA, 1026 nt, synthetic construct
  misc_feature 1..1026: note = DJC22__Homo_sapiens__AAH33236
  source 1..1026: mol_type = other RNA
atggccaaggggctcctggtgacctatgccctctgggctgtggggggccctgctgggctccaccacctgtacctgggaagggacagccacgccctgctctggatgctgaccctggggggaggtgggctgggctggctctgggagttctggaagctcccaagctttgtagctcaggccaacagagcccagggacagaggcagagccccagaggggtgacaccccctctgagtcccattcgctttgctgcccaggtgatagttggcatctattttggccttgtggcactgattagcctttcttccatggtcaacttctatattgtggccctcccactggcagttggcttaggggtcttgctggtggctgctgttggcaaccagacctcagactttaagaacactctggggtcagcatttctcacttcacctatcttctatggccgccccatagccatactgcccattagcgtggccgccagcattacagctcagaggcatcgccgctacaaagctttggtggcatcagagccgctcagtgtgcggctctatcgtctgggcttggcttaccttgctttcacaggcccactggcatacagtgccctctgcaacacagctgccaccctcagctatgtggcagaaacctttggctccttcttgaattggttcagcttcttcccccttcttggccgcctcatggagtttgtcctccttctgccttaccggatctggaggctactgatgggggagactggcttcaacagcagctgctttcaggagtgggcgaagctctatgagtttgttcacagttttcaggatgagaagcgtcagctggcttaccaggttttgggcctctcagaaggggcaacaaatgaagaaatacatcggagttaccaggagctagtgaaggtctggcacccagaccacaacctggaccagacagaggaggcacagaggcacttcctggagatccaggctgcgtatgaagtcctgagtcaacccaggaagccctggggatcccggaggtga

SEQ ID NO: 8257 - RNA, 1026 nt, synthetic construct
  misc_feature 1..1026: note = derived and/or modified sequence opt1 fromDJC22__Homo_sapiens__AAH33236
  source 1..1026: mol_type = other RNA
atggccaagggcctgctcgtgacctacgccctgtgggcggtcgggggccccgccgggctgcaccacctctacctgggccgcgacagccacgccctgctctggatgctgaccctcgggggcggcgggctgggctggctgtgggagttctggaagctgccgtccttcgtggcccaggccaaccgggcgcaggggcagcgccagagcccccggggcgtgacgccgcccctctcccccatccgcttcgccgcccaggtcatcgtggggatctacttcggcctggtggccctgatcagcctctccagcatggtcaacttctacatcgtggcgctgcccctggccgtgggcctcggggtcctgctggtggccgccgtgggcaaccagacctccgacttcaagaacaccctcgggagcgccttcctgacctcccccatcttctacggccggcccatcgcgatcctgccgatcagcgtcgccgcctccatcacggcccagcgccaccggcgctacaaggccctcgtggcgagcgagcccctgtccgtgcggctgtaccgcctcggcctggcctacctggccttcaccgggcccctcgcctacagcgccctgtgcaacaccgcggccaccctgtcctacgtcgccgagacgttcggcagcttcctcaactggttctccttcttccccctgctggggcggctcatggagttcgtgctgctgctcccgtaccgcatctggcggctgctgatgggcgagaccgggttcaacagctcctgcttccaggagtgggccaagctctacgagttcgtgcacagcttccaggacgagaagcgccagctggcctaccaggtcctgggcctcagcgagggcgcgaccaacgaggagatccaccggtcctaccaggagctggtgaaggtgtggcaccccgaccacaacctggaccagaccgaggaggcccagcgccacttcctcgagatccaggccgcctacgaggtcctgagccagccccggaagccctgggggtcccgccggtga

SEQ ID NO: 8258 - RNA, 1026 nt, synthetic construct
  misc_feature 1..1026: note = derived and/or modified sequence opt2 fromDJC22__Homo_sapiens__AAH33236
  source 1..1026: mol_type = other RNA
atggccaagggcctcctcgtcacctacgccctctgggccgtcggcggccccgccggcctccaccacctctacctcggccgcgactcccacgccctcctctggatgctcaccctcggcggcggcggcctcggctggctctgggagttctggaagctcccctccttcgtcgcccaggccaaccgcgcccagggccagcgccagtccccccgcggcgtcaccccccccctctcccccatccgcttcgccgcccaggtcatcgtcggcatctacttcggcctcgtcgccctcatctccctctcctccatggtcaacttctacatcgtcgccctccccctcgccgtcggcctcggcgtcctcctcgtcgccgccgtcggcaaccagacctccgacttcaagaacaccctcggctccgccttcctcacctcccccatcttctacggccgccccatcgccatcctccccatctccgtcgccgcctccatcaccgcccagcgccaccgccgctacaaggccctcgtcgcctccgagcccctctccgtccgcctctaccgcctcggcctcgcctacctcgccttcaccggccccctcgcctactccgccctctgcaacaccgccgccaccctctcctacgtcgccgagaccttcggctccttcctcaactggttctccttcttccccctcctcggccgcctcatggagttcgtcctcctcctcccctaccgcatctggcgcctcctcatgggcgagaccggcttcaactcctcctgcttccaggagtgggccaagctctacgagttcgtccactccttccaggacgagaagcgccagctcgcctaccaggtcctcggcctctccgagggcgccaccaacgaggagatccaccgctcctaccaggagctcgtcaaggtctggcaccccgaccacaacctcgaccagaccgaggaggcccagcgccacttcctcgagatccaggccgcctacgaggtcctctcccagccccgcaagccctggggctcccgccgctga

SEQ ID NO: 8259 - RNA, 1026 nt, synthetic construct
  misc_feature 1..1026: note = derived and/or modified sequence opt3 fromDJC22__Homo_sapiens__AAH33236
  source 1..1026: mol_type = other RNA
atggccaagggcctgctcgtgacctacgctctttgggcagtcgggggacccgccggtctgcaccatttgtatttaggcagagacagccacgcgctgctatggatgctcacacttgggggaggcggtctggggtggctgtgggagttctggaaattgccttcctttgttgctcaggccaacagggcacaaggacagcggcagtctccacgcggcgtgactccgcccctctcacctatccgattcgccgctcaggtaattgtgggcatatactttgggctggtcgcactgatcagtctcagctccatggtgaatttctatattgttgccttaccactggctgtgggacttggtgtcttgctggtggccgcggtaggcaaccaaacgtctgattttaagaataccctagggtcggcattcctcacatcacccatcttttacggacgtcctattgccatcctgccaataagcgttgctgccagtatcactgcacagagacataggcggtataaagctcttgtggcctccgaacccctgtctgtccgcttgtacagactcggcctggcgtatttagccttcaccggtcctctggcatacagcgctctctgcaacacagccgctaccctttcctacgtggccgagacttttgggtcattcctgaattggtttagtttctttccattgctaggaaggctgatggagttcgtgctcctgcttccgtatcggatttggcgcctgttgatgggcgaaacaggcttcaacagctcttgttttcaggaatgggcaaagctctacgagttcgtccactcctttcaggacgagaaacgacaactggcctatcaggttttagggctgtcagaaggagctaccaatgaggaaatccatagaagctaccaggagctagtgaaggtatggcaccccgatcacaacctcgaccagacggaggaagcgcaaaggcatttcctggagattcaggcagcctatgaagtgcttagtcagcctcggaagccatggggttctcgtcgctga

SEQ ID NO: 8260 - RNA, 1026 nt, synthetic construct
  misc_feature 1..1026: note = derived and/or modified sequence opt4 fromDJC22__Homo_sapiens__AAH33236
  source 1..1026: mol_type = other RNA
atggccaagggcctgctggtgacctacgccctgtgggccgtgggcggccccgccggcctgcaccacctgtacctgggcagagacagccacgccctgctgtggatgctgaccctgggcggcggcggcctgggctggctgtgggagttctggaagctgcccagcttcgtggcccaggccaacagagcccagggccagagacagagccccagaggcgtgaccccccccctgagccccatcagattcgccgcccaggtgatcgtgggcatctacttcggcctggtggccctgatcagcctgagcagcatggtgaacttctacatcgtggccctgcccctggccgtgggcctgggcgtgctgctggtggccgccgtgggcaaccagaccagcgacttcaagaacaccctgggcagcgccttcctgaccagccccatcttctacggcagacccatcgccatcctgcccatcagcgtggccgccagcatcaccgcccagagacacagaagatacaaggccctggtggccagcgagcccctgagcgtgagactgtacagactgggcctggcctacctggccttcaccggccccctggcctacagcgccctgtgcaacaccgccgccaccctgagctacgtggccgagaccttcggcagcttcctgaactggttcagcttcttccccctgctgggcagactgatggagttcgtgctgctgctgccctacagaatctggagactgctgatgggcgagaccggcttcaacagcagctgcttccaggagtgggccaagctgtacgagttcgtgcacagcttccaggacgagaagagacagctggcctaccaggtgctgggcctgagcgagggcgccaccaacgaggagatccacagaagctaccaggagctggtgaaggtgtggcaccccgaccacaacctggaccagaccgaggaggcccagagacacttcctggagatccaggccgcctacgaggtgctgagccagcccagaaagccctggggcagcagaagatga

SEQ ID NO: 8261 - RNA, 1026 nt, synthetic construct
  misc_feature 1..1026: note = derived and/or modified sequence opt5 fromDJC22__Homo_sapiens__AAH33236
  source 1..1026: mol_type = other RNA
atggccaagggcctgctcgtgacctacgctctgtgggccgtcgggggacccgcgggccttcaccatctgtatctcgggagagacagccacgctctgctttggatgctgacactcggaggcgggggactgggctggctgtgggagttctggaaactcccttcctttgttgcccaggccaaccgggctcaaggccagcgccagtctccgagaggggtgacgccccctctgagccccatccggttcgccgctcaggtgattgtcggaatctactttggccttgtggccctgatttccctctctagcatggttaatttctatatcgtggcgctgcctcttgccgtcgggctgggagtgctcctggttgctgccgtgggcaaccaaacctccgattttaagaatacactggggtctgctttcctcaccagccccattttctacggacgccctatcgccatcctgccgatttccgtcgcggccagcatcacagctcagagacatcggcgctataaagcccttgtggcttctgaacccctgtccgtgagactctaccggctgggccttgcctatctggccttcaccggccctctcgcttacagcgcgctgtgcaacacagccgctaccctgtcttacgtcgccgagacgtttgggtccttcctcaattggtttagcttctttcccctgcttggacgcctgatggaatttgttctcctgcttccttatagaatttggcggctgctcatgggcgagaccgggttcaactcttcctgttttcaggaatgggccaagctgtacgagttcgtgcacagctttcaggacgagaaacgccaactggcttatcaggtgctcggactgtccgaaggcgccacaaatgaggaaatccatagatcttaccaggagcttgtcaaggtgtggcaccccgatcacaacctggaccagaccgaggaagcgcaacggcatttcctcgagattcaggctgcctatgaagttctgagccagccgcgcaagccttgggggtccagacggtga

SEQ ID NO: 8262 - protein, 148 aa, synthetic construct
  REGION 1..148: note = DJC24__Homo_sapiens__Q6P3W2
MAVEQMPKKDWYSILGADPSANISDLKQKYQKLILMYHPDKQSTDVPAGTVEECVQKFIEIDQAWKILGNEETKREYDLQRCEDDLRNVGPVDAQVYLEEMSWNEGDHSFYLSCRCGGKYSVSKDEAEEVSLISCDTCSLIIELLHYN

SEQ ID NO: 8263 - RNA, 447 nt, synthetic construct
  misc_feature 1..447: note = DJC24__Homo_sapiens__AAH63804
  source 1..447: mol_type = other RNA
atggcggttgagcagatgccaaaaaaggattggtacagcatcctgggagcagacccatctgcaaatatatcagacctaaaacaaaaatatcaaaaactcatattaatgtatcatccagataaacaaagtacagatgtaccagcaggaacagtggaggaatgtgtacagaagttcatcgaaattgatcaagcatggaaaattctaggaaatgaagagacaaaaagagagtatgacctgcagcggtgtgaagatgatctaagaaatgtaggaccagtagatgctcaagtatatcttgaagaaatgtcttggaatgaaggtgatcactctttttatctgagttgcagatgtggtggaaaatacagtgtttccaaggatgaagcggaagaagttagcctgatttcttgtgatacatgttcactaattatagaactccttcattataactaa

SEQ ID NO: 8264 - RNA, 447 nt, synthetic construct
  misc_feature 1..447: note = derived and/or modified sequence opt1 fromDJC24__Homo_sapiens__AAH63804
  source 1..447: mol_type = other RNA
atggccgtggagcagatgcccaagaaggactggtacagcatcctgggcgccgacccgtccgcgaacatcagcgacctcaagcagaagtaccagaagctgatcctgatgtaccaccccgacaagcagtccaccgacgtccccgccgggaccgtggaggagtgcgtgcagaagttcatcgagatcgaccaggcctggaagatcctcggcaacgaggagaccaagcgcgagtacgacctgcagcggtgcgaggacgacctgcgcaacgtcgggcccgtggacgcccaggtgtacctcgaggagatgagctggaacgagggcgaccactccttctacctgagctgccggtgcgggggcaagtactccgtcagcaaggacgaggccgaggaggtgtccctgatcagctgcgacacgtgctccctcatcatcgagctgctgcactacaactga

SEQ ID NO: 8265 - RNA, 447 nt, synthetic construct
  misc_feature 1..447: note = derived and/or modified sequence opt2 fromDJC24__Homo_sapiens__AAH63804
  source 1..447: mol_type = other RNA
atggccgtcgagcagatgcccaagaaggactggtactccatcctcggcgccgacccctccgccaacatctccgacctcaagcagaagtaccagaagctcatcctcatgtaccaccccgacaagcagtccaccgacgtccccgccggcaccgtcgaggagtgcgtccagaagttcatcgagatcgaccaggcctggaagatcctcggcaacgaggagaccaagcgcgagtacgacctccagcgctgcgaggacgacctccgcaacgtcggccccgtcgacgcccaggtctacctcgaggagatgtcctggaacgagggcgaccactccttctacctctcctgccgctgcggcggcaagtactccgtctccaaggacgaggccgaggaggtctccctcatctcctgcgacacctgctccctcatcatcgagctcctccactacaactga

SEQ ID NO: 8266 - RNA, 447 nt, synthetic construct
  misc_feature 1..447: note = derived and/or modified sequence opt3 fromDJC24__Homo_sapiens__AAH63804
  source 1..447: mol_type = other RNA
atggccgtggagcagatgcccaagaaagactggtacagcatcctgggcgctgatccttccgcaaacatttctgacctcaagcaaaaatatcagaaacttatactgatgtaccacccagataagcagtcaaccgacgtcccggccgggacagttgaagagtgcgtgcagaagttcatcgaaattgatcaagcgtggaagatcttgggaaatgaggaaactaaaagagagtatgacttacagaggtgtgaggatgacctgcggaacgtaggtcccgtggatgctcaggtctacctagaagagatgagttggaatgaaggcgaccatagcttttatctctcctgccgctgtgggggaaagtactctgtgtcgaaagatgaggccgaggaagtttcactgattagctgcgacacgtgtagtcttatcatagagctgttgcactataactga

SEQ ID NO: 8267 - RNA, 447 nt, synthetic construct
  misc_feature 1..447: note = derived and/or modified sequence opt4 fromDJC24__Homo_sapiens__AAH63804
  source 1..447: mol_type = other RNA
atggccgtggagcagatgcccaagaaggactggtacagcatcctgggcgccgaccccagcgccaacatcagcgacctgaagcagaagtaccagaagctgatcctgatgtaccaccccgacaagcagagcaccgacgtgcccgccggcaccgtggaggagtgcgtgcagaagttcatcgagatcgaccaggcctggaagatcctgggcaacgaggagaccaagagagagtacgacctgcagagatgcgaggacgacctgagaaacgtgggccccgtggacgcccaggtgtacctggaggagatgagctggaacgagggcgaccacagcttctacctgagctgcagatgcggcggcaagtacagcgtgagcaaggacgaggccgaggaggtgagcctgatcagctgcgacacctgcagcctgatcatcgagctgctgcactacaactga

SEQ ID NO: 8268 - RNA, 447 nt, synthetic construct
  misc_feature 1..447: note = derived and/or modified sequence opt5 fromDJC24__Homo_sapiens__AAH63804
  source 1..447: mol_type = other RNA
atggccgtggagcagatgcccaagaaagactggtacagcatcctgggcgctgatccttccgccaacatttctgacctcaagcaaaaatatcagaagctgatccttatgtaccacccggataaacagagcaccgacgtccccgcggggacagttgaagagtgcgtgcagaagttcattgaaatcgatcaggcttggaagattctgggaaatgaggaaacgaaaagagagtatgacctccaacggtgtgaggatgacctgcgcaacgtgggccctgtcgatgcccaggtgtaccttgaagagatgtcctggaatgaaggggaccattctttttatctgagctgcagatgtggaggcaagtactccgtttctaaagatgaggccgaggaagtgagcctcatctcctgcgacacctgtagcctgatcattgagctgctccactataactga

SEQ ID NO: 8269 - protein, 360 aa, synthetic construct
  REGION 1..360: note = DJC25__Homo_sapiens__Q9H1X3
MGAPLLSPGWGAGAAGRRWWMLLAPLLPALLLVRPAGALVEGLYCGTRDCYEVLGVSRSAGKAEIARAYRQLARRYHPDRYRPQPGDEGPGRTPQSAEEAFLLVATAYETLKDEETRKDYDYMLDHPEEYYSHYYHYYSRRLAPKVDVRVVILVSVCAISVFQFFSWWNSYNKAISYLATVPKYRIQATEIAKQQGLLKKAKEKGKNKKSKEEIRDEEENIIKNIIKSKIDIKGGYQKPQICDLLLFQIILAPFHLCSYIVWYCRWIYNFNIKGKEYGEEERLYIIRKSMKMSKSQFDSLEDHQKETFLKRELWIKENYEVYKQEQEEELKKKLANDPRWKRYRRWMKNEGPGRLTFVDD

SEQ ID NO: 8270 - RNA, 1083 nt, synthetic construct
  misc_feature 1..1083: note = DJC25__Homo_sapiens__AAH48318
  source 1..1083: mol_type = other RNA
atgggggcgccgctgctctctcccggctggggagccggggctgccggccggcgctggtggatgctgctggcgcccctgctgccggcgctgctgctggtgcggcccgcgggggccctggtggaggggctctactgcggcacgcgggactgctacgaggtgctgggcgtgagccgctcggcgggcaaggcggagatcgcgcgggcctaccgccagctggcccggcgctaccaccctgaccgctaccggccccagcccggagacgagggccccgggcggacgccgcagagcgccgaggaggctttcctgctggtggcaaccgcctacgagacactcaaggatgaagaaacacgaaaagattatgattacatgctggatcatccagaagagtactacagccattactaccactactatagcaggcgcttggcccctaaggtggatgttagagtagtgattttggtcagcgtgtgtgctatttcggtgtttcagtttttcagctggtggaatagctacaataaggcaatcagctacctagccacagtgcccaagtaccgtatccaagctacagagattgccaagcagcagggactgctcaaaaaagccaaagaaaaaggcaaaaacaaaaagtccaaagaagaaattcgtgacgaggaggagaacatcataaagaacattataaaaagtaaaatagatataaaggggggctatcagaaaccccaaatctgtgatcttctcctgtttcaaattatcttagctccttttcacctatgctcatatatagtttggtattgtcggtggatctataattttaacatcaaaggcaaagaatatggagaggaagagagattatacattatacgtaaatctatgaagatgtcaaagtctcaatttgatagtctagaagatcatcagaaagaaacttttcttaaacgagagctctggatcaaggagaattatgaggtctacaagcaagaacaagaggaagaattaaagaaaaagttggcaaatgaccccagatggaagagatacaggagatggatgaagaatgaagggcctgggcggttaacatttgtcgatgactga

SEQ ID NO: 8271 - RNA, 1083 nt, synthetic construct
  misc_feature 1..1083: note = derived and/or modified sequence opt1 fromDJC25__Homo_sapiens__AAH48318
  source 1..1083: mol_type = other RNA
atgggcgcgcccctgctcagcccggggtggggcgccggggccgccggccgccggtggtggatgctgctggcgcccctcctgcccgccctgctcctggtgcgccccgccggggccctggtcgagggcctctactgcggcacccgggactgctacgaggtgctgggggtgtcccgcagcgccggcaaggccgagatcgcccgggcgtaccgccagctggcccggcgctaccacccggaccggtaccgcccccagcccggggacgagggccccgggcggaccccgcagtccgccgaggaggccttcctcctggtcgccacggcgtacgagaccctgaaggacgaggagacccgcaaggactacgactacatgctcgaccaccccgaggagtactacagccactactaccactactactcccggcgcctggcccccaaggtggacgtgcgggtcgtgatcctggtgagcgtctgcgccatctccgtgttccagttcttcagctggtggaactcctacaacaaggccatcagctacctcgccaccgtgcccaagtaccgcatccaggcgacggagatcgccaagcagcagggcctgctgaagaaggccaaggagaagggcaagaacaagaagtccaaggaggagatccgggacgaggaggagaacatcatcaagaacatcatcaagagcaagatcgacatcaagggcgggtaccagaagccgcagatctgcgacctcctgctgttccagatcatcctcgcccccttccacctgtgctcctacatcgtctggtactgccgctggatctacaacttcaacatcaaggggaaggagtacggcgaggaggagcggctgtacatcatccgcaagagcatgaagatgtccaagagccagttcgactccctcgaggaccaccagaaggagaccttcctgaagcgggagctgtggatcaaggagaactacgaggtgtacaagcaggagcaggaggaggagctcaagaagaagctggccaacgacccccgctggaagcgctaccggcgctggatgaagaacgagggccccgggcggctgaccttcgtggacgactga

SEQ ID NO: 8272 - RNA, 1083 nt, synthetic construct
  misc_feature 1..1083: note = derived and/or modified sequence opt2 fromDJC25__Homo_sapiens__AAH48318
  source 1..1083: mol_type = other RNA
atgggcgcccccctcctctcccccggctggggcgccggcgccgccggccgccgctggtggatgctcctcgcccccctcctccccgccctcctcctcgtccgccccgccggcgccctcgtcgagggcctctactgcggcacccgcgactgctacgaggtcctcggcgtctcccgctccgccggcaaggccgagatcgcccgcgcctaccgccagctcgcccgccgctaccaccccgaccgctaccgcccccagcccggcgacgagggccccggccgcaccccccagtccgccgaggaggccttcctcctcgtcgccaccgcctacgagaccctcaaggacgaggagacccgcaaggactacgactacatgctcgaccaccccgaggagtactactcccactactaccactactactcccgccgcctcgcccccaaggtcgacgtccgcgtcgtcatcctcgtctccgtctgcgccatctccgtcttccagttcttctcctggtggaactcctacaacaaggccatctcctacctcgccaccgtccccaagtaccgcatccaggccaccgagatcgccaagcagcagggcctcctcaagaaggccaaggagaagggcaagaacaagaagtccaaggaggagatccgcgacgaggaggagaacatcatcaagaacatcatcaagtccaagatcgacatcaagggcggctaccagaagccccagatctgcgacctcctcctcttccagatcatcctcgcccccttccacctctgctcctacatcgtctggtactgccgctggatctacaacttcaacatcaagggcaaggagtacggcgaggaggagcgcctctacatcatccgcaagtccatgaagatgtccaagtcccagttcgactccctcgaggaccaccagaaggagaccttcctcaagcgcgagctctggatcaaggagaactacgaggtctacaagcaggagcaggaggaggagctcaagaagaagctcgccaacgacccccgctggaagcgctaccgccgctggatgaagaacgagggccccggccgcctcaccttcgtcgacgactga

SEQ ID NO: 8273 - RNA, 1083 nt, synthetic construct
  misc_feature 1..1083: note = derived and/or modified sequence opt3 fromDJC25__Homo_sapiens__AAH48318
  source 1..1083: mol_type = other RNA
atgggcgctcccctgctcagccctgggtggggagccggtgcagccggcagaaggtggtggatgcttctggcgccattgttaccggctctgctactcgtgcggcccgccggggcactggtcgagggactttactgcggcacccgcgactgttatgaagttctgggtgtgtcccgatctgccgggaaggctgagatcgcacgtgcctacagacagttggctaggcggtatcaccctgatcgctacagaccacaacccggagacgaaggccctggcaggacaccacagtcagccgaggaagcgttcctcctggtagcaactgcctatgagacgctgaaagatgaggaaacccggaaggactacgattatatgctcgaccatcccgaggaatactacagtcactattaccattattacagccgccgattagctcctaaagtggatgtcagagtggttattctggtgtccgtctgcgccatatctgtgtttcagttcttttcgtggtggaactcatataataaggcaatcagctaccttgctacagtaccaaaatataggattcaggccactgagatcgcgaagcaacaggggttgctgaagaaagccaaggagaaaggaaagaacaaaaagagtaaggaagagattcgggacgaagaggaaaatatcatcaaaaacataattaagtccaaaatcgatattaagggtggctaccagaaaccgcagatctgtgacctactcctgttccaaataattcttgcaccctttcacctgtgctcttacatcgtttggtattgtcgttggatttacaatttcaacatcaaggggaaagagtatggagaggaagaacgcttgtacatcattagaaagagcatgaagatgtccaaatcacagtttgatagtctcgaagaccatcagaaggagaccttcctgaaaagggaattatggataaaggagaattatgaggtgtacaaacaggaacaagaggaggagctgaagaagaaactcgctaacgatcctcggtggaagcgatatcgcagatggatgaaaaatgaaggcccaggtaggcttacatttgtcgacgactga

SEQ ID NO: 8274 - RNA, 1083 nt, synthetic construct
  misc_feature 1..1083: note = derived and/or modified sequence opt4 fromDJC25__Homo_sapiens__AAH48318
  source 1..1083: mol_type = other RNA
atgggcgcccccctgctgagccccggctggggcgccggcgccgccggcagaagatggtggatgctgctggcccccctgctgcccgccctgctgctggtgagacccgccggcgccctggtggagggcctgtactgcggcaccagagactgctacgaggtgctgggcgtgagcagaagcgccggcaaggccgagatcgccagagcctacagacagctggccagaagataccaccccgacagatacagaccccagcccggcgacgagggccccggcagaaccccccagagcgccgaggaggccttcctgctggtggccaccgcctacgagaccctgaaggacgaggagaccagaaaggactacgactacatgctggaccaccccgaggagtactacagccactactaccactactacagcagaagactggcccccaaggtggacgtgagagtggtgatcctggtgagcgtgtgcgccatcagcgtgttccagttcttcagctggtggaacagctacaacaaggccatcagctacctggccaccgtgcccaagtacagaatccaggccaccgagatcgccaagcagcagggcctgctgaagaaggccaaggagaagggcaagaacaagaagagcaaggaggagatcagagacgaggaggagaacatcatcaagaacatcatcaagagcaagatcgacatcaagggcggctaccagaagccccagatctgcgacctgctgctgttccagatcatcctggcccccttccacctgtgcagctacatcgtgtggtactgcagatggatctacaacttcaacatcaagggcaaggagtacggcgaggaggagagactgtacatcatcagaaagagcatgaagatgagcaagagccagttcgacagcctggaggaccaccagaaggagaccttcctgaagagagagctgtggatcaaggagaactacgaggtgtacaagcaggagcaggaggaggagctgaagaagaagctggccaacgaccccagatggaagagatacagaagatggatgaagaacgagggccccggcagactgaccttcgtggacgactga

SEQ ID NO: 8275 - RNA, 1083 nt, synthetic construct
  misc_feature 1..1083: note = derived and/or modified sequence opt5 fromDJC25__Homo_sapiens__AAH48318
  source 1..1083: mol_type = other RNA
atgggcgctcccctgctcagccctgggtggggagccggcgccgcggggagacggtggtggatgctgcttgctccgctgctccccgccctgcttctggtgcgccctgccggagctctcgtcgagggcctgtactgcgggaccagagactgttatgaagttctgggagtgtcccggtctgccggcaaggctgagatcgcccgcgcgtacagacagctcgcccggcgctatcaccccgatagataccggcctcaacccggcgacgaagggcctggacgcacaccgcagagcgctgaggaagccttcctgcttgtggctacggcctatgagaccctgaaagatgaggaaacaagaaaggactacgattatatgctcgaccatcccgaggaatactactcccactattaccattattactctcggcgcctggcgcctaaagtcgatgtgagagttgtgattcttgtcagcgtgtgcgccatctccgtttttcagttcttttcttggtggaacagctataataaggctatttcctacctggccaccgtgcccaaatatcggatccaggctacagagattgccaagcaacagggcctcctgaagaaagccaaggagaaagggaagaacaaaaagagcaaggaagagatccgcgacgaagaggaaaatatcattaaaaacatcattaagtctaaaatcgatattaagggaggctaccagaaacctcagatctgtgacctgctcctgttccaaattatccttgctccctttcacctgtgctcctacatcgtctggtattgtagatggatttacaatttcaacatcaaggggaaagagtatggagaggaagaacggctctacattatcagaaagagcatgaagatgtctaaatcccagtttgatagcctggaagaccatcagaaggagaccttccttaaacgcgaactgtggattaaggagaattatgaggtgtacaaacaggaacaagaggaggagctcaagaagaaactggcgaacgatccgcggtggaagagatatcgccggtggatgaaaaatgaaggccctggcagactgacatttgtggacgactga

SEQ ID NO: 8276 - protein, 273 aa, synthetic construct
  REGION 1..273: note = DJC27__Homo_sapiens__Q9NZQ0
MEANMPKRKEPGRSLRIKVISMGNAEVGKSCIIKRYCEKRFVSKYLATIGIDYGVTKVHVRDREIKVNIFDMAGHPFFYEVRNEFYKDTQGVILVYDVGQKDSFDALDAWLAEMKQELGPHGNMENIIFVVCANKIDCTKHRCVDESEGRLWAESKGFLYFETSAQTGEGINEMFQTFYISIVDLCENGGKRPTTNSSASFTKEQADAIRRIRNSKDSWDMLGVKPGASRDEVNKAYRKLAVLLHPDKCVAPGSEDAFKAVVNARTALLKNIK

SEQ ID NO: 8277 - RNA, 822 nt, synthetic construct
  misc_feature 1..822: note = DJC27__Homo_sapiens__AAF44347
  source 1..822: mol_type = other RNA
atggaggccaacatgccgaagcggaaggagcccggcaggtctctccgcatcaaagtcatctccatgggcaacgccgaagtggggaaaagctgtattataaagcgatactgtgagaaaagattcgtgtctaaatacctggcaacaattggaattgactatggagtcacaaaggtacacgtcagagacagagaaatcaaagttaacatctttgatatggctggacatcccttcttctatgaggttcgaaatgagttttacaaggacacacagggtgtgatactggtctatgatgttgggcagaaagactcctttgacgcccttgatgcgtggctggcagaaatgaagcaagagcttggacctcatggaaacatggaaaatattatatttgtagtttgtgccaacaagattgattgtaccaaacatcgctgtgtagatgaaagtgaaggacgtctttgggctgaaagcaaagggttcctgtactttgaaacttcagcacaaactggagaaggcattaatgagatgttccagaccttttatatatccatagttgatttatgtgaaaatggcgggaaacgccctaccaccaatagcagtgctagtttcaccaaagaacaagcagatgccattcgcagaattcgaaatagtaaagacagttgggacatgctgggagtcaaacctggggcctcaagggatgaagtcaataaagcgtatcggaaacttgctgtgcttcttcaccctgacaaatgtgtagcacctggcagtgaagatgccttcaaagcagttgtgaatgctcggacagccctcctgaaaaacatcaagtag

SEQ ID NO: 8278 - RNA, 822 nt, synthetic construct
  misc_feature 1..822: note = derived and/or modified sequence opt1 fromDJC27__Homo_sapiens__AAF44347
  source 1..822: mol_type = other RNA
atggaggccaacatgcccaagcgcaaggagccgggccggagcctgcgcatcaaggtgatctccatggggaacgccgaggtcggcaagagctgcatcatcaagcggtactgcgagaagcgcttcgtgtccaagtacctcgcgaccatcgggatcgactacggcgtgaccaaggtccacgtgcgggaccgcgagatcaaggtgaacatcttcgacatggccgggcaccccttcttctacgaggtccggaacgagttctacaaggacacgcagggcgtgatcctggtgtacgacgtcggccagaaggacagcttcgacgccctggacgcctggctcgccgagatgaagcaggagctggggccccacggcaacatggagaacatcatcttcgtggtgtgcgcgaacaagatcgactgcaccaagcaccgctgcgtcgacgagtccgaggggcggctgtgggccgagagcaagggcttcctctacttcgagacctccgcccagaccggggagggcatcaacgagatgttccagacgttctacatcagcatcgtggacctgtgcgagaacggcgggaagcgccccaccaccaactccagcgcctccttcaccaaggagcaggcggacgccatccggcgcatccggaacagcaaggactcctgggacatgctgggcgtgaagccgggggccagccgcgacgaggtcaacaaggcctaccggaagctcgccgtgctgctgcaccccgacaagtgcgtggcgcccggctccgaggacgccttcaaggccgtcgtgaacgcccgcacggccctcctgaagaacatcaagtga

SEQ ID NO: 8279 - RNA, 822 nt, synthetic construct
  misc_feature 1..822: note = derived and/or modified sequence opt2 fromDJC27__Homo_sapiens__AAF44347
  source 1..822: mol_type = other RNA
atggaggccaacatgcccaagcgcaaggagcccggccgctccctccgcatcaaggtcatctccatgggcaacgccgaggtcggcaagtcctgcatcatcaagcgctactgcgagaagcgcttcgtctccaagtacctcgccaccatcggcatcgactacggcgtcaccaaggtccacgtccgcgaccgcgagatcaaggtcaacatcttcgacatggccggccaccccttcttctacgaggtccgcaacgagttctacaaggacacccagggcgtcatcctcgtctacgacgtcggccagaaggactccttcgacgccctcgacgcctggctcgccgagatgaagcaggagctcggcccccacggcaacatggagaacatcatcttcgtcgtctgcgccaacaagatcgactgcaccaagcaccgctgcgtcgacgagtccgagggccgcctctgggccgagtccaagggcttcctctacttcgagacctccgcccagaccggcgagggcatcaacgagatgttccagaccttctacatctccatcgtcgacctctgcgagaacggcggcaagcgccccaccaccaactcctccgcctccttcaccaaggagcaggccgacgccatccgccgcatccgcaactccaaggactcctgggacatgctcggcgtcaagcccggcgcctcccgcgacgaggtcaacaaggcctaccgcaagctcgccgtcctcctccaccccgacaagtgcgtcgcccccggctccgaggacgccttcaaggccgtcgtcaacgcccgcaccgccctcctcaagaacatcaagtga

SEQ ID NO: 8280 - RNA, 822 nt, synthetic construct
  misc_feature 1..822: note = derived and/or modified sequence opt3 fromDJC27__Homo_sapiens__AAF44347
  source 1..822: mol_type = other RNA
atggaggccaacatgcccaagagaaaagaacctggcaggagcctgcggatcaaggtgatttccatggggaatgctgaggtcggaaaatcttgcataatcaagcgctactgtgaaaaacgattcgtttcaaagtatctcgcaaccattggtatcgactacggcgtgacaaaggtacacgtgcgtgatagagagattaaagtcaacatctttgacatggccgggcatccattcttttatgaagtgaggaatgagttctacaaggatactcagggagttatacttgtgtatgacgtcggccaaaaagatagttttgacgcgctggatgcttggttggccgagatgaagcaggaattaggtccgcacgggaacatggagaatatcattttcgtggtatgcgcaaacaaaatcgactgtacgaagcatcggtgcgttgatgaaagcgagggacgcctgtgggccgagtccaagggctttctatacttcgaaacctctgctcagacaggcgaggggattaatgaaatgtttcagactttctatatctcgatagtggacctctgtgagaacggaggtaaaagacccaccacaaattcaagcgcaagttttaccaaggaacaagccgatgctattaggcggatccgcaactccaaagactcttgggatatgctgggcgtcaagcctggggccagccgagacgaggtgaataaagcgtacagaaaacttgcagtgctgttgcacccagacaagtgcgtcgcccccggatccgaggatgctttcaaggccgttgtgaacgcaaggactgctctcctgaagaatattaaatga

SEQ ID NO: 8281 - RNA, 822 nt, synthetic construct
  misc_feature 1..822: note = derived and/or modified sequence opt4 fromDJC27__Homo_sapiens__AAF44347
  source 1..822: mol_type = other RNA
atggaggccaacatgcccaagagaaaggagcccggcagaagcctgagaatcaaggtgatcagcatgggcaacgccgaggtgggcaagagctgcatcatcaagagatactgcgagaagagattcgtgagcaagtacctggccaccatcggcatcgactacggcgtgaccaaggtgcacgtgagagacagagagatcaaggtgaacatcttcgacatggccggccaccccttcttctacgaggtgagaaacgagttctacaaggacacccagggcgtgatcctggtgtacgacgtgggccagaaggacagcttcgacgccctggacgcctggctggccgagatgaagcaggagctgggcccccacggcaacatggagaacatcatcttcgtggtgtgcgccaacaagatcgactgcaccaagcacagatgcgtggacgagagcgagggcagactgtgggccgagagcaagggcttcctgtacttcgagaccagcgcccagaccggcgagggcatcaacgagatgttccagaccttctacatcagcatcgtggacctgtgcgagaacggcggcaagagacccaccaccaacagcagcgccagcttcaccaaggagcaggccgacgccatcagaagaatcagaaacagcaaggacagctgggacatgctgggcgtgaagcccggcgccagcagagacgaggtgaacaaggcctacagaaagctggccgtgctgctgcaccccgacaagtgcgtggcccccggcagcgaggacgccttcaaggccgtggtgaacgccagaaccgccctgctgaagaacatcaagtga

SEQ ID NO: 8282 - RNA, 822 nt, synthetic construct
  misc_feature 1..822: note = derived and/or modified sequence opt5 fromDJC27__Homo_sapiens__AAF44347
  source 1..822: mol_type = other RNA
atggaggccaacatgcccaagagaaaagaacctggccggagcctgcgcatcaaggtgatttccatggggaatgctgaggtcggaaaatcttgcatcattaagagatactgtgaaaaacggttcgttagcaagtatctcgccaccatcggcattgactacggggtgacaaaggtgcacgtccgcgatagagagatcaaagtgaacatctttgacatggcgggacatccgttcttttatgaagttcggaatgagttctacaaggatacgcagggcgtgattctggtctatgacgtggggcaaaaagattcctttgacgctcttgatgcctggctggccgagatgaagcaggaactcggaccccacggcaacatggagaatatcattttcgttgtgtgcgctaacaaaatcgactgtaccaagcatcgctgcgtcgatgaatctgagggcagactgtgggccgagagcaaggggtttctttacttcgaaacatccgctcagaccggagagggcattaatgaaatgtttcagacattctatatctctattgtggacctgtgtgagaacgggggaaaacggcctaccacaaatagctccgccagctttaccaaggaacaagcggatgccatccgcagaatccggaactctaaagactcctgggatatgctcggcgtgaagcccggggctagccgcgacgaggtcaataaagcctacagaaagctggctgttctgctccaccctgacaaatgcgtggcccccggatctgaggatgcgttcaaggccgtggtcaacgctcggacggccctgcttaagaatattaaatga

SEQ ID NO: 8283 - protein, 388 aa, synthetic construct
  REGION 1..388: note = DJC28__Homo_sapiens__Q9NX36
MNTMYVMMAQILRSHLIKATVIPNRVKMLPYFGIIRNRMMSTHKSKKKIREYYRLLNVEEGCSADEVRESFHKLAKQYHPDSGSNTADSATFIRIEKAYRKVLSHVIEQTNASQSKGEEEEDVEKFKYKTPQHRHYLSFEGIGFGTPTQREKHYRQFRADRAAEQVMEYQKQKLQSQYFPDSVIVKNIRQSKQQKITQAIERLVEDLIQESMAKGDFDNLSGKGKPLKKFSDCSYIDPMTHNLNRILIDNGYQPEWILKQKEISDTIEQLREAILVSRKKLGNPMTPTEKKQWNHVCEQFQENIRKLNKRINDFNLIVPILTRQKVHFDAQKEIVRAQKIYETLIKTKEVTDRNPNNLDQGEGEKTPEIKKGFLNWMNLWKFIKIRSF

SEQ ID NO: 8284 - RNA, 1167 nt, synthetic construct
  misc_feature 1..1167: note = DJC28__Homo_sapiens__AAL59618
  source 1..1167: mol_type = other RNA
atgaatacaatgtatgtgatgatggctcagatcttaagatctcacctgataaaggctacagtgattcctaatcgagtgaaaatgcttccatattttggtatcattagaaatagaatgatgtcaacccataaatccaaaaagaagatcagagaatattatagactgctgaacgtggaggaaggatgctctgcagatgaagtcagggaatcttttcataagcttgccaagcaatatcatcctgacagtggctctaatactgctgattctgcaacatttataaggattgaaaaagcttatagaaaggtgctctcccatgtgatagaacaaacaaatgccagtcagagtaaaggtgaagaagaagaagatgtagaaaaattcaaatataaaacaccccaacaccgacattatttaagttttgaaggtattggttttgggactccaactcaacgagagaagcattataggcaatttagggcagaccgtgctgctgaacaagtgatggaatatcaaaagcagaaactacaaagccagtattttcctgatagtgtaattgttaaaaatataagacagagcaaacagcaaaagataacgcaagctatagaacgtttagtggaggacctcattcaagaatccatggcaaaaggagactttgacaatctcagtgggaaaggaaaacctctgaaaaagttttctgactgttcttacattgatcccatgactcacaacctgaaccgaatactgatcgataatggataccaaccagaatggatccttaagcaaaaggaaataagcgatactattgagcaactcagagaggcaattttagtgtctaggaaaaaacttgggaatccaatgacaccaactgaaaagaaacagtggaaccatgtttgtgagcagtttcaagaaaacatcagaaaattaaacaagcgaattaatgattttaatttaattgttcccatcctgaccaggcaaaaagtccattttgatgctcagaaagaaattgtcagagcccagaaaatatacgagacccttataaaaacaaaagaagtcacagatagaaacccaaataaccttgatcaaggagaaggagagaaaacacctgaaatcaagaaaggttttttaaactggatgaatctgtggaaatttattaaaatacgatcattttga

SEQ ID NO: 8285 - RNA, 1167 nt, synthetic construct
  misc_feature 1..1167: note = derived and/or modified sequence opt1 fromDJC28__Homo_sapiens__AAL59618
  source 1..1167: mol_type = other RNA
atgaacaccatgtacgtgatgatggcccagatcctgcgcagccacctcatcaaggccaccgtcatccccaaccgggtgaagatgctgccgtacttcggcatcatccgcaaccggatgatgtccacgcacaagagcaagaagaagatccgcgagtactaccggctgctcaacgtggaggaggggtgctccgcggacgaggtccgcgagagcttccacaagctggccaagcagtaccaccccgactccggcagcaacaccgccgactccgccaccttcatccggatcgagaaggcctaccgcaaggtgctgagccacgtgatcgagcagaccaacgcgtcccagagcaagggggaggaggaggaggacgtcgagaagttcaagtacaagacgccccagcaccggcactacctctccttcgagggcatcgggttcggcacccccacccagcgcgagaagcactaccggcagttccgcgccgaccgggccgccgagcaggtcatggagtaccagaagcagaagctgcagagccagtacttcccggactccgtgatcgtgaagaacatccgccagagcaagcagcagaagatcacccaggcgatcgagcggctggtggaggacctcatccaggagtccatggccaagggcgacttcgacaacctgagcgggaagggcaagcccctgaagaagttctccgactgcagctacatcgaccccatgacgcacaacctcaaccgcatcctgatcgacaacgggtaccagcccgagtggatcctgaagcagaaggagatctccgacaccatcgagcagctccgggaggccatcctggtgagccgcaagaagctgggcaacccgatgacccccaccgagaagaagcagtggaaccacgtctgcgagcagttccaggagaacatccggaagctcaacaagcgcatcaacgacttcaacctgatcgtgcccatcctgacgcggcagaaggtgcacttcgacgcccagaaggagatcgtccgcgcccagaagatctacgagaccctcatcaagaccaaggaggtgaccgaccgcaaccccaacaacctggaccagggggagggcgagaagacgccggagatcaagaagggcttcctgaactggatgaacctctggaagttcatcaagatccggagcttctga

SEQ ID NO: 8286 - RNA, 1167 nt, synthetic construct
  misc_feature 1..1167: note = derived and/or modified sequence opt2 fromDJC28__Homo_sapiens__AAL59618
  source 1..1167: mol_type = other RNA
atgaacaccatgtacgtcatgatggcccagatcctccgctcccacctcatcaaggccaccgtcatccccaaccgcgtcaagatgctcccctacttcggcatcatccgcaaccgcatgatgtccacccacaagtccaagaagaagatccgcgagtactaccgcctcctcaacgtcgaggagggctgctccgccgacgaggtccgcgagtccttccacaagctcgccaagcagtaccaccccgactccggctccaacaccgccgactccgccaccttcatccgcatcgagaaggcctaccgcaaggtcctctcccacgtcatcgagcagaccaacgcctcccagtccaagggcgaggaggaggaggacgtcgagaagttcaagtacaagaccccccagcaccgccactacctctccttcgagggcatcggcttcggcacccccacccagcgcgagaagcactaccgccagttccgcgccgaccgcgccgccgagcaggtcatggagtaccagaagcagaagctccagtcccagtacttccccgactccgtcatcgtcaagaacatccgccagtccaagcagcagaagatcacccaggccatcgagcgcctcgtcgaggacctcatccaggagtccatggccaagggcgacttcgacaacctctccggcaagggcaagcccctcaagaagttctccgactgctcctacatcgaccccatgacccacaacctcaaccgcatcctcatcgacaacggctaccagcccgagtggatcctcaagcagaaggagatctccgacaccatcgagcagctccgcgaggccatcctcgtctcccgcaagaagctcggcaaccccatgacccccaccgagaagaagcagtggaaccacgtctgcgagcagttccaggagaacatccgcaagctcaacaagcgcatcaacgacttcaacctcatcgtccccatcctcacccgccagaaggtccacttcgacgcccagaaggagatcgtccgcgcccagaagatctacgagaccctcatcaagaccaaggaggtcaccgaccgcaaccccaacaacctcgaccagggcgagggcgagaagacccccgagatcaagaagggcttcctcaactggatgaacctctggaagttcatcaagatccgctccttctga

SEQ ID NO: 8287 - RNA, 1167 nt, synthetic construct
  misc_feature 1..1167: note = derived and/or modified sequence opt3 fromDJC28__Homo_sapiens__AAL59618
  source 1..1167: mol_type = other RNA
atgaacaccatgtacgtgatgatggcccagatcctgagaagccacctcattaaggctacagtcatacccaatagggttaaaatgcttccttatttcggcatcattcggaaccgcatgatgtccactcataagtctaaaaagaaaatccgagagtactatcgtctgttgaatgtggaagaggggtgctcagcagacgaagtaagagagagttttcacaagttagccaagcaataccatccagatagcggatccaacacggcggactctgctaccttcattaggatcgaaaaagcctatcggaaggtgctgtcgcacgtcatagagcagacaaatgcatcacagagcaaaggtgaggaagaggaagatgtggagaagtttaaatacaagactccgcagcatcgccactatctaagtttcgagggcatcgggtttggaacccccacacaaagagaaaagcactacaggcagttccgggccgaccgcgctgcagagcaggttatggaataccagaaacaaaagctccagtcccagtattttcctgattctgtgattgtcaaaaacatccgacagagcaagcaacagaaaattacccaggccatcgagagactggtggaagaccttatacaagagtccatggctaagggcgatttcgacaatctgtcaggtaaagggaagccattgaagaaatttagtgattgtagctacattgaccccatgactcataacctcaataggatcctgattgataacggatatcagcctgagtggatcctgaagcagaaagaaatctctgacacaattgagcagctccgggaagccatattagtatcccgtaagaaactgggcaatccaatgacccccacggagaagaagcaatggaaccacgtttgcgaacagttccaggagaatatccgcaaacttaacaagagaattaatgattttaacttgatcgtgcctatactgactaggcagaaagtccatttcgacgcgcaaaaggagattgtgcgggcacagaaaatctacgaaaccctaatcaagacaaaggaggtgactgaccgaaacccaaataacctcgatcagggcgaaggggagaaaaccccggaaattaagaaaggatttctgaattggatgaacctttggaagttcatcaaaattcgctcattctga

SEQ ID NO: 8288 - RNA, 1167 nt, synthetic construct
  misc_feature 1..1167: note = derived and/or modified sequence opt4 fromDJC28__Homo_sapiens__AAL59618
  source 1..1167: mol_type = other RNA
atgaacaccatgtacgtgatgatggcccagatcctgagaagccacctgatcaaggccaccgtgatccccaacagagtgaagatgctgccctacttcggcatcatcagaaacagaatgatgagcacccacaagagcaagaagaagatcagagagtactacagactgctgaacgtggaggagggctgcagcgccgacgaggtgagagagagcttccacaagctggccaagcagtaccaccccgacagcggcagcaacaccgccgacagcgccaccttcatcagaatcgagaaggcctacagaaaggtgctgagccacgtgatcgagcagaccaacgccagccagagcaagggcgaggaggaggaggacgtggagaagttcaagtacaagaccccccagcacagacactacctgagcttcgagggcatcggcttcggcacccccacccagagagagaagcactacagacagttcagagccgacagagccgccgagcaggtgatggagtaccagaagcagaagctgcagagccagtacttccccgacagcgtgatcgtgaagaacatcagacagagcaagcagcagaagatcacccaggccatcgagagactggtggaggacctgatccaggagagcatggccaagggcgacttcgacaacctgagcggcaagggcaagcccctgaagaagttcagcgactgcagctacatcgaccccatgacccacaacctgaacagaatcctgatcgacaacggctaccagcccgagtggatcctgaagcagaaggagatcagcgacaccatcgagcagctgagagaggccatcctggtgagcagaaagaagctgggcaaccccatgacccccaccgagaagaagcagtggaaccacgtgtgcgagcagttccaggagaacatcagaaagctgaacaagagaatcaacgacttcaacctgatcgtgcccatcctgaccagacagaaggtgcacttcgacgcccagaaggagatcgtgagagcccagaagatctacgagaccctgatcaagaccaaggaggtgaccgacagaaaccccaacaacctggaccagggcgagggcgagaagacccccgagatcaagaagggcttcctgaactggatgaacctgtggaagttcatcaagatcagaagcttctga

SEQ ID NO: 8289 - RNA, 1167 nt, synthetic construct
  misc_feature 1..1167: note = derived and/or modified sequence opt5 fromDJC28__Homo_sapiens__AAL59618
  source 1..1167: mol_type = other RNA
atgaacaccatgtacgtgatgatggcccagatcctgagaagccacctcattaaggctacagtcatccccaatcgggttaaaatgctgccttatttcggcattatccgcaacagaatgatgtccacgcataagtctaaaaagaaaattcgggagtactatcgccttctgaatgtggaagaggggtgcagcgccgacgaagtgagagagtcctttcacaagctcgcgaagcaataccatccggattctggaagcaacaccgctgactccgccacattcatccggatcgaaaaagcctatcgcaaggtcctgtctcacgtgattgagcagaccaatgctagccagtccaaaggcgaggaagaggaagatgttgagaagtttaaatacaagacaccccagcatagacactatcttagcttcgaggggatcggatttggcacccctacacaacgggaaaagcactaccgccagttcagagccgaccgggctgccgaacaggtgatggagtaccagaaacaaaagctgcagtctcagtattttcccgattccgtcattgtgaaaaacatccgccagagcaagcaacagaaaattacccaggcgatcgagagactcgttgaagacctgattcaagagtctatggccaagggggatttcgacaatctgtccggaaaaggcaagcctctcaagaaatttagcgattgttcttacatcgaccccatgacgcataacctgaatcggatccttattgataacggctatcagcctgagtggatcctgaagcagaaagaaatttccgacaccatcgagcagctccgcgaagctattctggtgagcagaaagaaacttgggaatccgatgacacccaccgagaagaagcaatggaaccacgtctgcgaacagttccaggagaatatccggaaactgaacaagagaatcaatgattttaacctcattgtgcctatcctgacacgccagaaagtgcatttcgacgcccaaaaggagattgtccgggctcagaaaatctacgaaaccctgattaagacgaaggaggttacagacagaaaccccaataacctcgatcagggagaaggcgagaaaacccctgaaatcaagaaagggtttctgaattggatgaacctttggaagttcatcaaaattcgctccttctga

SEQ ID NO: 8290 - protein, 226 aa, synthetic construct
  REGION 1..226: note = DJC30__Homo_sapiens__Q96LL9
MAAMRWRWWQRLLPWRLLQARGFPQNSAPSLGLGARTYSQGDCSYSRTALYDLLGVPSTATQAQIKAAYYRQCFLYHPDRNSGSAEAAERFTRISQAYVVLGSATLRRKYDRGLLSDEDLRGPGVRPSRTPAPDPGSPRTPPPTSRTHDGSRASPGANRTMFNFDAFYQAHYGEQLERERRLRARREALRKRQEYRSMKGLRWEDTRDTAAIFLIFSIFIIIGFYI

SEQ ID NO: 8291 - RNA, 681 nt, synthetic construct
  misc_feature 1..681: note = DJC30__Homo_sapiens__AAM62307
  source 1..681: mol_type = other RNA
atggcagccatgcgctggcgatggtggcagcggctgttaccttggaggttgctgcaggcccgtggctttccacaaaattctgcacccagcctgggcctaggagcgaggacttattcccagggcgactgctcgtattcgcgcacggcgctgtatgatctgctcggcgtcccctccacagccacgcaggcccaaatcaaggcggcttactaccgtcagtgctttctctaccacccggaccgcaactccgggagcgcggaggccgccgagcgcttcacgcgcatctcccaggcctacgtggtgctgggcagtgccaccctccgtcgcaagtatgatcgcggcctactcagcgacgaggacctgcgcggacctggcgtccggccctccaggacgcccgcacccgaccccggctcgccgcgtaccccgccgcccacctctcggacccacgacggttctcgggcctcccccggcgccaaccgcacgatgttcaactttgacgccttctaccaggcccactacggggaacaactggagcgggaacggcgcctgagggcccggcgggaggcccttcgcaaacggcaggagtatcggtccatgaaaggcctccgctgggaggatacccgagacacggctgccattttcctcatcttttcaatcttcatcatcatcggcttttatatttaa

SEQ ID NO: 8292 - RNA, 681 nt, synthetic construct
  misc_feature 1..681: note = derived and/or modified sequence opt1 fromDJC30__Homo_sapiens__AAM62307
  source 1..681: mol_type = other RNA
atggccgccatgcgctggcggtggtggcagcgcctgctcccctggcggctgctgcaggcgcgcggcttcccccagaacagcgccccctccctcgggctgggcgcccggacctacagccagggggactgctcctacagccgcaccgccctgtacgacctcctgggcgtgccctccacggccacccaggcgcagatcaaggccgcctactaccggcagtgcttcctgtaccaccccgaccgcaacagcgggtccgccgaggcggccgagcggttcacccgcatcagccaggcctacgtcgtgctcggctccgccaccctgcggcgcaagtacgaccggggcctgctcagcgacgaggacctgcgcgggccgggcgtgcggccctcccgcacgcccgcccccgacccggggagcccccggaccccgccgcccacctcccgcacccacgacggcagccgggcgtcccccggggccaaccgcacgatgttcaacttcgacgccttctaccaggcccactacggcgagcagctggagcgggagcgccgcctccgggcccgccgggaggcgctgcgcaagcggcaggagtaccgcagcatgaagggcctgcggtgggaggacacccgcgacaccgccgccatcttcctcatcttctccatcttcatcatcatcgggttctacatctga

SEQ ID NO: 8293 - RNA, 681 nt, synthetic construct
  misc_feature 1..681: note = derived and/or modified sequence opt2 fromDJC30__Homo_sapiens__AAM62307
  source 1..681: mol_type = other RNA
atggccgccatgcgctggcgctggtggcagcgcctcctcccctggcgcctcctccaggcccgcggcttcccccagaactccgccccctccctcggcctcggcgcccgcacctactcccagggcgactgctcctactcccgcaccgccctctacgacctcctcggcgtcccctccaccgccacccaggcccagatcaaggccgcctactaccgccagtgcttcctctaccaccccgaccgcaactccggctccgccgaggccgccgagcgcttcacccgcatctcccaggcctacgtcgtcctcggctccgccaccctccgccgcaagtacgaccgcggcctcctctccgacgaggacctccgcggccccggcgtccgcccctcccgcacccccgcccccgaccccggctccccccgcacccccccccccacctcccgcacccacgacggctcccgcgcctcccccggcgccaaccgcaccatgttcaacttcgacgccttctaccaggcccactacggcgagcagctcgagcgcgagcgccgcctccgcgcccgccgcgaggccctccgcaagcgccaggagtaccgctccatgaagggcctccgctgggaggacacccgcgacaccgccgccatcttcctcatcttctccatcttcatcatcatcggcttctacatctga

SEQ ID NO: 8294 - RNA, 681 nt, synthetic construct
  misc_feature 1..681: note = derived and/or modified sequence opt3 fromDJC30__Homo_sapiens__AAM62307
  source 1..681: mol_type = other RNA
atggccgctatgagatggaggtggtggcagcggctgctcccctggcgccttctgcaagcacgaggcttccctcagaacagcgccccatccttggggttaggagcgcgtacctactctcagggtgactgctcatatagtagaacagctctgtacgatctactcggcgtgccgagcactgccacgcaggcacaaatcaaggccgcttattacaggcagtgttttctgtatcaccccgaccgcaattccgggtctgcagaggccgctgaacggttcaccagaatttcgcaggcctacgtcgttcttggatcagcgacactgaggcggaaatatgatcgcggcttgctcagcgacgaggatctgcgaggtcctggggtgagaccaagtaggactcccgcacctgacccaggatctccccggacccctccaccgacatcccgtacccatgatggcagccgcgcctcccccggcgctaacagaactatgtttaatttcgacgccttttaccaggcacactacggggaacaactggagagggaacggcgactccgcgctagaagggaggccttacggaagcgccaggagtatagatcaatgaaaggactgaggtgggaagatacacgtgacaccgcggccatattccttatctttagtattttcatcattatcggtttttacatatga

SEQ ID NO: 8295 - RNA, 681 nt, synthetic construct
  misc_feature 1..681: note = derived and/or modified sequence opt4 fromDJC30__Homo_sapiens__AAM62307
  source 1..681: mol_type = other RNA
atggccgccatgagatggagatggtggcagagactgctgccctggagactgctgcaggccagaggcttcccccagaacagcgcccccagcctgggcctgggcgccagaacctacagccagggcgactgcagctacagcagaaccgccctgtacgacctgctgggcgtgcccagcaccgccacccaggcccagatcaaggccgcctactacagacagtgcttcctgtaccaccccgacagaaacagcggcagcgccgaggccgccgagagattcaccagaatcagccaggcctacgtggtgctgggcagcgccaccctgagaagaaagtacgacagaggcctgctgagcgacgaggacctgagaggccccggcgtgagacccagcagaacccccgcccccgaccccggcagccccagaacccccccccccaccagcagaacccacgacggcagcagagccagccccggcgccaacagaaccatgttcaacttcgacgccttctaccaggcccactacggcgagcagctggagagagagagaagactgagagccagaagagaggccctgagaaagagacaggagtacagaagcatgaagggcctgagatgggaggacaccagagacaccgccgccatcttcctgatcttcagcatcttcatcatcatcggcttctacatctga

SEQ ID NO: 8296 - RNA, 681 nt, synthetic construct
  misc_feature 1..681: note = derived and/or modified sequence opt5 fromDJC30__Homo_sapiens__AAM62307
  source 1..681: mol_type = other RNA
atggccgctatgagatggcggtggtggcagcgcctgctcccctggagactgcttcaagcccggggcttccctcagaacagcgcgccgtccctggggctcggagctcgcacctactctcagggcgactgcagctattccagaacagccctgtacgatcttctgggggtgccctctacggccacccaggctcaaatcaaggccgcttattaccggcagtgttttctctatcaccctgaccgcaatagcggatccgccgaggcggccgaaagattcacacggatttctcaggcttacgtcgttctgggcagcgccaccctgcgcagaaaatatgatcgggggctcctgtccgacgaggatcttcgcggacccggcgtgagacctagccggacacccgctcctgacccgggctctccccgcacccctccccctacatccagaacccatgatgggagccgggcctctcccggagcgaacagaacgatgtttaatttcgacgccttttaccaggctcactacggcgaacaactggagcgcgaacggagactccgcgcccggagagaggctctgcgcaagcggcaggagtatagatccatgaaagggcttcgctgggaagatacccgggacacagccgccatcttcctgatttttagcatcttcattatcatcggattttacatttga

SEQ ID NO: 8297 - protein, 409 aa, synthetic construct
  REGION 1..409: note = DNAJB12__Homo_sapiens__NP_001002762.2
MSSLRARLPATRRRVAQPFARPASPSLVPRSGSAMESNKDEAERCISIALKAIQSNQPDRALRFLEKAQRLYPTPRVRALIESLNQKPQTAGDQPPPTDTTHATHRKAGGTDAPSANGEAGGESTKGYTAEQVAAVKRVKQCKDYYEILGVSRGASDEDLKKAYRRLALKFHPDKNHAPGATEAFKAIGTAYAVLSNPEKRKQYDQFGDDKSQAARHGHGHGDFHRGFEADISPEDLFNMFFGGGFPSSNVHVYSNGRMRYTYQQRQDRRDNQGDGGLGVFVQLMPILILILVSALSQLMVSSPPYSLSPRPSVGHIHRRVTDHLGVVYYVGDTFSEEYTGSSLKTVERNVEDDYIANLRNNCWKEKQQKEGLLYRARYFGDTDMYHRAQKMGTPSCSRLSEVQASLHG

SEQ ID NO: 8298 - RNA, 1230 nt, synthetic construct
  misc_feature 1..1230: note = DNAJB12__Homo_sapiens__NM_001002762.2
  source 1..1230: mol_type = other RNA
atgtcatcactccgcgcccggctgcccgcgacgcgccggcgggtggcgcagcccttcgctcgcccggcctccccctccctggttccgcgttctggttccgccatggaatccaacaaggatgaagctgagcgctgtatcagcatcgccctcaaggccatccagagcaaccagcccgaccgggcgctccgcttcctggagaaggcacagcggctgtatccgacgccgcgagttcgcgccctgattgagtccctcaaccagaaaccacagactgccggtgaccaacccccacccacagacacaacccatgccacccacaggaaagcaggtgggaccgatgccccctcggccaacggtgaagctggaggagagagcaccaaaggctacactgcagaacaggttgcagctgtgaaaagggtcaagcaatgtaaagattactatgagatcctgggggtgagcagaggggcctcggatgaggacctgaagaaggcctaccgcagactggccctcaaattccacccagacaagaaccacgcacctggtgccactgaagccttcaaagccattggcacagcatatgcggtactcagcaacccggagaagaggaagcagtatgaccagttcggcgatgacaagagccaggcggcccggcacggccatgggcatggggatttccaccgtggctttgaggccgacatctcccctgaagacctcttcaacatgttctttggcggcggcttcccttctagtaacgtccacgtctacagcaacggccgcatgcgctatacctaccagcaaaggcaggaccgcagggacaaccagggtgatggcgggctaggggtgtttgtgcagctgatgcctatcctcatcctgattctcgtgtcagctctcagccagctcatggtctccagtccaccctacagtctgagtccaagaccgtccgtgggccacatccacaggcgagtcactgaccacctgggtgtcgtctactatgtgggagacactttctccgaagagtacacaggctccagcctcaaaacagtcgagcggaatgtggaagatgattatatcgccaacctccggaacaactgctggaaggagaagcagcagaaggaaggcttgctgtaccgggcacgctactttggcgacacagatatgtaccacagagcacagaagatgggcacccccagctgcagccgactgtcagaggtgcaggcctccctgcatggatag

SEQ ID NO: 8299 - RNA, 1230 nt, synthetic construct
  misc_feature 1..1230: note = derived and/or modified sequence opt1 fromDNAJB12__Homo_sapiens__NM_001002762.2
  source 1..1230: mol_type = other RNA
atgagctccctgcgcgcccggctccccgccacccgccggcgcgtggcgcagccgttcgcccggcccgccagcccctccctggtcccccgcagcggctccgccatggagagcaacaaggacgaggccgagcggtgcatctccatcgcgctgaaggccatccagagcaaccagccggaccgcgccctccggttcctggagaaggcccagcgcctgtaccccacgccccgggtgcgcgcgctcatcgagtccctgaaccagaagccccagaccgccggggaccagccgccgcccaccgacaccacccacgccacgcaccggaaggccggcgggaccgacgcccccagcgcgaacggcgaggccgggggcgagtccaccaagggctacaccgccgagcaggtcgccgccgtgaagcgcgtgaagcagtgcaaggactactacgagatcctgggggtgagccggggcgcgtccgacgaggacctcaagaaggcctaccgccggctggccctgaagttccaccccgacaagaaccacgcccccggggccacggaggcgttcaaggccatcggcaccgcctacgccgtcctcagcaaccccgagaagcgcaagcagtacgaccagttcggggacgacaagtcccaggccgcgcggcacggccacggccacggggacttccaccgcggcttcgaggccgacatcagccccgaggacctgttcaacatgttcttcgggggcggcttcccgtccagcaacgtgcacgtgtactccaacgggcggatgcgctacacctaccagcagcgccaggaccggcgcgacaaccagggcgacgggggcctgggggtcttcgtgcagctcatgcccatcctgatcctgatcctcgtgagcgccctgagccagctgatggtctccagcccgccctactccctcagcccccggccctccgtgggccacatccaccgccgggtgaccgaccacctgggcgtcgtgtactacgtgggggacacgttcagcgaggagtacaccggctccagcctgaagaccgtcgagcgcaacgtggaggacgactacatcgccaacctccggaacaactgctggaaggagaagcagcagaaggaggggctgctgtaccgcgcgcggtacttcggcgacaccgacatgtaccaccgcgcccagaagatggggacgccctcctgcagccggctctccgaggtgcaggccagcctgcacggctga

SEQ ID NO: 8300 - RNA, 1230 nt, synthetic construct
  misc_feature 1..1230: note = derived and/or modified sequence opt2 fromDNAJB12__Homo_sapiens__NM_001002762.2
  source 1..1230: mol_type = other RNA
atgtcctccctccgcgcccgcctccccgccacccgccgccgcgtcgcccagcccttcgcccgccccgcctccccctccctcgtcccccgctccggctccgccatggagtccaacaaggacgaggccgagcgctgcatctccatcgccctcaaggccatccagtccaaccagcccgaccgcgccctccgcttcctcgagaaggcccagcgcctctaccccaccccccgcgtccgcgccctcatcgagtccctcaaccagaagccccagaccgccggcgaccagcccccccccaccgacaccacccacgccacccaccgcaaggccggcggcaccgacgccccctccgccaacggcgaggccggcggcgagtccaccaagggctacaccgccgagcaggtcgccgccgtcaagcgcgtcaagcagtgcaaggactactacgagatcctcggcgtctcccgcggcgcctccgacgaggacctcaagaaggcctaccgccgcctcgccctcaagttccaccccgacaagaaccacgcccccggcgccaccgaggccttcaaggccatcggcaccgcctacgccgtcctctccaaccccgagaagcgcaagcagtacgaccagttcggcgacgacaagtcccaggccgcccgccacggccacggccacggcgacttccaccgcggcttcgaggccgacatctcccccgaggacctcttcaacatgttcttcggcggcggcttcccctcctccaacgtccacgtctactccaacggccgcatgcgctacacctaccagcagcgccaggaccgccgcgacaaccagggcgacggcggcctcggcgtcttcgtccagctcatgcccatcctcatcctcatcctcgtctccgccctctcccagctcatggtctcctcccccccctactccctctccccccgcccctccgtcggccacatccaccgccgcgtcaccgaccacctcggcgtcgtctactacgtcggcgacaccttctccgaggagtacaccggctcctccctcaagaccgtcgagcgcaacgtcgaggacgactacatcgccaacctccgcaacaactgctggaaggagaagcagcagaaggagggcctcctctaccgcgcccgctacttcggcgacaccgacatgtaccaccgcgcccagaagatgggcaccccctcctgctcccgcctctccgaggtccaggcctccctccacggctga

SEQ ID NO: 8301 - RNA, 1230 nt, synthetic construct
  misc_feature 1..1230: note = derived and/or modified sequence opt3 fromDNAJB12__Homo_sapiens__NM_001002762.2
  source 1..1230: mol_type = other RNA
atgagctccctgagagccaggctccccgctacccggcgccgagtggcacagcctttcgcccgtccagcgtctccgtcacttgtccccagaagtggcagcgctatggagtccaacaaggacgaagccgagaggtgcatctctattgcactgaaagccatacaatcgaatcagcctgatcgggctttgcgctttttagaaaaggcacagagactgtacccaacacccagggttcgggccctaatcgagtcactcaaccagaaacctcaaactgctggggaccagccaccccctacggataccacacacgccactcatcgcaaggcgggaggtaccgacgcaccaagcgccaatggcgaagctgggggagagagtacaaaaggctataccgccgagcaagtggcagctgtaaagcgagtgaagcagtgtaaagattactatgaaattctgggtgtctccagaggggcctctgacgaggatcttaagaaagcgtacaggcggctggccttgaagttccacccggacaaaaaccatgcacccggagctactgaagcctttaaggctatcggcacagcctatgcagtgctcagcaatcctgagaagcgtaaacaatacgatcagttcggcgacgataagtcccaggccgctcgccacgggcatggacacggtgactttcacagaggcttcgaggcggatatttcaccagaagacctgtttaacatgttctttgggggaggcttccccagtagcaatgttcatgtgtattctaacggtaggatgcggtacacctaccagcaacgacaggaccgcagagataatcagggggacggaggcctgggcgtctttgtgcaactcatgcctatcttaatactgatccttgtatccgcattgtcacagctgatggttagcagtccaccctattctctatccccgaggcctagcgtggggcacattcatcggcgcgtcacggatcacctcggagtggtgtactatgtcggtgacactttctcggaggaatacaccgggtcttccctgaaaacagttgagagaaacgtggaagatgactatatcgccaatcttaggaacaattgctggaaggagaaacagcagaaggagggcctgttgtaccgtgctcggtattttggagatactgacatgtaccaccgagcccagaaaatgggcaccccctcatgtagtagactcagcgaagtacaggcatccctgcatggttga

SEQ ID NO: 8302 - RNA, 1230 nt, synthetic construct
  misc_feature 1..1230: note = derived and/or modified sequence opt4 fromDNAJB12__Homo_sapiens__NM_001002762.2
  source 1..1230: mol_type = other RNA
atgagcagcctgagagccagactgcccgccaccagaagaagagtggcccagcccttcgccagacccgccagccccagcctggtgcccagaagcggcagcgccatggagagcaacaaggacgaggccgagagatgcatcagcatcgccctgaaggccatccagagcaaccagcccgacagagccctgagattcctggagaaggcccagagactgtaccccacccccagagtgagagccctgatcgagagcctgaaccagaagccccagaccgccggcgaccagcccccccccaccgacaccacccacgccacccacagaaaggccggcggcaccgacgcccccagcgccaacggcgaggccggcggcgagagcaccaagggctacaccgccgagcaggtggccgccgtgaagagagtgaagcagtgcaaggactactacgagatcctgggcgtgagcagaggcgccagcgacgaggacctgaagaaggcctacagaagactggccctgaagttccaccccgacaagaaccacgcccccggcgccaccgaggccttcaaggccatcggcaccgcctacgccgtgctgagcaaccccgagaagagaaagcagtacgaccagttcggcgacgacaagagccaggccgccagacacggccacggccacggcgacttccacagaggcttcgaggccgacatcagccccgaggacctgttcaacatgttcttcggcggcggcttccccagcagcaacgtgcacgtgtacagcaacggcagaatgagatacacctaccagcagagacaggacagaagagacaaccagggcgacggcggcctgggcgtgttcgtgcagctgatgcccatcctgatcctgatcctggtgagcgccctgagccagctgatggtgagcagccccccctacagcctgagccccagacccagcgtgggccacatccacagaagagtgaccgaccacctgggcgtggtgtactacgtgggcgacaccttcagcgaggagtacaccggcagcagcctgaagaccgtggagagaaacgtggaggacgactacatcgccaacctgagaaacaactgctggaaggagaagcagcagaaggagggcctgctgtacagagccagatacttcggcgacaccgacatgtaccacagagcccagaagatgggcacccccagctgcagcagactgagcgaggtgcaggccagcctgcacggctga

SEQ ID NO: 8303 - RNA, 1230 nt, synthetic construct
  misc_feature 1..1230: note = derived and/or modified sequence opt5 fromDNAJB12__Homo_sapiens__NM_001002762.2
  source 1..1230: mol_type = other RNA
atgagctccctgagagcccggctccccgctacccgcagacgggtggcccagcctttcgcgcgcccggcttctcccagcctggtccctagatccggctctgccatggagagcaacaaggacgaagccgagcggtgcatctccattgctcttaaagccatccaatctaatcagcccgatcgcgctctgagatttctcgaaaaggcccagcggctgtaccctacaccccgcgttagagcgcttattgagagcctgaaccagaaacctcaaacggccggggaccagccgccccctaccgatacaacccacgctacacatcggaaggccggaggcaccgacgctccctccgccaatggggaagcgggaggcgagagcacaaaagggtataccgccgagcaagtggctgccgtgaagcgcgtcaagcagtgtaaagattactatgaaatcctcggagtgtctagaggcgcttccgacgaggatctgaagaaagcctaccggcgcctggccctcaagttccaccctgacaaaaaccatgctcccggcgcgacggaagcctttaaggctattgggaccgcctatgccgttctgagcaatccggagaagagaaaacaatacgatcagttcggagacgataagtctcaggctgcccggcacggccatgggcacggagactttcacagaggcttcgaggcggatatctcccctgaagacctttttaacatgttctttgggggaggcttccccagctctaatgtgcatgtctattccaacggccgcatgcggtacacataccagcaaagacaggaccgccgggataatcagggggacggaggcctgggggtgtttgttcaactcatgcctatcctgattcttatcctggtgagcgctctctcccagctgatggtctctagccctccctattccctgagccccagaccgtctgtgggacacattcatcgccgggtgaccgatcacctcggcgtcgtttactatgtgggggacacattctccgaggaatacaccggaagctctctgaaaacggtggagagaaacgtcgaagatgactatatcgccaatcttcgcaacaattgctggaaggagaaacagcagaaggagggcctgctctaccgggccagatattttggcgatacagacatgtaccaccgcgctcagaaaatggggacccccagctgttcccggctgtctgaagtgcaggccagccttcatggatga

SEQ ID NO: 8304 - protein, 559 aa, synthetic construct
  REGION 1..559: note = DNAJC11__Homo_sapiens__Q9NVH1
MATALSEEELDNEDYYSLLNVRREASSEELKAAYRRLCMLYHPDKHRDPELKSQAERLFNLVHQAYEVLSDPQTRAIYDIYGKRGLEMEGWEVVERRRTPAEIREEFERLQREREERRLQQRTNPKGTISVGVDATDLFDRYDEEYEDVSGSSFPQIEINKMHISQSIEAPLTATDTAILSGSLSTQNGNGGGSINFALRRVTSAKGWGELEFGAGDLQGPLFGLKLFRNLTPRCFVTTNCALQFSSRGIRPGLTTVLARNLDKNTVGYLQWRWGIQSAMNTSIVRDTKTSHFTVALQLGIPHSFALISYQHKFQDDDQTRVKGSLKAGFFGTVVEYGAERKISRHSVLGAAVSVGVPQGVSLKVKLNRASQTYFFPIHLTDQLLPSAMFYATVGPLVVYFAMHRLIIKPYLRAQKEKELEKQRESAATDVLQKKQEAESAVRLMQESVRRIIEAEESRMGLIIVNAWYGKFVNDKSRKSEKVKVIDVTVPLQCLVKDSKLILTEASKAGLPGFYDPCVGEEKNLKVLYQFRGVLHQVMVLDSEALRIPKQSHRIDTDG

SEQ ID NO: 8305 - RNA, 1680 nt, synthetic construct
  misc_feature 1..1680: note = DNAJC11__Homo_sapiens__CCDS87.1
  source 1..1680: mol_type = other RNA
atggcgacggccttgagcgaggaggagctggacaatgaagactattactcgttgctgaacgtgcgcagggaggcctcttctgaagagctgaaagctgcctaccggaggctctgtatgctctaccatccagacaagcacagagacccagagctcaagtcacaggcggaacgactgtttaaccttgttcaccaggcttatgaagtgcttagtgacccccaaaccagggccatctatgatatatatgggaagagaggactggaaatggaaggatgggaggttgtggaaaggaggagaacccctgctgaaattcgagaggagtttgagcggctgcagagagagagagaagagaggagattgcagcagcgaaccaatcccaagggaacgatcagcgttggagtagatgccaccgacctttttgatcgctatgatgaggagtatgaagatgtgtccggcagtagctttccgcagattgaaattaataaaatgcacatatcccagtccattgaggcacccttgacagcgacagacacagccatcctctctggaagcctctcaacccagaatggaaatggaggaggttccattaactttgcgctcagacgagtaacttcggcaaagggatggggagagttggaatttggagctggagacctacaggggcctttgttcggtctcaagctgttccgtaatctcacaccaagatgctttgtgacaacaaactgtgctctgcagttttcatcccgtggaatccgacccggcctgaccactgtcctagctcggaacctagacaagaacaccgtgggctacctgcagtggcgatggggtatccagtcagccatgaacactagcatcgtccgagacactaaaaccagccacttcactgtggccctgcagctgggaatccctcactcctttgcactgatcagctatcagcacaaattccaagatgacgatcagactcgtgtgaaaggatccctcaaagcaggcttctttgggacggtggtggagtacggagctgagaggaagatctccaggcacagcgttttgggtgcagctgtcagcgttggagttccacagggtgtttctctcaaagtcaagctcaacagggccagtcagacatacttcttccctattcacttgacggaccagcttctgcccagcgccatgttctatgccaccgtggggcctctagtggtctactttgccatgcaccgtctgatcatcaaaccatacctcagggctcagaaagagaaggaattggagaagcagagggaaagcgccgccaccgatgtgctgcagaagaagcaagaggcggagtccgctgtccggctgatgcaggaatctgtccgaaggataattgaggcagaagagtccagaatgggcctcatcatcgtcaatgcctggtacgggaagtttgtcaatgacaagagcaggaagagcgagaaggtgaaggtgattgacgtgactgtgcccctgcagtgcctggtgaaggactcgaagctcatcctcacggaggcctccaaggctgggctgcctggcttttatgacccgtgtgtgggggaagagaagaacctgaaagtgctctatcagttccggggcgtcctgcatcaggtgatggtgctggacagtgaggccctccggataccaaagcagtcccacaggatcgatacagatggataa

SEQ ID NO: 8306 - RNA, 1680 nt, synthetic construct
  misc_feature 1..1680: note = derived and/or modified sequence opt1 fromDNAJC11__Homo_sapiens__CCDS87.1
  source 1..1680: mol_type = other RNA
atggccaccgccctgagcgaggaggagctcgacaacgaggactactactccctgctgaacgtgcgccgggaggcgagctccgaggagctcaaggccgcctaccgccggctgtgcatgctgtaccaccccgacaagcaccgcgacccggagctcaagagccaggccgagcggctgttcaacctggtccaccaggcctacgaggtgctctccgacccccagacccgcgcgatctacgacatctacggcaagcgggggctggagatggagggctgggaggtggtcgagcgccggcgcacgcccgccgagatccgggaggagttcgagcgcctgcagcgggagcgcgaggagcggcgcctccagcagcggaccaaccccaaggggaccatcagcgtgggcgtggacgccaccgacctgttcgaccgctacgacgaggagtacgaggacgtctccgggagctccttcccgcagatcgagatcaacaagatgcacatcagccagtccatcgaggcgcccctgacggccaccgacaccgccatcctcagcggctccctgagcacccagaacggcaacgggggcgggtccatcaacttcgccctgcggcgcgtgacgagcgccaagggctggggcgagctcgagttcggggccggcgacctgcaggggcccctgttcggcctcaagctgttccggaacctgacgccccgctgcttcgtgaccaccaactgcgcgctccagttctccagccgcgggatccggccgggcctgaccaccgtcctggcccgcaacctcgacaagaacaccgtgggctacctgcagtggcggtgggggatccagtccgccatgaacaccagcatcgtgcgcgacacgaagaccagccacttcaccgtcgccctgcagctcggcatcccccactccttcgccctgatcagctaccagcacaagttccaggacgacgaccagacccgggtgaaggggtccctgaaggcgggcttcttcgggacggtggtcgagtacggcgccgagcgcaagatcagccggcactccgtgctcggcgccgccgtgagcgtcggggtgccccagggcgtgtccctgaaggtcaagctgaaccgcgccagccagacctacttcttccccatccacctcaccgaccagctgctgccgtccgcgatgttctacgccaccgtggggcccctcgtggtctacttcgccatgcaccggctgatcatcaagccctacctgcgcgcccagaaggagaaggagctcgagaagcagcgggagagcgccgcgacggacgtgctgcagaagaagcaggaggccgagtccgccgtccgcctgatgcaggagagcgtgcggcgcatcatcgaggccgaggagtcccggatgggcctcatcatcgtgaacgcgtggtacgggaagttcgtcaacgacaagagccgcaagtccgagaaggtgaaggtgatcgacgtcaccgtgcccctgcagtgcctggtgaaggacagcaagctcatcctgaccgaggcctccaaggccggcctgccgggcttctacgacccctgcgtcggggaggagaagaacctgaaggtgctctaccagttccggggcgtgctgcaccaggtcatggtgctggacagcgaggccctccgcatccccaagcagtcccaccggatcgacaccgacgggtga

SEQ ID NO: 8307 - RNA, 1680 nt, synthetic construct
  misc_feature 1..1680: note = derived and/or modified sequence opt2 fromDNAJC11__Homo_sapiens__CCDS87.1
  source 1..1680: mol_type = other RNA
atggccaccgccctctccgaggaggagctcgacaacgaggactactactccctcctcaacgtccgccgcgaggcctcctccgaggagctcaaggccgcctaccgccgcctctgcatgctctaccaccccgacaagcaccgcgaccccgagctcaagtcccaggccgagcgcctcttcaacctcgtccaccaggcctacgaggtcctctccgacccccagacccgcgccatctacgacatctacggcaagcgcggcctcgagatggagggctgggaggtcgtcgagcgccgccgcacccccgccgagatccgcgaggagttcgagcgcctccagcgcgagcgcgaggagcgccgcctccagcagcgcaccaaccccaagggcaccatctccgtcggcgtcgacgccaccgacctcttcgaccgctacgacgaggagtacgaggacgtctccggctcctccttcccccagatcgagatcaacaagatgcacatctcccagtccatcgaggcccccctcaccgccaccgacaccgccatcctctccggctccctctccacccagaacggcaacggcggcggctccatcaacttcgccctccgccgcgtcacctccgccaagggctggggcgagctcgagttcggcgccggcgacctccagggccccctcttcggcctcaagctcttccgcaacctcaccccccgctgcttcgtcaccaccaactgcgccctccagttctcctcccgcggcatccgccccggcctcaccaccgtcctcgcccgcaacctcgacaagaacaccgtcggctacctccagtggcgctggggcatccagtccgccatgaacacctccatcgtccgcgacaccaagacctcccacttcaccgtcgccctccagctcggcatcccccactccttcgccctcatctcctaccagcacaagttccaggacgacgaccagacccgcgtcaagggctccctcaaggccggcttcttcggcaccgtcgtcgagtacggcgccgagcgcaagatctcccgccactccgtcctcggcgccgccgtctccgtcggcgtcccccagggcgtctccctcaaggtcaagctcaaccgcgcctcccagacctacttcttccccatccacctcaccgaccagctcctcccctccgccatgttctacgccaccgtcggccccctcgtcgtctacttcgccatgcaccgcctcatcatcaagccctacctccgcgcccagaaggagaaggagctcgagaagcagcgcgagtccgccgccaccgacgtcctccagaagaagcaggaggccgagtccgccgtccgcctcatgcaggagtccgtccgccgcatcatcgaggccgaggagtcccgcatgggcctcatcatcgtcaacgcctggtacggcaagttcgtcaacgacaagtcccgcaagtccgagaaggtcaaggtcatcgacgtcaccgtccccctccagtgcctcgtcaaggactccaagctcatcctcaccgaggcctccaaggccggcctccccggcttctacgacccctgcgtcggcgaggagaagaacctcaaggtcctctaccagttccgcggcgtcctccaccaggtcatggtcctcgactccgaggccctccgcatccccaagcagtcccaccgcatcgacaccgacggctga

SEQ ID NO: 8308 - RNA, 1680 nt, synthetic construct
  misc_feature 1..1680: note = derived and/or modified sequence opt3 fromDNAJC11__Homo_sapiens__CCDS87.1
  source 1..1680: mol_type = other RNA
atggccaccgctctgagcgaggaggaactcgacaacgaagattactattcccttctgaatgtgagaagggaggcatcttcagaagagttgaaggccgcgtaccggcgcttatgcatgctgtatcaccccgacaaacatcgagatcctgagctaaagagtcaggctgaacgtctcttcaacctggtccaccaagcctacgaggttcttagcgacccacagacaagagcaatctatgatatttacggcaaaagggggctggaaatggagggatgggaggtggtagaacggcgcagaactccggccgagataagggaagagtttgaacggttgcagcgcgagcgagaggaaagaaggctccagcaacggacgaatcccaagggtaccatctccgtgggcgtcgacgctacagatctgttcgaccgttatgatgaggaatacgaggacgtgtctgggtcgtcatttcctcagattgaaatcaacaaaatgcatattagccagagtatcgaggcaccactgactgccaccgatacagctatactctccggatctttaagcacccagaatggcaacggtgggggatccatcaatttcgccctgcgcagagttacttcagcgaagggctggggcgagcttgaatttggggcaggagacttgcaaggtcccctgttcggcctaaagctctttaggaacctgacacctcggtgtttcgtgaccacgaattgcgcccttcagtttagtagccgagggattcgcccaggactgactaccgtcttggctagaaacctcgataaaaatacagtgggctacctgcagtggaggtggggtatccagtctgccatgaacacttccattgtacgggacaccaagacatcacacttcaccgttgcattacaactggggatcccccatagctttgctctcataagttatcagcacaaattccaggacgatgaccaaacgcgcgtgaagggatctcttaaagccggctttttcggcactgtcgtggagtacggggcggaaagaaagatttccaggcacagcgtgctgggagccgcagtctcggttggtgtgcctcagggcgtatctttgaaggtgaaactaaatcgtgcttcccagacatatttctttccaatccatctgaccgatcagctcctgccgtcagccatgttctacgctactgtcgggccccttgtggtttattttgccatgcaccggctgattatcaagccttacttgcgagcacaaaaagagaaggaactcgagaaacagagagagagtgccgctacagacgtgctgcagaagaaacaggaagcggagagcgcagtcaggttaatgcaagaatccgtgcgccggatcattgaggccgaggaatctagaatgggactgataatcgtaaacgcttggtatggcaagttcgttaatgataagagcaggaaatcagagaaggtgaaagtcattgacgtgaccgtcccactacagtgtctcgtgaaggatagtaaactgatccttacggaagcctccaaggcaggtttgcccgggttttacgacccttgcgttggcgaggaaaagaacctgaaagtgctctaccagttccgcggagtactgcatcaggtcatggtgcttgatagcgaggccctgcgaataccaaagcaatctcaccggattgacaccgatggctga

SEQ ID NO: 8309 - RNA, 1680 nt, synthetic construct
  misc_feature 1..1680: note = derived and/or modified sequence opt4 fromDNAJC11__Homo_sapiens__CCDS87.1
  source 1..1680: mol_type = other RNA
atggccaccgccctgagcgaggaggagctggacaacgaggactactacagcctgctgaacgtgagaagagaggccagcagcgaggagctgaaggccgcctacagaagactgtgcatgctgtaccaccccgacaagcacagagaccccgagctgaagagccaggccgagagactgttcaacctggtgcaccaggcctacgaggtgctgagcgacccccagaccagagccatctacgacatctacggcaagagaggcctggagatggagggctgggaggtggtggagagaagaagaacccccgccgagatcagagaggagttcgagagactgcagagagagagagaggagagaagactgcagcagagaaccaaccccaagggcaccatcagcgtgggcgtggacgccaccgacctgttcgacagatacgacgaggagtacgaggacgtgagcggcagcagcttcccccagatcgagatcaacaagatgcacatcagccagagcatcgaggcccccctgaccgccaccgacaccgccatcctgagcggcagcctgagcacccagaacggcaacggcggcggcagcatcaacttcgccctgagaagagtgaccagcgccaagggctggggcgagctggagttcggcgccggcgacctgcagggccccctgttcggcctgaagctgttcagaaacctgacccccagatgcttcgtgaccaccaactgcgccctgcagttcagcagcagaggcatcagacccggcctgaccaccgtgctggccagaaacctggacaagaacaccgtgggctacctgcagtggagatggggcatccagagcgccatgaacaccagcatcgtgagagacaccaagaccagccacttcaccgtggccctgcagctgggcatcccccacagcttcgccctgatcagctaccagcacaagttccaggacgacgaccagaccagagtgaagggcagcctgaaggccggcttcttcggcaccgtggtggagtacggcgccgagagaaagatcagcagacacagcgtgctgggcgccgccgtgagcgtgggcgtgccccagggcgtgagcctgaaggtgaagctgaacagagccagccagacctacttcttccccatccacctgaccgaccagctgctgcccagcgccatgttctacgccaccgtgggccccctggtggtgtacttcgccatgcacagactgatcatcaagccctacctgagagcccagaaggagaaggagctggagaagcagagagagagcgccgccaccgacgtgctgcagaagaagcaggaggccgagagcgccgtgagactgatgcaggagagcgtgagaagaatcatcgaggccgaggagagcagaatgggcctgatcatcgtgaacgcctggtacggcaagttcgtgaacgacaagagcagaaagagcgagaaggtgaaggtgatcgacgtgaccgtgcccctgcagtgcctggtgaaggacagcaagctgatcctgaccgaggccagcaaggccggcctgcccggcttctacgacccctgcgtgggcgaggagaagaacctgaaggtgctgtaccagttcagaggcgtgctgcaccaggtgatggtgctggacagcgaggccctgagaatccccaagcagagccacagaatcgacaccgacggctga

SEQ ID NO: 8310 - RNA, 1680 nt, synthetic construct
  misc_feature 1..1680: note = derived and/or modified sequence opt5 fromDNAJC11__Homo_sapiens__CCDS87.1
  source 1..1680: mol_type = other RNA
atggccaccgctctgagcgaggaagaactcgacaacgaagattactattccctgcttaatgtgagacgggaggcctctagcgaggagctgaaggcggcttaccgcagactctgcatgctgtatcaccccgacaaacatcgggatcctgagcttaagtcccaggccgaacgcctgttcaacctcgtccaccaagcctacgaggttctgtctgacccgcagacaagagctatctatgatatttacggcaaacgggggctggaaatggagggatgggaggtggtggaacgcagacggacgcccgccgagatccgcgaagagtttgaaagactccagcgggagcgcgaggaaagacggctgcagcaacgcaccaatcctaagggcacaattagcgtcggggtggacgctaccgatcttttcgacagatatgatgaggaatacgaggacgtttccggatctagctttccccagatcgaaattaacaaaatgcatatctcccagagcatcgaggcccctctgacagcgaccgatacagccattctctctggctccctgagcacccagaatgggaacggaggcggctctatcaatttcgcccttcggagagtgacgtccgctaaggggtggggagagctggaatttggcgctggggacctccaaggacccctgttcggcctgaagctctttcgcaacctgacccctcggtgtttcgtcacaaccaattgcgcccttcagtttagctctagagggattcgcccgggactgacaaccgtgctcgcgcggaacctggataaaaatacggttggctaccttcagtggagatggggcatccagtccgccatgaacacaagcattgtgcgcgacaccaagacatcccacttcaccgtcgctctgcaactcgggatcccccattcttttgccctgattagctatcagcacaaattccaggacgatgaccaaacccgggtgaagggatccctgaaagctggctttttcgggacagtggtcgagtacggagccgaaagaaagatcagccgccactctgttctcggcgccgctgtgtccgtgggggtccctcagggagtgagcctgaaggttaaacttaatcgggcgtctcagacgtatttctttcccatccatctgaccgatcagctcctgcctagcgccatgttctacgctacagtgggcccccttgtcgtgtattttgccatgcacagactgattatcaagccgtacctccgcgcccaaaaagagaaggaactggagaaacagcgggagtccgctgccaccgacgttctgcagaagaaacaggaagcggagtctgctgtgagactcatgcaagaaagcgtccggcgcattatcgaggccgaggaatccagaatgggcctgattatcgtgaacgcctggtatgggaagttcgtcaatgataagagccggaaatctgagaaggtgaaagttatcgacgtgacagtccctcttcagtgtctggtgaaggattccaaactcattctgaccgaagctagcaaggccggactgcccggcttttacgacccttgcgttggggaggaaaagaaccttaaagtgctctaccagttcagaggagtcctgcatcaggtgatggtgctggattctgaggctctccgcatccccaagcaatcccaccggattgacacggatggctga

SEQ ID NO: 8311 - protein, 531 aa, synthetic construct
  REGION 1..531: note = DNAJC21__Homo_sapiens__Q5F1R6
MKCHYEALGVRRDASEEELKKAYRKLALKWHPDKNLDNAAEAAEQFKLIQAAYDVLSDPQERAWYDNHREALLKGGFDGEYQDDSLDLLRYFTVTCYSGYGDDEKGFYTVYRNVFEMIAKEELESVLEEEVDDFPTFGDSQSDYDTVVHPFYAYWQSFCTQKNFAWKEEYDTRQASNRWEKRAMEKENKKIRDKARKEKNELVRQLVAFIRKRDKRVQAHRKLVEEQNAEKARKAEEMRRQQKLKQAKLVEQYREQSWMTMANLEKELQEMEARYEKEFGDGSDENEMEEHELKDEEDGKDSDEAEDAELYDDLYCPACDKSFKTEKAMKNHEKSKKHREMVALLKQQLEEEEENFSRPQIDENPLDDNSEEEMEDAPKQKLSKKQKKKKQKPAQNYDDNFNVNGPGEGVKVDPEDTNLNQDSAKELEDSPQENVSVTEIIKPCDDPKSEAKSVPKPKGKKTKDMKKPVRVPAEPQTMSVLISCTTCHSEFPSRNKLFDHLKATGHARAPSSSSLNSATSSQSKKEKRKNR

SEQ ID NO: 8312 - RNA, 1596 nt, synthetic construct
  misc_feature 1..1596: note = DNAJC21__Homo_sapiens__CCDS34144.1
  source 1..1596: mol_type = other RNA
atgaagtgtcactatgaggcgctgggggtgcggcgcgacgccagcgaggaggagctcaagaaggcctatcggaagctggccctgaaatggcacccggataaaaatctggataatgccgcagaagcagctgaacaatttaaattaatccaagcagcatatgatgtgttgagtgaccctcaggaaagagcatggtatgataatcatagagaggccctacttaaaggtgggtttgatggcgaatatcaagatgacagcttagatttgctacgctatttcaccgttacctgttattctggttatggagatgatgaaaagggattttacacggtgtatcgtaatgtttttgaaatgattgccaaggaagaactagaatctgtgttagaggaagaggttgatgatttcccaacttttggagactcccagagtgactatgatacggtagtccatcctttctacgcttattggcagagtttctgcactcaaaagaattttgcatggaaggaagaatatgatacacgacaggcttcaaaccgctgggaaaaacgagccatggaaaaagaaaacaaaaagattcgggacaaagcaaggaaagagaagaatgagcttgtccgtcagctggtagctttcattcgtaaaagagataaaagagtgcaggcgcatcgaaaacttgtggaagaacagaatgcagagaaggcgaggaaagccgaagagatgaggcggcagcagaagctaaagcaggccaaactggtggagcagtacagagaacagagctggatgactatggccaatttggagaaagagctccaggagatggaggcacggtacgagaaggagtttggagatggatcggatgaaaatgaaatggaagaacatgaactcaaagatgaggaggatggtaaagacagtgatgaggccgaggacgctgagctctatgatgacctttactgcccagcatgtgacaaatcgttcaagacagaaaaggccatgaagaatcacgagaagtcaaagaagcatcgggaaatggtggccttgctaaaacaacagctggaggaggaagaagaaaatttttcaagacctcaaattgatgaaaatccattagatgacaattctgaggaagaaatggaagatgcaccaaaacaaaagctttctaaaaaacagaagaaaaagaaacagaaaccagcacagaattatgatgacaatttcaatgtaaatggacctggagaaggagtaaaggttgatccagaagatactaacttaaatcaagacagtgccaaagaattggaagatagtccccaggaaaatgtcagtgtcacagagatcattaaaccatgtgatgatccaaaaagtgaagctaaaagtgttcctaaacccaaaggaaagaaaaccaaagatatgaaaaaacctgtcagagtacctgctgaaccacaaacaatgagtgttcttatcagctgtacaacctgccatagtgaatttccatctcggaataaactttttgaccatctaaaggccacaggtcatgcaagagcaccttcatcatcgtctttaaacagcgcaacaagtagtcaaagcaagaaagagaaacgtaaaaacagatag

SEQ ID NO: 8313 - RNA, 1596 nt, synthetic construct
  misc_feature 1..1596: note = derived and/or modified sequence opt1 fromDNAJC21__Homo_sapiens__CCDS34144.1
  source 1..1596: mol_type = other RNA
atgaagtgccactacgaggccctgggcgtgcgccgggacgccagcgaggaggagctcaagaaggcgtaccgcaagctggccctgaagtggcaccccgacaagaacctcgacaacgccgccgaggccgcggagcagttcaagctgatccaggccgcctacgacgtcctgtccgacccgcaggagcgggcctggtacgacaaccaccgcgaggcgctcctgaagggcgggttcgacggggagtaccaggacgacagcctggacctcctgcggtacttcaccgtgacctgctactccggctacggggacgacgagaagggcttctacacggtgtaccgcaacgtcttcgagatgatcgccaaggaggagctggagagcgtgctcgaggaggaggtggacgacttccccaccttcggcgactcccagagcgactacgacaccgtcgtgcaccccttctacgcctactggcagtccttctgcacccagaagaacttcgcctggaaggaggagtacgacacgcggcaggccagcaaccgctgggagaagcgggcgatggagaaggagaacaagaagatccgcgacaaggcccggaaggagaagaacgagctggtgcgccagctggtcgccttcatccggaagcgcgacaagcgggtgcaggcccaccgcaagctcgtggaggagcagaacgccgagaaggcgcggaaggccgaggagatgcgccggcagcagaagctgaagcaggccaagctggtcgagcagtaccgcgagcagtcctggatgaccatggccaacctcgagaaggagctgcaggagatggaggcccggtacgagaaggagttcggggacggcagcgacgagaacgagatggaggagcacgagctgaaggacgaggaggacgggaaggactccgacgaggcggaggacgccgagctctacgacgacctgtactgccccgcctgcgacaagagcttcaagaccgagaaggccatgaagaaccacgagaagtccaagaagcaccgcgagatggtggccctgctcaagcagcagctggaggaggaggaggagaacttcagccgcccgcagatcgacgagaaccccctggacgacaactccgaggaggagatggaggacgcgcccaagcagaagctcagcaagaagcagaagaagaagaagcagaagcccgcccagaactacgacgacaacttcaacgtgaacggcccgggggagggcgtcaaggtggaccccgaggacaccaacctgaaccaggactccgccaaggagctggaggacagcccccaggagaacgtgtccgtcacggagatcatcaagccctgcgacgaccccaagagcgaggccaagagcgtgccgaagcccaagggcaagaagaccaaggacatgaagaagcccgtgcgggtcccggcggagccccagaccatgtccgtgctcatcagctgcaccacgtgccactccgagttccccagccgcaacaagctgttcgaccacctgaaggccaccgggcacgcccgggccccctccagctccagcctcaactccgccaccagctcccagagcaagaaggagaagcgcaagaaccggtga

SEQ ID NO: 8314 - RNA, 1596 nt, synthetic construct
  misc_feature 1..1596: note = derived and/or modified sequence opt2 fromDNAJC21__Homo_sapiens__CCDS34144.1
  source 1..1596: mol_type = other RNA
atgaagtgccactacgaggccctcggcgtccgccgcgacgcctccgaggaggagctcaagaaggcctaccgcaagctcgccctcaagtggcaccccgacaagaacctcgacaacgccgccgaggccgccgagcagttcaagctcatccaggccgcctacgacgtcctctccgacccccaggagcgcgcctggtacgacaaccaccgcgaggccctcctcaagggcggcttcgacggcgagtaccaggacgactccctcgacctcctccgctacttcaccgtcacctgctactccggctacggcgacgacgagaagggcttctacaccgtctaccgcaacgtcttcgagatgatcgccaaggaggagctcgagtccgtcctcgaggaggaggtcgacgacttccccaccttcggcgactcccagtccgactacgacaccgtcgtccaccccttctacgcctactggcagtccttctgcacccagaagaacttcgcctggaaggaggagtacgacacccgccaggcctccaaccgctgggagaagcgcgccatggagaaggagaacaagaagatccgcgacaaggcccgcaaggagaagaacgagctcgtccgccagctcgtcgccttcatccgcaagcgcgacaagcgcgtccaggcccaccgcaagctcgtcgaggagcagaacgccgagaaggcccgcaaggccgaggagatgcgccgccagcagaagctcaagcaggccaagctcgtcgagcagtaccgcgagcagtcctggatgaccatggccaacctcgagaaggagctccaggagatggaggcccgctacgagaaggagttcggcgacggctccgacgagaacgagatggaggagcacgagctcaaggacgaggaggacggcaaggactccgacgaggccgaggacgccgagctctacgacgacctctactgccccgcctgcgacaagtccttcaagaccgagaaggccatgaagaaccacgagaagtccaagaagcaccgcgagatggtcgccctcctcaagcagcagctcgaggaggaggaggagaacttctcccgcccccagatcgacgagaaccccctcgacgacaactccgaggaggagatggaggacgcccccaagcagaagctctccaagaagcagaagaagaagaagcagaagcccgcccagaactacgacgacaacttcaacgtcaacggccccggcgagggcgtcaaggtcgaccccgaggacaccaacctcaaccaggactccgccaaggagctcgaggactccccccaggagaacgtctccgtcaccgagatcatcaagccctgcgacgaccccaagtccgaggccaagtccgtccccaagcccaagggcaagaagaccaaggacatgaagaagcccgtccgcgtccccgccgagccccagaccatgtccgtcctcatctcctgcaccacctgccactccgagttcccctcccgcaacaagctcttcgaccacctcaaggccaccggccacgcccgcgccccctcctcctcctccctcaactccgccacctcctcccagtccaagaaggagaagcgcaagaaccgctga

SEQ ID NO: 8315 - RNA, 1596 nt, synthetic construct
  misc_feature 1..1596: note = derived and/or modified sequence opt3 fromDNAJC21__Homo_sapiens__CCDS34144.1
  source 1..1596: mol_type = other RNA
atgaagtgccactacgaggccctgggcgtgagaagggacgctagcgaagaggaactcaaaaaggcatatcggaaacttgccctgaagtggcatcccgataaaaacttggacaatgcggctgaggccgcagaacagttcaagttaatccaagccgcttacgatgtcctgtccgaccctcaggagcgcgcatggtatgataaccaccgagaggccctactcaaagggggatttgacggtgaataccaggatgactctctggatcttctgcgttatttcaccgttacatgttactcaggctatggggacgatgagaagggattttacactgtgtacagaaatgtattcgaaatgattgctaaggaggagttggaaagtgtgctcgaggaagaggtcgacgattttccaacgttcggcgacagccagtccgactatgataccgtggttcatccgttttacgcctattggcaatctttctgcacacagaaaaactttgcgtggaaggaagagtacgacactaggcaggcatcgaatcggtgggagaaacgcgccatggaaaaggagaacaagaaaataagagataaggctaggaaagaaaagaatgagctggtgcggcagctggtcgccttcatccgcaaacgagacaagagagtgcaagcacacaggaaactcgtagaagaacagaacgctgagaaggcccggaaggcggaagagatgcgtcgccagcagaaattaaagcaagccaaactggttgaacagtatagagagcagtcatggatgaccatggcaaatcttgaaaaggagttgcaagagatggaagctaggtacgagaaagaatttggtgatgggagcgacgagaacgagatggaggagcatgaactgaaggatgaggaagacggaaaggatagtgacgaggccgaggatgctgaactatatgacgacctctactgtcccgcctgcgataaatccttcaagacagagaaagcaatgaagaatcacgaaaaatctaagaagcaccgggagatggtggccctgcttaaacagcagctggaagaggaggaagagaactttagccgacctcagattgacgaaaatccattggatgacaactccgaggaagagatggaggatgctcccaagcaaaaactctcaaagaaacagaagaagaaaaagcagaaacctgcgcagaattacgacgataacttcaacgtcaatggcccaggcgaaggggtgaaggtggaccccgaggataccaacctgaatcaagacagtgcaaaagaattagaggatagccctcaggagaacgtctctgttactgaaatcattaagccatgtgacgatccgaaatccgaggccaagtcagtgcccaagcctaaaggaaagaaaacaaaggacatgaaaaagccagtacgcgtgcccgctgaacctcagaccatgagcgtcctgatcagttgcacgacttgtcattctgagttcccatccagaaataagctctttgaccaccttaaagccaccggtcatgcaagggcccccagctcgtcttccctgaactcagctacaagtagccagtccaagaaagaaaagcggaaaaatcgctga

SEQ ID NO: 8316 - RNA, 1596 nt, synthetic construct
  misc_feature 1..1596: note = derived and/or modified sequence opt4 fromDNAJC21__Homo_sapiens__CCDS34144.1
  source 1..1596: mol_type = other RNA
atgaagtgccactacgaggccctgggcgtgagaagagacgccagcgaggaggagctgaagaaggcctacagaaagctggccctgaagtggcaccccgacaagaacctggacaacgccgccgaggccgccgagcagttcaagctgatccaggccgcctacgacgtgctgagcgacccccaggagagagcctggtacgacaaccacagagaggccctgctgaagggcggcttcgacggcgagtaccaggacgacagcctggacctgctgagatacttcaccgtgacctgctacagcggctacggcgacgacgagaagggcttctacaccgtgtacagaaacgtgttcgagatgatcgccaaggaggagctggagagcgtgctggaggaggaggtggacgacttccccaccttcggcgacagccagagcgactacgacaccgtggtgcaccccttctacgcctactggcagagcttctgcacccagaagaacttcgcctggaaggaggagtacgacaccagacaggccagcaacagatgggagaagagagccatggagaaggagaacaagaagatcagagacaaggccagaaaggagaagaacgagctggtgagacagctggtggccttcatcagaaagagagacaagagagtgcaggcccacagaaagctggtggaggagcagaacgccgagaaggccagaaaggccgaggagatgagaagacagcagaagctgaagcaggccaagctggtggagcagtacagagagcagagctggatgaccatggccaacctggagaaggagctgcaggagatggaggccagatacgagaaggagttcggcgacggcagcgacgagaacgagatggaggagcacgagctgaaggacgaggaggacggcaaggacagcgacgaggccgaggacgccgagctgtacgacgacctgtactgccccgcctgcgacaagagcttcaagaccgagaaggccatgaagaaccacgagaagagcaagaagcacagagagatggtggccctgctgaagcagcagctggaggaggaggaggagaacttcagcagaccccagatcgacgagaaccccctggacgacaacagcgaggaggagatggaggacgcccccaagcagaagctgagcaagaagcagaagaagaagaagcagaagcccgcccagaactacgacgacaacttcaacgtgaacggccccggcgagggcgtgaaggtggaccccgaggacaccaacctgaaccaggacagcgccaaggagctggaggacagcccccaggagaacgtgagcgtgaccgagatcatcaagccctgcgacgaccccaagagcgaggccaagagcgtgcccaagcccaagggcaagaagaccaaggacatgaagaagcccgtgagagtgcccgccgagccccagaccatgagcgtgctgatcagctgcaccacctgccacagcgagttccccagcagaaacaagctgttcgaccacctgaaggccaccggccacgccagagcccccagcagcagcagcctgaacagcgccaccagcagccagagcaagaaggagaagagaaagaacagatga

SEQ ID NO: 8317 - RNA, 1596 nt, synthetic construct
  misc_feature 1..1596: note = derived and/or modified sequence opt5 fromDNAJC21__Homo_sapiens__CCDS34144.1
  source 1..1596: mol_type = other RNA
atgaagtgccactacgaggccctgggcgtgagacgggacgctagcgaagaggaactcaaaaaggcctatcgcaaactggcgcttaagtggcatcccgataaaaacctggacaatgctgccgaggccgctgaacagttcaagctcatccaagccgcttacgatgtcctgtccgaccctcaggagagagcctggtatgataaccaccgggaggcgcttctgaaagggggatttgacggcgaataccaggatgactctctcgatctgctgcgctatttcaccgttacatgttacagcgggtatggagacgatgagaagggcttttacacggtgtacagaaatgtgttcgaaatgattgccaaggaggagctcgaatccgtcctggaggaagaggtggacgattttccgaccttcggggactctcagagcgactatgatacagttgtgcatcccttttacgcttattggcaatccttctgcacccagaaaaactttgcctggaaggaagagtacgacacacggcaggcttctaatcgctgggagaaaagagccatggaaaaggagaacaagaaaatccgggataaggcgcgcaaagaaaagaatgagcttgtcagacagctggtggccttcattcggaaacgcgacaagagagttcaagctcaccggaaactcgtggaagaacagaacgccgagaaggctcgcaaggccgaagagatgagacggcagcagaaactgaagcaagccaaacttgtcgaacagtatagagagcagagctggatgaccatggctaatctggaaaaggagctccaagagatggaagcgcgctacgagaaagaatttggagatggctccgacgagaacgagatggaggagcatgaactgaaggatgaggaagacggcaaggatagcgacgaggccgaggatgctgaactgtatgacgacctctactgtcctgcctgcgataaatctttcaagacagagaaagccatgaagaatcacgaaaaatccaagaagcaccgggagatggtggctctgcttaaacagcagctggaagaggaggaagagaactttagcagaccccagatcgacgaaaatcctctcgatgacaactctgaggaagagatggaggatgcccccaagcaaaaactgtccaagaaacagaagaagaaaaagcagaaacctgcgcagaattacgacgataacttcaacgtgaatgggccgggagaaggcgtcaaggttgaccccgaggataccaaccttaatcaagacagcgctaaagaactggaggattctcctcaggagaacgtgtccgtgacggaaattatcaagccctgtgacgatcctaaaagcgaggccaagtccgtccccaagccgaaagggaagaaaaccaaggacatgaaaaagcctgtgcgcgttcccgccgaacctcagacaatgtctgtgctcatcagctgcaccacatgtcattccgagttccccagccggaataagctgtttgaccacctgaaagctaccggacatgccagagctccctcttccagctctctcaacagcgccacgtcctctcagagcaagaaagaaaagcgcaaaaatcggtga

SEQ ID NO: 8318 - protein, 397 aa, synthetic construct
  REGION 1..397: note = DNJA1__Homo_sapiens__P31689
MVKETTYYDVLGVKPNATQEELKKAYRKLALKYHPDKNPNEGEKFKQISQAYEVLSDAKKRELYDKGGEQAIKEGGAGGGFGSPMDIFDMFFGGGGRMQRERRGKNVVHQLSVTLEDLYNGATRKLALQKNVICDKCEGRGGKKGAVECCPNCRGTGMQIRIHQIGPGMVQQIQSVCMECQGHGERISPKDRCKSCNGRKIVREKKILEVHIDKGMKDGQKITFHGEGDQEPGLEPGDIIIVLDQKDHAVFTRRGEDLFMCMDIQLVEALCGFQKPISTLDNRTIVITSHPGQIVKHGDIKCVLNEGMPIYRRPYEKGRLIIEFKVNFPENGFLSPDKLSLLEKLLPERKEVEETDEMDQVELVDFDPNQERRRHYNGEAYEDDEHHPRGGVQCQTS

SEQ ID NO: 8319 - RNA, 1194 nt, synthetic construct
  misc_feature 1..1194: note = DNJA1__Homo_sapiens__AAC37517
  source 1..1194: mol_type = other RNA
atggtgaaagaaacaacttactacgatgttttgggggtcaaacccaatgctactcaggaagaattgaaaaaggcttataggaaactggccttgaagtaccatcctgataagaacccaaatgaaggagagaagtttaaacagatttctcaagcttacgaagttctctctgatgcaaagaaaagggaattatatgacaaaggaggagaacaggcaattaaagagggtggagcaggtggcggttttggctcccccatggacatctttgatatgttttttggaggaggaggaaggatgcagagagaaaggagaggtaaaaatgttgtacatcagctctcagtaaccctagaagacttatataatggtgcaacaagaaaactggctctgcaaaagaatgtgatttgtgacaaatgtgaaggtagaggaggtaagaaaggagcagtagagtgctgtcccaattgccgaggtactggaatgcaaataagaattcatcagataggacctggaatggttcagcaaattcagtctgtgtgcatggagtgccagggccatggggagcggatcagtcctaaagatagatgtaaaagctgcaacggaaggaagatagttcgagagaagaaaattttagaagttcatattgacaaaggcatgaaagatggccagaagataacattccatggtgaaggagaccaagaaccaggactggagccaggcgatattatcattgtgttagatcagaaggaccatgctgtttttactcgacgaggagaagaccttttcatgtgtatggacatacagctcgttgaagcactgtgtggcttccagaagccaatatctactcttgacaaccgaaccatcgtcatcacctctcatccaggtcagattgtcaagcatggagatatcaagtgtgtactaaatgaaggcatgccaatttatcgtagaccatatgaaaagggtcgcctaatcatcgaatttaaggtaaactttcctgagaatggctttctctctcctgataaactgtctttgctggaaaaactcctacccgagaggaaggaagtggaagagactgatgagatggaccaagtagaactggtggactttgatccaaatcaggaaagacggcgccactacaatggagaagcatatgaggatgatgaacatcatcccagaggtggtgttcagtgtcagacctcttaa

SEQ ID NO: 8320 - RNA, 1194 nt, synthetic construct
  misc_feature 1..1194: note = derived and/or modified sequence opt1 fromDNJA1__Homo_sapiens__AAC37517
  source 1..1194: mol_type = other RNA
atggtgaaggagaccacctactacgacgtcctgggcgtgaagcccaacgccacgcaggaggagctcaagaaggcctaccggaagctggcgctgaagtaccacccggacaagaaccccaacgagggggagaagttcaagcagatcagccaggcctacgaggtgctctccgacgccaagaagcgggagctgtacgacaagggcggggagcaggccatcaaggagggcggggccggcggcgggttcggcagccccatggacatcttcgacatgttcttcgggggcgggggccgcatgcagcgggagcgccggggcaagaacgtcgtgcaccagctgtccgtgaccctcgaggacctgtacaacggggcgacccgcaagctggccctccagaagaacgtcatctgcgacaagtgcgagggccgcgggggcaagaagggcgccgtggagtgctgccccaactgccgggggaccggcatgcagatccggatccaccagatcgggccgggcatggtgcagcagatccagagcgtctgcatggagtgccaggggcacggcgagcgcatctcccccaaggaccggtgcaagagctgcaacggccgcaagatcgtgcgggagaagaagatcctggaggtgcacatcgacaaggggatgaaggacggccagaagatcacgttccacggggagggcgaccaggagcccgggctggagcccggcgacatcatcatcgtcctcgaccagaaggaccacgccgtgttcacccgccggggcgaggacctgttcatgtgcatggacatccagctggtggaggcgctctgcgggttccagaagccgatctccaccctggacaaccgcaccatcgtcatcacgagccaccccggccagatcgtgaagcacggggacatcaagtgcgtgctgaacgagggcatgcccatctaccggcgcccctacgagaaggggcggctcatcatcgagttcaaggtcaacttcccggagaacggcttcctgtcccccgacaagctgagcctcctggagaagctgctccccgagcgcaaggaggtggaggagaccgacgagatggaccaggtggagctggtcgacttcgaccccaaccaggagcggcgccgccactacaacggcgaggcctacgaggacgacgagcaccacccgcgcgggggcgtgcagtgccagacctcctga

SEQ ID NO: 8321 - RNA, 1194 nt, synthetic construct
  misc_feature 1..1194: note = derived and/or modified sequence opt2 fromDNJA1__Homo_sapiens__AAC37517
  source 1..1194: mol_type = other RNA
atggtcaaggagaccacctactacgacgtcctcggcgtcaagcccaacgccacccaggaggagctcaagaaggcctaccgcaagctcgccctcaagtaccaccccgacaagaaccccaacgagggcgagaagttcaagcagatctcccaggcctacgaggtcctctccgacgccaagaagcgcgagctctacgacaagggcggcgagcaggccatcaaggagggcggcgccggcggcggcttcggctcccccatggacatcttcgacatgttcttcggcggcggcggccgcatgcagcgcgagcgccgcggcaagaacgtcgtccaccagctctccgtcaccctcgaggacctctacaacggcgccacccgcaagctcgccctccagaagaacgtcatctgcgacaagtgcgagggccgcggcggcaagaagggcgccgtcgagtgctgccccaactgccgcggcaccggcatgcagatccgcatccaccagatcggccccggcatggtccagcagatccagtccgtctgcatggagtgccagggccacggcgagcgcatctcccccaaggaccgctgcaagtcctgcaacggccgcaagatcgtccgcgagaagaagatcctcgaggtccacatcgacaagggcatgaaggacggccagaagatcaccttccacggcgagggcgaccaggagcccggcctcgagcccggcgacatcatcatcgtcctcgaccagaaggaccacgccgtcttcacccgccgcggcgaggacctcttcatgtgcatggacatccagctcgtcgaggccctctgcggcttccagaagcccatctccaccctcgacaaccgcaccatcgtcatcacctcccaccccggccagatcgtcaagcacggcgacatcaagtgcgtcctcaacgagggcatgcccatctaccgccgcccctacgagaagggccgcctcatcatcgagttcaaggtcaacttccccgagaacggcttcctctcccccgacaagctctccctcctcgagaagctcctccccgagcgcaaggaggtcgaggagaccgacgagatggaccaggtcgagctcgtcgacttcgaccccaaccaggagcgccgccgccactacaacggcgaggcctacgaggacgacgagcaccacccccgcggcggcgtccagtgccagacctcctga

SEQ ID NO: 8322 - RNA, 1194 nt, synthetic construct
  misc_feature 1..1194: note = derived and/or modified sequence opt3 fromDNJA1__Homo_sapiens__AAC37517
  source 1..1194: mol_type = other RNA
atggtgaaggagaccacatactatgacgtcctgggcgttaaacccaacgccactcaggaggaactcaagaaggcttacagaaaacttgcactgaaatatcaccctgataagaatccaaacgaaggggagaagttcaaacaaatcagccaggcctacgaagtgttgtccgacgcgaagaaaagggagttatatgataagggaggtgagcaggctattaaagaaggcggggccggaggcggttttgggtctccgatggacatattcgatatgtttttcggaggcggcgggcggatgcagcgcgagcgacgtggaaagaatgtagtgcatcaactgtcagtcacgctagaagacctctacaacggtgcaaccagaaagctggcccttcagaaaaatgtgatctgcgataagtgtgagggcaggggagggaaaaagggcgctgttgagtgctgtcccaactgccggggtacagggatgcagattcgcatccaccagattggacctggcatggtgcaacagatccagagtgtctgtatggaatgccagggccatggggagagaataagcccaaaagacaggtgtaagtcctgcaatggacggaaaatcgtgcgcgaaaagaagattctggaggtacacatcgataaaggtatgaaggacggccagaaaattacttttcatggggaaggagatcaagagcccggcttggagcctggtgacatcataattgttctcgatcagaaggaccacgcagtgttcacccgaagaggggaagacctgtttatgtgtatggatatccaactggtcgaggccctctgcggcttccagaaaccaatttctacattagacaacaggaccatcgtgatcacttcgcaccccggacagattgtgaagcatggcgatataaagtgtgtcctgaatgaagggatgcctatctatcggcgtccatacgagaaaggacgccttattatcgaatttaaggttaacttcccggagaatggctttttgtcacccgacaaactgagcctactcgagaagctgcttcctgaaagaaaagaggtggaagagacagatgaaatggaccaggtagagctggtggatttcgacccaaaccaagagaggcggcgacactacaatggtgaggcttatgaagatgacgaacatcacccccgcgggggagtccagtgccagaccagttga

SEQ ID NO: 8323 - RNA, 1194 nt, synthetic construct
  misc_feature 1..1194: note = derived and/or modified sequence opt4 fromDNJA1__Homo_sapiens__AAC37517
  source 1..1194: mol_type = other RNA
atggtgaaggagaccacctactacgacgtgctgggcgtgaagcccaacgccacccaggaggagctgaagaaggcctacagaaagctggccctgaagtaccaccccgacaagaaccccaacgagggcgagaagttcaagcagatcagccaggcctacgaggtgctgagcgacgccaagaagagagagctgtacgacaagggcggcgagcaggccatcaaggagggcggcgccggcggcggcttcggcagccccatggacatcttcgacatgttcttcggcggcggcggcagaatgcagagagagagaagaggcaagaacgtggtgcaccagctgagcgtgaccctggaggacctgtacaacggcgccaccagaaagctggccctgcagaagaacgtgatctgcgacaagtgcgagggcagaggcggcaagaagggcgccgtggagtgctgccccaactgcagaggcaccggcatgcagatcagaatccaccagatcggccccggcatggtgcagcagatccagagcgtgtgcatggagtgccagggccacggcgagagaatcagccccaaggacagatgcaagagctgcaacggcagaaagatcgtgagagagaagaagatcctggaggtgcacatcgacaagggcatgaaggacggccagaagatcaccttccacggcgagggcgaccaggagcccggcctggagcccggcgacatcatcatcgtgctggaccagaaggaccacgccgtgttcaccagaagaggcgaggacctgttcatgtgcatggacatccagctggtggaggccctgtgcggcttccagaagcccatcagcaccctggacaacagaaccatcgtgatcaccagccaccccggccagatcgtgaagcacggcgacatcaagtgcgtgctgaacgagggcatgcccatctacagaagaccctacgagaagggcagactgatcatcgagttcaaggtgaacttccccgagaacggcttcctgagccccgacaagctgagcctgctggagaagctgctgcccgagagaaaggaggtggaggagaccgacgagatggaccaggtggagctggtggacttcgaccccaaccaggagagaagaagacactacaacggcgaggcctacgaggacgacgagcaccaccccagaggcggcgtgcagtgccagaccagctga

SEQ ID NO: 8324 - RNA, 1194 nt, synthetic construct
  misc_feature 1..1194: note = derived and/or modified sequence opt5 fromDNJA1__Homo_sapiens__AAC37517
  source 1..1194: mol_type = other RNA
atggtgaaggagaccacatactatgacgtcctgggcgttaaacccaacgccacgcaggaggaactcaagaaggcttacagaaaactggcccttaaatatcaccctgataagaatccgaacgaaggggagaagttcaaacaaatcagccaggcgtacgaagtgctgtccgacgctaagaaacgggagctctatgataagggaggcgagcaggccattaaagaagggggagccggcgggggatttggctctcccatggacatcttcgatatgtttttcggcgggggaggccgcatgcagagagagcggcgcgggaagaatgtggtccatcaactgagcgtgacccttgaagacctgtacaacggagctacaagaaagctcgccctgcagaaaaatgttatttgcgataagtgtgagggcagagggggcaaaaagggagctgtggagtgctgtcctaactgccgcggcaccgggatgcagatccggattcaccagatcggacccggcatggtccaacagatccagtccgtgtgtatggaatgccaggggcatggagagcggatttctcctaaagaccgctgtaagagctgcaatggcagaaaaatcgttcgggaaaagaagattctggaggtgcacatcgataaagggatgaaggacggacagaaaattacatttcatggcgaaggcgatcaagagcccgggctcgagcctggagacatcattatcgtcctggatcagaaggaccacgccgtgttcacccgcagaggcgaagacctttttatgtgtatggatatccaactggtggaggcgctctgcgggttccagaaaccgatttccacactggacaaccggaccatcgtcattacgtctcaccccggacagatcgttaagcatggcgatattaagtgtgtgcttaatgaagggatgcctatctatcgcagaccctacgagaaaggccggctgatcattgaatttaaggtgaacttccctgagaatggatttctcagccccgacaaactgtccctgctcgagaagctgcttccggaaagaaaagaggtcgaagagaccgatgaaatggaccaggtggagctggttgatttcgaccctaaccaagagcgccggagacactacaatggcgaagcctatgaggatgacgaacatcacccccgcgggggagtgcagtgccagacaagctga

SEQ ID NO: 8325 - protein, 412 aa, synthetic construct
  REGION 1..412: note = DNJA2__Homo_sapiens__O60884
MANVADTKLYDILGVPPGASENELKKAYRKLAKEYHPDKNPNAGDKFKEISFAYEVLSNPEKRELYDRYGEQGLREGSGGGGGMDDIFSHIFGGGLFGFMGNQSRSRNGRRRGEDMMHPLKVSLEDLYNGKTTKLQLSKNVLCSACSGQGGKSGAVQKCSACRGRGVRIMIRQLAPGMVQQMQSVCSDCNGEGEVINEKDRCKKCEGKKVIKEVKILEVHVDKGMKHGQRITFTGEADQAPGVEPGDIVLLLQEKEHEVFQRDGNDLHMTYKIGLVEALCGFQFTFKHLDGRQIVVKYPPGKVIEPGCVRVVRGEGMPQYRNPFEKGDLYIKFDVQFPENNWINPDKLSELEDLLPSRPEVPNIIGETEEVELQEFDSTRGSGGGQRREAYNDSSDEESSSHHGPGVQCAHQ

SEQ ID NO: 8326 - RNA, 1239 nt, synthetic construct
  misc_feature 1..1239: note = DNJA2__Homo_sapiens__AAH13044
  source 1..1239: mol_type = other RNA
atggctaacgtggctgacacgaagctgtacgacatcctgggcgtcccgcccggcgccagcgagaacgagctgaagaaggcatacagaaagttagccaaggaatatcatcctgataagaatccaaatgcaggagacaaatttaaagaaataagttttgcatatgaagtactatcaaatcctgagaagcgtgagttatatgacagatacggagagcaaggtcttcgggaaggcagcggcggaggtggtggcatggatgatattttctctcacatttttggtgggggattgttcggcttcatgggcaatcagagtagaagtcgaaatggcagaagaagaggagaggacatgatgcatccactcaaagtatctttagaagatctgtataatggcaagacaaccaaactacaacttagcaagaatgtgctctgtagtgcatgcagtggccaaggcggaaagtctggagctgtccaaaagtgtagtgcttgtcgaggtcgaggtgtgcgcatcatgatcagacagctggctccagggatggtacaacagatgcagtctgtgtgctctgattgtaatggagaaggagaggtaattaatgaaaaagaccgctgtaaaaaatgtgaagggaagaaggtgattaaagaagtcaagattcttgaagtccacgtagacaaaggcatgaaacatggacagagaattacattcactggggaagcagaccaggccccaggagtggaacccggagacattgttcttttgctacaggagaaagaacatgaggtatttcagagagatgggaatgatttgcacatgacatataaaataggacttgttgaagctctatgtggatttcagttcacatttaagcaccttgatggacgtcagattgtggtgaaatacccccctggcaaagtaattgaaccagggtgtgttcgtgtagttcgaggtgaagggatgccgcagtatcgtaatccctttgaaaaaggtgatctttacataaagtttgatgtgcagtttcctgaaaacaactggatcaacccagacaagctttctgaactagaagatcttctgccatctagaccggaagttcctaacataattggagaaacagaggaggtagagcttcaggaatttgatagcactcgaggctcaggaggtggtcagaggcgtgaagcctataatgatagctctgatgaagaaagcagcagccatcatggacctggagtgcagtgtgcccatcagtaa

SEQ ID NO: 8327 - RNA, 1239 nt, synthetic construct
  misc_feature 1..1239: note = derived and/or modified sequence opt1 fromDNJA2__Homo_sapiens__AAH13044
  source 1..1239: mol_type = other RNA
atggccaacgtggccgacaccaagctgtacgacatcctcggcgtgcccccgggggcgagcgagaacgagctgaagaaggcctaccgcaagctggccaaggagtaccaccccgacaagaaccccaacgccggcgacaagttcaaggagatctccttcgcctacgaggtcctcagcaaccccgagaagcgggagctgtacgaccgctacggggagcagggcctgcgggaggggtccggcggcgggggcgggatggacgacatcttcagccacatcttcggcgggggcctcttcggcttcatggggaaccagtcccgcagccggaacggccgccggcgcggggaggacatgatgcacccgctgaaggtgtccctggaggacctctacaacggcaagaccacgaagctgcagctgagcaagaacgtcctctgctccgcgtgcagcggccagggcgggaagtccggggccgtgcagaagtgcagcgcctgccggggccgcggggtgcggatcatgatccgccagctggcccccggcatggtccagcagatgcagtccgtgtgcagcgactgcaacggcgagggggaggtgatcaacgagaaggaccggtgcaagaagtgcgagggcaagaaggtcatcaaggaggtgaagatcctggaggtgcacgtcgacaaggggatgaagcacggccagcgcatcaccttcaccggggaggcggaccaggcccccggcgtggagcccggcgacatcgtgctcctgctgcaggagaaggagcacgaggtcttccagcgggacgggaacgacctccacatgacctacaagatcggcctggtggaggccctgtgcgggttccagttcacgttcaagcacctcgacggccgccagatcgtggtcaagtacccgcccgggaaggtgatcgagcccggctgcgtgcgggtcgtgcgcggcgaggggatgccccagtaccggaacccgttcgagaagggcgacctgtacatcaagttcgacgtgcagttccccgagaacaactggatcaaccccgacaagctgtccgagctcgaggacctgctgcccagccgcccggaggtccccaacatcatcggggagaccgaggaggtggagctccaggagttcgactccacccggggcagcggcgggggccagcgccgcgaggcctacaacgactccagcgacgaggagagctccagccaccacgggcccggcgtccagtgcgcccaccagtga

SEQ ID NO: 8328 - RNA, 1239 nt, synthetic construct
  misc_feature 1..1239: note = derived and/or modified sequence opt2 fromDNJA2__Homo_sapiens__AAH13044
  source 1..1239: mol_type = other RNA
atggccaacgtcgccgacaccaagctctacgacatcctcggcgtcccccccggcgcctccgagaacgagctcaagaaggcctaccgcaagctcgccaaggagtaccaccccgacaagaaccccaacgccggcgacaagttcaaggagatctccttcgcctacgaggtcctctccaaccccgagaagcgcgagctctacgaccgctacggcgagcagggcctccgcgagggctccggcggcggcggcggcatggacgacatcttctcccacatcttcggcggcggcctcttcggcttcatgggcaaccagtcccgctcccgcaacggccgccgccgcggcgaggacatgatgcaccccctcaaggtctccctcgaggacctctacaacggcaagaccaccaagctccagctctccaagaacgtcctctgctccgcctgctccggccagggcggcaagtccggcgccgtccagaagtgctccgcctgccgcggccgcggcgtccgcatcatgatccgccagctcgcccccggcatggtccagcagatgcagtccgtctgctccgactgcaacggcgagggcgaggtcatcaacgagaaggaccgctgcaagaagtgcgagggcaagaaggtcatcaaggaggtcaagatcctcgaggtccacgtcgacaagggcatgaagcacggccagcgcatcaccttcaccggcgaggccgaccaggcccccggcgtcgagcccggcgacatcgtcctcctcctccaggagaaggagcacgaggtcttccagcgcgacggcaacgacctccacatgacctacaagatcggcctcgtcgaggccctctgcggcttccagttcaccttcaagcacctcgacggccgccagatcgtcgtcaagtacccccccggcaaggtcatcgagcccggctgcgtccgcgtcgtccgcggcgagggcatgccccagtaccgcaaccccttcgagaagggcgacctctacatcaagttcgacgtccagttccccgagaacaactggatcaaccccgacaagctctccgagctcgaggacctcctcccctcccgccccgaggtccccaacatcatcggcgagaccgaggaggtcgagctccaggagttcgactccacccgcggctccggcggcggccagcgccgcgaggcctacaacgactcctccgacgaggagtcctcctcccaccacggccccggcgtccagtgcgcccaccagtga

SEQ ID NO: 8329 - RNA, 1239 nt, synthetic construct
  misc_feature 1..1239: note = derived and/or modified sequence opt3 fromDNJA2__Homo_sapiens__AAH13044
  source 1..1239: mol_type = other RNA
atggccaacgtggctgacaccaagctgtacgatatcctcggcgttccccctggggcaagcgagaatgaacttaaaaaggcctatagaaaactggcgaaggagtaccacccagacaaaaacccgaatgctggagataagttcaaggaaatttcctttgcctatgaggtcttgtctaaccccgagaaaagggaattatacgaccggtatggtgagcagggcctgcgcgaagggtcaggaggcggtgggggaatggatgacatattcagtcatatctttggcggcgggctattcggatttatgggtaatcaaagccgatcccgtaacggcagaaggcgcggggaggatatgatgcaccctctcaaggtgtctctggaagacctttacaatggaaaaacaactaagctgcagttgtcgaaaaacgtactctgctcagcatgtagcggccagggtgggaagagtggagccgtgcagaagtgctccgcttgtcggggcagaggcgtcaggattatgatccggcaactggcaccagggatggtgcagcagatgcagtctgtttgcagcgattgtaatggagagggtgaggtgattaacgaaaaagaccgctgcaagaaatgtgagggcaagaaagtcatcaaggaagtgaaaatactggaggtacatgttgataaggggatgaagcacggacaacgaatcacgttcaccggcgaagccgaccaggctcccggtgtggagcctggggatattgtcctcttactgcaggagaaagaacatgaggtgtttcagagagacggcaatgaccttcacatgacatataagatcggattggtggaagccctgtgcggcttccaatttactttcaaacacctagatgggaggcagattgtcgttaagtacccacccggaaaagtgatcgagcctggttgtgtacgggtggtccgtggcgaagggatgccacagtaccgcaacccgtttgagaagggagacctctatataaagttcgatgtgcaatttcccgagaataactggattaatcctgacaaactgtccgaacttgaggatctgttgccatcaagacccgaagttcctaacatcattggcgagaccgaagaggtggagctccaggagttcgacagtacaaggggtagcgggggcggacagcggcgagaagcgtacaacgattcttccgacgaagagtcaagcagtcatcacggcccaggggtccagtgcgcacatcaatga

SEQ ID NO: 8330 - RNA, 1239 nt, synthetic construct
  misc_feature 1..1239: note = derived and/or modified sequence opt4 fromDNJA2__Homo_sapiens__AAH13044
  source 1..1239: mol_type = other RNA
atggccaacgtggccgacaccaagctgtacgacatcctgggcgtgccccccggcgccagcgagaacgagctgaagaaggcctacagaaagctggccaaggagtaccaccccgacaagaaccccaacgccggcgacaagttcaaggagatcagcttcgcctacgaggtgctgagcaaccccgagaagagagagctgtacgacagatacggcgagcagggcctgagagagggcagcggcggcggcggcggcatggacgacatcttcagccacatcttcggcggcggcctgttcggcttcatgggcaaccagagcagaagcagaaacggcagaagaagaggcgaggacatgatgcaccccctgaaggtgagcctggaggacctgtacaacggcaagaccaccaagctgcagctgagcaagaacgtgctgtgcagcgcctgcagcggccagggcggcaagagcggcgccgtgcagaagtgcagcgcctgcagaggcagaggcgtgagaatcatgatcagacagctggcccccggcatggtgcagcagatgcagagcgtgtgcagcgactgcaacggcgagggcgaggtgatcaacgagaaggacagatgcaagaagtgcgagggcaagaaggtgatcaaggaggtgaagatcctggaggtgcacgtggacaagggcatgaagcacggccagagaatcaccttcaccggcgaggccgaccaggcccccggcgtggagcccggcgacatcgtgctgctgctgcaggagaaggagcacgaggtgttccagagagacggcaacgacctgcacatgacctacaagatcggcctggtggaggccctgtgcggcttccagttcaccttcaagcacctggacggcagacagatcgtggtgaagtacccccccggcaaggtgatcgagcccggctgcgtgagagtggtgagaggcgagggcatgccccagtacagaaaccccttcgagaagggcgacctgtacatcaagttcgacgtgcagttccccgagaacaactggatcaaccccgacaagctgagcgagctggaggacctgctgcccagcagacccgaggtgcccaacatcatcggcgagaccgaggaggtggagctgcaggagttcgacagcaccagaggcagcggcggcggccagagaagagaggcctacaacgacagcagcgacgaggagagcagcagccaccacggccccggcgtgcagtgcgcccaccagtga

SEQ ID NO: 8331 - RNA, 1239 nt, synthetic construct
  misc_feature 1..1239: note = derived and/or modified sequence opt5 fromDNJA2__Homo_sapiens__AAH13044
  source 1..1239: mol_type = other RNA
atggccaacgtggctgacaccaagctgtacgatatcctcggcgttccccctggggccagcgagaatgaactgaaaaaggcgtatagaaaacttgctaaggagtaccacccggacaaaaaccccaatgccggagataagttcaaggaaatttcctttgcctatgaggtcctgtctaaccctgaaaaacgggagctctacgaccgctatggcgagcaggggctgagagaaggaagcggcgggggaggcggcatggatgacatcttctcccatatttttgggggaggccttttcgggtttatgggaaatcaatctcggagccgcaacggcagacggcgcggggaggatatgatgcaccccctgaaggtgtccctcgaagacctgtacaatggaaaaacaacgaagctgcagctctctaaaaacgtgctgtgcagcgcttgttccggccagggcggaaagagcggggccgtccagaagtgctctgcttgtagaggccgcggggtgcggatcatgattagacaacttgcccctggaatggttcagcagatgcagtccgtgtgcagcgattgtaatggcgagggggaggtcatcaacgaaaaagaccggtgcaagaaatgtgagggaaagaaagtgatcaaggaagttaaaattctggaggtgcatgtcgataagggcatgaagcacggccaacgcatcaccttcacaggggaagcggaccaggcccccggagtggagcctggcgatattgtgctcctgcttcaggagaaagaacatgaggtctttcagagagacgggaatgacctgcacatgacctataagatcggactcgttgaagctctgtgcggcttccaatttacattcaaacacctggatgggcggcagattgtggtgaagtacccgcccggcaaagtcatcgagcctggatgtgtgcgcgttgtgagaggcgaagggatgccccagtaccggaacccttttgagaagggagacctctatattaagttcgatgtccaatttcccgagaataactggatcaatccggacaaactgtctgaacttgaggatctgctcccttccagacccgaagtgcctaacatcattggcgagaccgaagaggttgagctgcaggagttcgacagcacacgcgggtctggaggcgggcagcggagagaagcctacaacgattccagcgacgaagagtcctctagccatcacggccccggagtgcagtgcgctcatcaatga

SEQ ID NO: 8332 - protein, 480 aa, synthetic construct
  REGION 1..480: note = DNJA3__Homo_sapiens__Q96EY1
MAARCSTRWLLVVVGTPRLPAISGRGARPPREGVVGAWLSRKLSVPAFASSLTSCGPRALLTLRPGVSLTGTKHNPFICTASFHTSAPLAKEDYYQILGVPRNASQKEIKKAYYQLAKKYHPDTNKDDPKAKEKFSQLAEAYEVLSDEVKRKQYDAYGSAGFDPGASGSQHSYWKGGPTVDPEELFRKIFGEFSSSSFGDFQTVFDQPQEYFMELTFNQAAKGVNKEFTVNIMDTCERCNGKGNEPGTKVQHCHYCGGSGMETINTGPFVMRSTCRRCGGRGSIIISPCVVCRGAGQAKQKKRVMIPVPAGVEDGQTVRMPVGKREIFITFRVQKSPVFRRDGADIHSDLFISIAQALLGGTARAQGLYETINVTIPPGTQTDQKIRMGGKGIPRINSYGYGDHYIHIKIRVPKRLTSRQQSLILSYAEDETDVEGTVNGVTLTSSGGSTMDSSAGSKARREAGEDEEGFLSKLKKMFTS

SEQ ID NO: 8333 - RNA, 1443 nt, synthetic construct
  misc_feature 1..1443: note = DNJA3__Homo_sapiens__AAC29066
  source 1..1443: mol_type = other RNA
atggctgcgcggtgctccacacgctggttgctggtggttgtggggaccccgcggctgccggctatatcgggtagaggggcccggccgcccagggagggcgtggtgggggcatggctgagccgcaagctgagcgtccccgcctttgcgtcttccctgacctcttgcggcccccgagcgctgctgacattgagacctggtgtcagccttacaggaacaaaacataaccctttcatttgtactgcctccttccacacgagtgcccctttggccaaagaagattattatcagatattaggagtgcctcgaaatgccagccagaaagagatcaagaaagcctattatcagcttgccaagaagtatcaccctgacacaaataaggatgatcccaaagccaaggagaagttctcccagctggcagaagcctatgaggttttgagtgatgaggtgaagaggaagcagtacgatgcctacggctctgcaggcttcgatcctggggccagcggctcccagcatagctactggaagggaggccccactgtggaccccgaggagctgttcaggaagatctttggcgagttctcatcctcttcatttggagatttccagaccgtgtttgatcagcctcaggaatacttcatggagttgacattcaatcaagctgcaaagggggtcaacaaggagttcaccgtgaacatcatggacacgtgtgagcgctgcaacggcaaggggaacgagcccggcaccaaggtgcagcattgccactactgtggcggctccggcatggaaaccatcaacacaggcccttttgtgatgcgttccacgtgtaggagatgtggtggccgcggctccatcatcatatcgccctgtgtggtctgcaggggagcaggacaagccaagcagaaaaagcgagtgatgatccctgtgcctgcaggagtcgaggatggccagaccgtgaggatgcctgtgggaaaaagggaaattttcattacgttcagggtgcagaaaagccctgtgttccggagggacggcgcagacatccactccgacctctttatttctatagctcaggctcttcttgggggaacagccagagcccagggcctgtacgagacgatcaacgtgacgatcccccctgggactcagacagaccagaagattcggatgggtgggaaaggcatcccccggattaacagctacggctacggagaccactacatccacatcaagatacgagttccaaagaggctaacgagccggcagcagagcctgatcctgagctacgccgaggacgagacagatgtggaggggacggtgaacggcgtcaccctcaccagctctggtggcagcaccatggatagctccgcaggaagcaaggctaggcgtgaggctggggaggacgaggagggattcctttccaaacttaagaaaatgtttacctcatga

SEQ ID NO: 8334 - RNA, 1443 nt, synthetic construct
  misc_feature 1..1443: note = derived and/or modified sequence opt1 fromDNJA3__Homo_sapiens__AAC29066
  source 1..1443: mol_type = other RNA
atggccgcccgctgcagcacccggtggctgctcgtggtcgtgggcacgccccgcctgccggcgatctccgggcggggcgcccgcccgccccgggagggggtggtcggcgcctggctgagccgcaagctctccgtgcccgccttcgccagctccctgaccagctgcgggccccgggcgctgctcaccctgcgccccggcgtgtccctgaccggcaccaagcacaaccccttcatctgcacggccagcttccacacctccgcgcccctcgccaaggaggactactaccagatcctgggggtcccgcggaacgccagccagaaggagatcaagaaggcctactaccagctggccaagaagtaccaccccgacaccaacaaggacgaccccaaggccaaggagaagttctcccagctcgccgaggcgtacgaggtgctgagcgacgaggtgaagcgcaagcagtacgacgcctacggctccgccgggttcgaccccggcgccagcgggtcccagcacagctactggaagggcggcccgaccgtcgaccccgaggagctgttccggaagatcttcggggagttctccagctccagcttcggcgacttccagacggtgttcgaccagccccaggagtacttcatggagctcaccttcaaccaggccgcgaagggggtgaacaaggagttcaccgtcaacatcatggacacgtgcgagcgctgcaacggcaagggcaacgagcccgggaccaaggtgcagcactgccactactgcggcgggagcggcatggagaccatcaacaccgggccgttcgtgatgcggtccacgtgccgccggtgcggcggccgcgggagcatcatcatctccccctgcgtcgtgtgccggggcgccgggcaggccaagcagaagaagcgcgtgatgatccccgtccccgccggcgtggaggacgggcagaccgtgcggatgccggtcggcaagcgcgagatcttcatcaccttccgggtgcagaagtcccccgtgttccgccgcgacggcgccgacatccacagcgacctgttcatcagcatcgcgcaggccctgctcgggggcaccgcccgggcccaggggctgtacgagaccatcaacgtcacgatcccgcccggcacccagaccgaccagaagatccgcatgggcgggaagggcatcccccggatcaactcctacgggtacggcgaccactacatccacatcaagatccgcgtgcccaagcggctgaccagccgccagcagtccctcatcctgagctacgccgaggacgagacggacgtcgaggggaccgtgaacggcgtgaccctgacctccagcggcgggtccacgatggacagctccgcgggcagcaaggcccggcgcgaggccggggaggacgaggagggcttcctctccaagctgaagaagatgttcaccagctga

SEQ ID NO: 8335 - RNA, 1443 nt, synthetic construct
  misc_feature 1..1443: note = derived and/or modified sequence opt2 fromDNJA3__Homo_sapiens__AAC29066
  source 1..1443: mol_type = other RNA
atggccgcccgctgctccacccgctggctcctcgtcgtcgtcggcaccccccgcctccccgccatctccggccgcggcgcccgccccccccgcgagggcgtcgtcggcgcctggctctcccgcaagctctccgtccccgccttcgcctcctccctcacctcctgcggcccccgcgccctcctcaccctccgccccggcgtctccctcaccggcaccaagcacaaccccttcatctgcaccgcctccttccacacctccgcccccctcgccaaggaggactactaccagatcctcggcgtcccccgcaacgcctcccagaaggagatcaagaaggcctactaccagctcgccaagaagtaccaccccgacaccaacaaggacgaccccaaggccaaggagaagttctcccagctcgccgaggcctacgaggtcctctccgacgaggtcaagcgcaagcagtacgacgcctacggctccgccggcttcgaccccggcgcctccggctcccagcactcctactggaagggcggccccaccgtcgaccccgaggagctcttccgcaagatcttcggcgagttctcctcctcctccttcggcgacttccagaccgtcttcgaccagccccaggagtacttcatggagctcaccttcaaccaggccgccaagggcgtcaacaaggagttcaccgtcaacatcatggacacctgcgagcgctgcaacggcaagggcaacgagcccggcaccaaggtccagcactgccactactgcggcggctccggcatggagaccatcaacaccggccccttcgtcatgcgctccacctgccgccgctgcggcggccgcggctccatcatcatctccccctgcgtcgtctgccgcggcgccggccaggccaagcagaagaagcgcgtcatgatccccgtccccgccggcgtcgaggacggccagaccgtccgcatgcccgtcggcaagcgcgagatcttcatcaccttccgcgtccagaagtcccccgtcttccgccgcgacggcgccgacatccactccgacctcttcatctccatcgcccaggccctcctcggcggcaccgcccgcgcccagggcctctacgagaccatcaacgtcaccatcccccccggcacccagaccgaccagaagatccgcatgggcggcaagggcatcccccgcatcaactcctacggctacggcgaccactacatccacatcaagatccgcgtccccaagcgcctcacctcccgccagcagtccctcatcctctcctacgccgaggacgagaccgacgtcgagggcaccgtcaacggcgtcaccctcacctcctccggcggctccaccatggactcctccgccggctccaaggcccgccgcgaggccggcgaggacgaggagggcttcctctccaagctcaagaagatgttcacctcctga

SEQ ID NO: 8336 - RNA, 1443 nt, synthetic construct
  misc_feature 1..1443: note = derived and/or modified sequence opt3 fromDNJA3__Homo_sapiens__AAC29066
  source 1..1443: mol_type = other RNA
atggccgctagatgcagcaccaggtggctgctcgtggtcgttggcacaccccggcttcctgcaatctccgggcgcggagcccgaccaccgcgtgagggtgtggtaggcgcgtggctgtctagaaagttgtcagtgcccgctttcgccagtagcttaacttcctgtgggcctagggcactgctaacgctccggccaggagtctctctgaccggcacaaaacacaacccctttatttgcactgcctcgttccatacctcagctcctcttgcaaaggaagactactatcagatactgggtgtgccacgcaatgccagccaaaaagagatcaagaaggcttactatcagttggccaagaagtaccaccccgatacaaacaaagacgatcctaaggcgaaagaaaagtttagtcagctcgcagaggcctatgaagttctgtccgacgaggtgaaaagaaagcagtacgatgcttatgggtctgccggattcgacccaggcgcaagcggctcccaacattcatactggaaagggggaccgaccgtcgatcccgaggaactgtttaggaaaattttcggtgagtttagttctagctccttcggcgactttcagactgtgttcgatcagcctcaggaatactttatggagctcacattcaatcaagctgccaagggggtaaacaaagagtttaccgttaatatcatggacacgtgtgaacggtgcaacggaaagggcaatgagccaggtactaaagtgcagcactgtcattattgcgggggatcaggcatggaaaccattaacacaggccccttcgtcatgcgcagcacttgtcgaagatgcgggggaaggggtagtatcataatctctccttgtgtggtgtgccggggcgcggggcaggccaagcagaaaaagcgtgtcatgattccagttcccgcaggagtggaggatggccaaaccgtacgcatgccggtgggtaagagagaaatcttcattacatttagggtccagaaatcccctgtgttccggcgagacggggctgatatccacagcgacttatttatatcgattgcccaggctctgcttggcggaaccgcccgcgcacaaggcttgtacgagacgatcaatgttactattcccccagggacacagaccgaccagaagatcagaatgggaggtaaaggcatccctaggattaactcttatgggtacggagatcactatatacatatcaagattcgggtgcccaaacgcctgacttccagacagcaatcactaatcctcagttacgccgaggacgaaacagatgtcgagggcaccgtgaatggtgtaacgctgaccagctccgggggctctacaatggacagctcagctggaagtaaggcgaggcgtgaagcaggcgaggatgaagaggggttcctttccaagctgaaaaagatgtttactagctga

SEQ ID NO: 8337 - RNA, 1443 nt, synthetic construct
  misc_feature 1..1443: note = derived and/or modified sequence opt4 fromDNJA3__Homo_sapiens__AAC29066
  source 1..1443: mol_type = other RNA
atggccgccagatgcagcaccagatggctgctggtggtggtgggcacccccagactgcccgccatcagcggcagaggcgccagaccccccagagagggcgtggtgggcgcctggctgagcagaaagctgagcgtgcccgccttcgccagcagcctgaccagctgcggccccagagccctgctgaccctgagacccggcgtgagcctgaccggcaccaagcacaaccccttcatctgcaccgccagcttccacaccagcgcccccctggccaaggaggactactaccagatcctgggcgtgcccagaaacgccagccagaaggagatcaagaaggcctactaccagctggccaagaagtaccaccccgacaccaacaaggacgaccccaaggccaaggagaagttcagccagctggccgaggcctacgaggtgctgagcgacgaggtgaagagaaagcagtacgacgcctacggcagcgccggcttcgaccccggcgccagcggcagccagcacagctactggaagggcggccccaccgtggaccccgaggagctgttcagaaagatcttcggcgagttcagcagcagcagcttcggcgacttccagaccgtgttcgaccagccccaggagtacttcatggagctgaccttcaaccaggccgccaagggcgtgaacaaggagttcaccgtgaacatcatggacacctgcgagagatgcaacggcaagggcaacgagcccggcaccaaggtgcagcactgccactactgcggcggcagcggcatggagaccatcaacaccggccccttcgtgatgagaagcacctgcagaagatgcggcggcagaggcagcatcatcatcagcccctgcgtggtgtgcagaggcgccggccaggccaagcagaagaagagagtgatgatccccgtgcccgccggcgtggaggacggccagaccgtgagaatgcccgtgggcaagagagagatcttcatcaccttcagagtgcagaagagccccgtgttcagaagagacggcgccgacatccacagcgacctgttcatcagcatcgcccaggccctgctgggcggcaccgccagagcccagggcctgtacgagaccatcaacgtgaccatcccccccggcacccagaccgaccagaagatcagaatgggcggcaagggcatccccagaatcaacagctacggctacggcgaccactacatccacatcaagatcagagtgcccaagagactgaccagcagacagcagagcctgatcctgagctacgccgaggacgagaccgacgtggagggcaccgtgaacggcgtgaccctgaccagcagcggcggcagcaccatggacagcagcgccggcagcaaggccagaagagaggccggcgaggacgaggagggcttcctgagcaagctgaagaagatgttcaccagctga

SEQ ID NO: 8338 - RNA, 1443 nt, synthetic construct
  misc_feature 1..1443: note = derived and/or modified sequence opt5 fromDNJA3__Homo_sapiens__AAC29066
  source 1..1443: mol_type = other RNA
atggccgctagatgcagcacccggtggctgctcgtggtcgttggcacaccccgcctgcctgccatctccgggagaggagcgcggccgccccgcgagggcgtggtgggggcttggctttctagaaagctgagcgtccctgccttcgcctcctctctcacgagctgtggaccccgggctctgcttaccctgcgccctggcgtgtccctcacagggaccaaacacaacccctttatttgcacagcctctttccataccagcgctcctctggccaaggaagactactatcagatcctgggagttccgagaaatgcgtcccaaaaagagattaagaaagcctactatcagctcgctaagaagtaccaccccgatacaaacaaagacgatcctaaggccaaagaaaagtttagccagctggctgaggcctatgaagtgctttctgacgaggtcaaacggaagcagtacgatgcgtatggctccgccggcttcgaccccggggctagcggatctcaacattcctactggaagggcgggcctaccgtggatcccgaggaactgtttcgcaaaatcttcggagagttttctagctccagcttcggcgactttcagacggttttcgatcagccgcaggaatactttatggagctcaccttcaatcaagccgctaagggggtgaacaaagagtttacagtcaatattatggacacctgtgaaagatgcaacggaaagggcaatgagcctggcacaaaagtgcagcactgtcattattgcgggggatccggcatggaaaccatcaacacggggcccttcgtgatgcggtctacatgtcgcagatgcggaggccgggggagcatcattatctccccttgtgtcgtttgccgcggagccggccaggccaagcagaaaaagagagtgatgattcccgtgcccgctggcgtcgaggatgggcaaaccgtgcggatgcctgttggaaagagagaaatcttcattacatttcgcgtgcagaaaagcccggtcttccggagagacggcgcggatatccactctgacctgtttatttccatcgcccaggctctgcttgggggaaccgcccgcgcccaaggcctctacgagaccatcaatgtgacaattccccctgggacgcagaccgaccagaagatccggatgggcggaaaaggcattcccagaatcaacagctatgggtacggagatcactatattcatatcaagatccgcgttcctaaacggctgacatctagacagcaaagcctgattctctcctacgctgaggacgaaaccgatgtggagggcacagtcaatggggtgaccctgacgtctagcggaggctccacaatggacagctctgccgggtccaaggcgcgccgggaagctggcgaggatgaagagggattccttagcaagctgaaaaagatgtttacctcttga

SEQ ID NO: 8339 - protein, 397 aa, synthetic construct
  REGION 1..397: note = DNJA4__Homo_sapiens__Q8WW22
MVKETQYYDILGVKPSASPEEIKKAYRKLALKYHPDKNPDEGEKFKLISQAYEVLSDPKKRDVYDQGGEQAIKEGGSGSPSFSSPMDIFDMFFGGGGRMARERRGKNVVHQLSVTLEDLYNGVTKKLALQKNVICEKCEGVGGKKGSVEKCPLCKGRGMQIHIQQIGPGMVQQIQTVCIECKGQGERINPKDRCESCSGAKVIREKKIIEVHVEKGMKDGQKILFHGEGDQEPELEPGDVIIVLDQKDHSVFQRRGHDLIMKMKIQLSEALCGFKKTIKTLDNRILVITSKAGEVIKHGDLRCVRDEGMPIYKAPLEKGILIIQFLVIFPEKHWLSLEKLPQLEALLPPRQKVRITDDMDQVELKEFCPNEQNWRQHREAYEEDEDGPQAGVQCQTA

SEQ ID NO: 8340 - RNA, 1194 nt, synthetic construct
  misc_feature 1..1194: note = DNJA4__Homo_sapiens__AAH21720
  source 1..1194: mol_type = other RNA
atggtgaaggagacccagtactatgacatcctgggcgtgaagcccagcgcgtccccggaggagatcaagaaggcctatcggaagctggcgctcaagtaccacccggacaagaacccggatgagggcgagaagtttaaactcatatcccaggcatatgaagtgctttcagatccaaagaaaagggatgtttatgaccaaggcggagagcaggcaattaaagaaggaggctcaggcagccccagcttctcttcacccatggacatctttgacatgttctttggtggtggtggacggatggctagagagagaagaggcaagaatgttgtacaccagttatctgtaactcttgaagatttatataatggagtcacgaagaaattggccctccagaaaaatgtaatttgtgagaaatgtgaaggtgttggtgggaagaagggatcggtggagaagtgcccgctgtgcaaggggcgggggatgcagatccacatccagcagatcgggccgggcatggtacagcagatccagaccgtgtgcatcgagtgcaagggccagggtgagcgcatcaaccccaaggaccgctgcgagagctgcagcggggccaaggtgatccgtgagaagaagattatcgaggtacatgttgaaaaaggtatgaaagatgggcaaaagatactatttcatggagaaggagatcaggagcctgagctggagcctggtgatgtcataattgtgcttgatcagaaggatcatagtgtctttcagagacgaggccatgacttgatcatgaaaatgaaaattcagctttctgaagctctttgtggcttcaagaagacgataaaaacattggacaatcgaattcttgttattacatccaaagcaggtgaggtgataaagcacggggacctgagatgcgtgcgcgatgaaggaatgcccatctacaaagcacccctggaaaaagggattctgatcatacagtttttagtaatctttcctgaaaaacactggctttctctggaaaagcttcctcagctggaagctttactccctcctcgacagaaagtgaggattacagatgacatggatcaggtggagctgaaggagttttgtcccaatgagcagaactggcgtcagcacagggaggcctacgaggaggacgaagacgggccccaggctggagtgcagtgccagacggcatga

SEQ ID NO: 8341 - RNA, 1194 nt, synthetic construct
  misc_feature 1..1194: note = derived and/or modified sequence opt1 fromDNJA4__Homo_sapiens__AAH21720
  source 1..1194: mol_type = other RNA
atggtgaaggagacccagtactacgacatcctgggcgtcaagcccagcgcctccccggaggagatcaagaaggcctaccgcaagctcgcgctgaagtaccaccccgacaagaaccccgacgagggggagaagttcaagctgatcagccaggcctacgaggtgctctccgaccccaagaagcgggacgtgtacgaccagggcggggagcaggccatcaaggagggcgggagcggctccccgagcttctccagccccatggacatcttcgacatgttcttcggcgggggcgggcgcatggcccgggagcgccggggcaagaacgtcgtgcaccagctgtccgtgaccctggaggacctctacaacggggtcacgaagaagctggccctgcagaagaacgtgatctgcgagaagtgcgagggcgtgggcgggaagaagggcagcgtcgagaagtgccccctctgcaaggggcgcggcatgcagatccacatccagcagatcggccccgggatggtgcagcagatccagaccgtgtgcatcgagtgcaagggccagggggagcggatcaacccgaaggaccgctgcgagtcctgcagcggcgcgaaggtcatccgggagaagaagatcatcgaggtgcacgtggagaaggggatgaaggacggccagaagatcctgttccacggcgagggggaccaggagcccgagctggagcccggcgacgtcatcatcgtgctcgaccagaaggaccactccgtgttccagcgccgggggcacgacctgatcatgaagatgaagatccagctgagcgaggccctctgcggcttcaagaagaccatcaagaccctggacaaccgcatcctggtcatcacgtccaaggccggggaggtgatcaagcacggcgacctccggtgcgtgcgcgacgagggcatgcccatctacaaggccccgctggagaaggggatcctgatcatccagttcctcgtcatcttccccgagaagcactggctgagcctggagaagctcccccagctggaggcgctgctgcccccgcggcagaaggtgcgcatcaccgacgacatggaccaggtggagctcaaggagttctgccccaacgagcagaactggcggcagcaccgcgaggcctacgaggaggacgaggacggcccccaggccggggtccagtgccagaccgcctga

SEQ ID NO: 8342 - RNA, 1194 nt, synthetic construct
  misc_feature 1..1194: note = derived and/or modified sequence opt2 fromDNJA4__Homo_sapiens__AAH21720
  source 1..1194: mol_type = other RNA
atggtcaaggagacccagtactacgacatcctcggcgtcaagccctccgcctcccccgaggagatcaagaaggcctaccgcaagctcgccctcaagtaccaccccgacaagaaccccgacgagggcgagaagttcaagctcatctcccaggcctacgaggtcctctccgaccccaagaagcgcgacgtctacgaccagggcggcgagcaggccatcaaggagggcggctccggctccccctccttctcctcccccatggacatcttcgacatgttcttcggcggcggcggccgcatggcccgcgagcgccgcggcaagaacgtcgtccaccagctctccgtcaccctcgaggacctctacaacggcgtcaccaagaagctcgccctccagaagaacgtcatctgcgagaagtgcgagggcgtcggcggcaagaagggctccgtcgagaagtgccccctctgcaagggccgcggcatgcagatccacatccagcagatcggccccggcatggtccagcagatccagaccgtctgcatcgagtgcaagggccagggcgagcgcatcaaccccaaggaccgctgcgagtcctgctccggcgccaaggtcatccgcgagaagaagatcatcgaggtccacgtcgagaagggcatgaaggacggccagaagatcctcttccacggcgagggcgaccaggagcccgagctcgagcccggcgacgtcatcatcgtcctcgaccagaaggaccactccgtcttccagcgccgcggccacgacctcatcatgaagatgaagatccagctctccgaggccctctgcggcttcaagaagaccatcaagaccctcgacaaccgcatcctcgtcatcacctccaaggccggcgaggtcatcaagcacggcgacctccgctgcgtccgcgacgagggcatgcccatctacaaggcccccctcgagaagggcatcctcatcatccagttcctcgtcatcttccccgagaagcactggctctccctcgagaagctcccccagctcgaggccctcctccccccccgccagaaggtccgcatcaccgacgacatggaccaggtcgagctcaaggagttctgccccaacgagcagaactggcgccagcaccgcgaggcctacgaggaggacgaggacggcccccaggccggcgtccagtgccagaccgcctga

SEQ ID NO: 8343 - RNA, 1194 nt, synthetic construct
  misc_feature 1..1194: note = derived and/or modified sequence opt3 fromDNJA4__Homo_sapiens__AAH21720
  source 1..1194: mol_type = other RNA
atggtgaaggagacccagtactatgacatcctgggcgtcaaacccagcgcctcccctgaagagattaagaaggcttacagaaaactcgcacttaaatatcacccagataagaacccggacgaaggggagaagttcaaactgatatctcaagcctacgaagttttgtcagatcccaagaaaagggacgtgtatgatcagggaggtgagcaggcgatcaaggagggcgggagtggaagcccttccttttcttcgccaatggacattttcgatatgtttttcggcggtgggggacggatggctcgcgaacgacgtggcaaaaatgtagtgcatcagttatcagtcacactggaggacctatacaacggcgtgactaagaagctcgccctgcagaaaaatgttatctgcgaaaagtgtgagggggtgggaggtaaaaagggcagcgtcgagaaatgccccctttgtaaggggagaggaatgcaaattcacatccagcagataggccctggtatggtgcaacagatccagacggtatgcattgaatgtaaagggcagggagagaggatcaacccaaaggatcggtgcgaaagttgttccggcgcaaaggttattcgcgagaaaaagatcatagaagtgcatgtcgagaaaggcatgaaggacgggcagaaaattctgtttcacggagagggtgatcaagaacccgagttggaacctggcgacgtgatcattgtgctcgatcagaaggaccattctgtcttccaaagaagggggcacgacctgatcatgaagatgaaaatccagctgagcgaggccctctgcggatttaagaaaaccattaagacattagataatcggatactggttatcacttccaaagctggcgaagtgattaagcacggtgaccttcgctgtgtacgagatgaggggatgccaatctataaggcaccgttggagaaaggcatactgattatccagttcctagtgatctttcccgaaaagcattggctctcactggagaaacttcctcagctggaagccttgctcccacccagacaaaaggtcaggattaccgacgatatggaccaggtggagctgaaagagttctgccctaacgaacagaattggcggcagcaccgtgaggcttacgaagaggatgaagacggaccacaagccggcgttcagtgtcagacagcgtga

SEQ ID NO: 8344 - RNA, 1194 nt, synthetic construct
  misc_feature 1..1194: note = derived and/or modified sequence opt4 fromDNJA4__Homo_sapiens__AAH21720
  source 1..1194: mol_type = other RNA
atggtgaaggagacccagtactacgacatcctgggcgtgaagcccagcgccagccccgaggagatcaagaaggcctacagaaagctggccctgaagtaccaccccgacaagaaccccgacgagggcgagaagttcaagctgatcagccaggcctacgaggtgctgagcgaccccaagaagagagacgtgtacgaccagggcggcgagcaggccatcaaggagggcggcagcggcagccccagcttcagcagccccatggacatcttcgacatgttcttcggcggcggcggcagaatggccagagagagaagaggcaagaacgtggtgcaccagctgagcgtgaccctggaggacctgtacaacggcgtgaccaagaagctggccctgcagaagaacgtgatctgcgagaagtgcgagggcgtgggcggcaagaagggcagcgtggagaagtgccccctgtgcaagggcagaggcatgcagatccacatccagcagatcggccccggcatggtgcagcagatccagaccgtgtgcatcgagtgcaagggccagggcgagagaatcaaccccaaggacagatgcgagagctgcagcggcgccaaggtgatcagagagaagaagatcatcgaggtgcacgtggagaagggcatgaaggacggccagaagatcctgttccacggcgagggcgaccaggagcccgagctggagcccggcgacgtgatcatcgtgctggaccagaaggaccacagcgtgttccagagaagaggccacgacctgatcatgaagatgaagatccagctgagcgaggccctgtgcggcttcaagaagaccatcaagaccctggacaacagaatcctggtgatcaccagcaaggccggcgaggtgatcaagcacggcgacctgagatgcgtgagagacgagggcatgcccatctacaaggcccccctggagaagggcatcctgatcatccagttcctggtgatcttccccgagaagcactggctgagcctggagaagctgccccagctggaggccctgctgccccccagacagaaggtgagaatcaccgacgacatggaccaggtggagctgaaggagttctgccccaacgagcagaactggagacagcacagagaggcctacgaggaggacgaggacggcccccaggccggcgtgcagtgccagaccgcctga

SEQ ID NO: 8345 - RNA, 1194 nt, synthetic construct
  misc_feature 1..1194: note = derived and/or modified sequence opt5 fromDNJA4__Homo_sapiens__AAH21720
  source 1..1194: mol_type = other RNA
atggtgaaggagacccagtactatgacatcctgggcgtcaaacccagcgcctcccctgaagagattaagaaggcttacagaaaactcgccctgaaatatcacccggataagaaccccgacgaaggggagaagttcaaacttatctctcaagcgtacgaagttctgagcgatcctaagaaacgggacgtgtatgatcagggaggcgagcaggctattaaggaagggggatccggctctcccagcttttcctctcctatggacatcttcgatatgtttttcgggggaggcggccgcatggccagagaacggcgcgggaaaaatgtggtccatcagctcagcgtgacactggaggacctttacaacggagttacgaagaagctggccctccagaaaaatgtgatttgcgaaaagtgtgagggcgtcgggggcaaaaagggatccgtggagaaatgccccctgtgtaaggggagaggaatgcaaatccacatccagcagattggccctggcatggttcaacagatccagaccgtgtgcattgaatgtaaagggcagggagagcggatcaacccgaaggatcgctgcgaaagctgttctggcgctaaggtcattagagagaaaaagatcattgaagtgcatgtggagaaagggatgaaggacggacagaaaatcctgtttcacggcgagggggatcaagaacccgagctcgaacctggagacgtcatcattgttctggatcagaaggaccattccgtgttccaacggcgcggccacgaccttatcatgaagatgaaaattcagctgagcgaggccctctgcggctttaagaaaacaatcaagaccctggataatcggattcttgtgatcacatctaaagctggggaagtcatcaagcacggagacctgagatgtgtgcgcgatgagggcatgcccatttataaggcccctctcgagaaagggatcctgattatccagttcctggttatttttcccgaaaagcattggctctccctggagaaacttccgcagctggaagcgctcctgcctcccagacaaaaggtgcggatcaccgacgatatggaccaggtcgagcttaaagagttctgccctaacgagcagaattggcgccagcacagagaggcctacgaagaggatgaagacggaccccaagctggcgtgcagtgtcagacagcctga

SEQ ID NO: 8346 - protein, 340 aa, synthetic construct
  REGION 1..340: note = DNJB1__Homo_sapiens__P25685
MGKDYYQTLGLARGASDEEIKRAYRRQALRYHPDKNKEPGAEEKFKEIAEAYDVLSDPRKREIFDRYGEEGLKGSGPSGGSGGGANGTSFSYTFHGDPHAMFAEFFGGRNPFDTFFGQRNGEEGMDIDDPFSGFPMGMGGFTNVNFGRSRSAQEPARKKQDPPVTHDLRVSLEEIYSGCTKKMKISHKRLNPDGKSIRNEDKILTIEVKKGWKEGTKITFPKEGDQTSNNIPADIVFVLKDKPHNIFKRDGSDVIYPARISLREALCGCTVNVPTLDGRTIPVVFKDVIRPGMRRKVPGEGLPLPKTPEKRGDLIIEFEVIFPERIPQTSRTVLEQVLPI

SEQ ID NO: 8347 - RNA, 1023 nt, synthetic construct
  misc_feature 1..1023: note = DNJB1__Homo_sapiens__AAH02352
  source 1..1023: mol_type = other RNA
atgggtaaagactactaccagacgttgggcctggcccgcggcgcgtcggacgaggagatcaagcgggcctaccgccgccaggcgctgcgctaccacccggacaagaacaaggagcccggcgccgaggagaagttcaaggagatcgctgaggcctacgacgtgctcagcgacccgcgcaagcgcgagatcttcgaccgctacggggaggaaggcctaaaggggagtggccccagtggcggtagcggcggtggtgccaatggtacctctttcagctacacattccatggagaccctcatgccatgtttgctgagttcttcggtggcagaaatccctttgacaccttttttgggcagcggaacggggaggaaggcatggacattgatgacccattctctggcttccctatgggcatgggtggcttcaccaacgtgaactttggccgctcccgctctgcccaagagcccgcccgaaagaagcaagatcccccagtcacccacgaccttcgagtctcccttgaagagatctacagcggctgtaccaagaagatgaaaatctcccacaagcggctaaaccccgacggaaagagcattcgaaacgaagacaaaatattgaccatcgaagtgaagaaggggtggaaagaaggaaccaaaatcactttccccaaggaaggagaccagacctccaacaacattccagctgatatcgtctttgttttaaaggacaagccccacaatatctttaagagagatggctctgatgtcatttatcctgccaggatcagcctccgggaggctctgtgtggctgcacagtgaacgtccccactctggacggcaggacgatacccgtcgtattcaaagatgttatcaggcctggcatgcggcgaaaagttcctggagaaggcctccccctccccaaaacacccgagaaacgtggggacctcattattgagtttgaagtgatcttccccgaaaggattccccagacatcaagaaccgtacttgagcaggttcttccaatatag

SEQ ID NO: 8348 - RNA, 1023 nt, synthetic construct
  misc_feature 1..1023: note = derived and/or modified sequence opt1 fromDNJB1__Homo_sapiens__AAH02352
  source 1..1023: mol_type = other RNA
atgggcaaggactactaccagaccctggggctcgcccgcggcgccagcgacgaggagatcaagcgggcgtaccgccggcaggccctgcgctaccaccccgacaagaacaaggagccgggggccgaggagaagttcaaggagatcgccgaggcctacgacgtgctgtccgacccccggaagcgcgagatcttcgaccggtacggcgaggaggggctcaagggcagcggcccctccgggggcagcgggggcggggcgaacggcacctccttcagctacacgttccacggcgacccccacgccatgttcgccgagttcttcgggggccgcaacccgttcgacaccttcttcgggcagcggaacggcgaggagggcatggacatcgacgaccccttctccgggttccccatgggcatgggcgggttcaccaacgtcaacttcgggcgcagccggtccgcccaggagcccgcgcgcaagaagcaggacccgcccgtgacccacgacctgcgggtgagcctggaggagatctactccggctgcacgaagaagatgaagatcagccacaagcgcctcaaccccgacggcaagtccatccggaacgaggacaagatcctgaccatcgaggtcaagaaggggtggaaggagggcaccaagatcaccttccccaaggagggggaccagacgagcaacaacatcccggccgacatcgtgttcgtgctgaaggacaagccccacaacatcttcaagcgcgacggctccgacgtcatctaccccgcccggatcagcctccgcgaggccctgtgcgggtgcaccgtgaacgtgcccaccctggacggccggaccatcccggtcgtgttcaaggacgtgatccgccccggcatgcggcgcaaggtccccggggagggcctccccctgccgaagacgcccgagaagcgcggggacctgatcatcgagttcgaggtgatcttccccgagcggatcccccagacctcccgcaccgtgctcgagcaggtcctgccgatctga

SEQ ID NO: 8349 - RNA, 1023 nt, synthetic construct
  misc_feature 1..1023: note = derived and/or modified sequence opt2 fromDNJB1__Homo_sapiens__AAH02352
  source 1..1023: mol_type = other RNA
atgggcaaggactactaccagaccctcggcctcgcccgcggcgcctccgacgaggagatcaagcgcgcctaccgccgccaggccctccgctaccaccccgacaagaacaaggagcccggcgccgaggagaagttcaaggagatcgccgaggcctacgacgtcctctccgacccccgcaagcgcgagatcttcgaccgctacggcgaggagggcctcaagggctccggcccctccggcggctccggcggcggcgccaacggcacctccttctcctacaccttccacggcgacccccacgccatgttcgccgagttcttcggcggccgcaaccccttcgacaccttcttcggccagcgcaacggcgaggagggcatggacatcgacgaccccttctccggcttccccatgggcatgggcggcttcaccaacgtcaacttcggccgctcccgctccgcccaggagcccgcccgcaagaagcaggacccccccgtcacccacgacctccgcgtctccctcgaggagatctactccggctgcaccaagaagatgaagatctcccacaagcgcctcaaccccgacggcaagtccatccgcaacgaggacaagatcctcaccatcgaggtcaagaagggctggaaggagggcaccaagatcaccttccccaaggagggcgaccagacctccaacaacatccccgccgacatcgtcttcgtcctcaaggacaagccccacaacatcttcaagcgcgacggctccgacgtcatctaccccgcccgcatctccctccgcgaggccctctgcggctgcaccgtcaacgtccccaccctcgacggccgcaccatccccgtcgtcttcaaggacgtcatccgccccggcatgcgccgcaaggtccccggcgagggcctccccctccccaagacccccgagaagcgcggcgacctcatcatcgagttcgaggtcatcttccccgagcgcatcccccagacctcccgcaccgtcctcgagcaggtcctccccatctga

SEQ ID NO: 8350 - RNA, 1023 nt, synthetic construct
  misc_feature 1..1023: note = derived and/or modified sequence opt3 fromDNJB1__Homo_sapiens__AAH02352
  source 1..1023: mol_type = other RNA
atgggcaaggactactatcagaccctggggctcgccagaggagctagcgatgaggagatcaaaagggcataccggcgccaagcccttcgatatcaccccgacaagaacaaagagcctggtgcggaagagaagttcaaagaaattgctgaggcctacgatgtgctgtccgacccacgtaagagagagatatttgataggtatggcgaagaggggttgaagggatctggcccgtcaggtgggagtggaggcggcgcaaatgggactagcttctcctacacatttcatggagacccccacgccatgttcgctgaatttttcggtggccggaacccttttgatacgttctttgggcagcgcaatggagaggagggcatggacatcgatgacccattctctggttttcccatggggatgggaggcttcaccaacgtcaattttggcagatcgaggtcagcacaggaacctgcccggaaaaagcaggatccacccgttacacatgacttacgcgtgagcctggaggaaatttatagtgggtgcactaaaaagatgaaaatctcccacaagcgactaaaccctgatggaaagtctattagaaatgaggacaaaatcctcaccatagaagtaaagaaaggttggaaggagggcacaaaaatcaccttcccaaaggagggggaccaaactagcaacaatattccggctgatatcgtgttcgtcctgaaagacaagccccataacatttttaagagggatggatccgacgtgatctaccctgcccggatatcacttcgtgaagcgctgtgtggctgcacagttaatgtgccaaccttggatggtcgcacgattcccgtcgtgttcaaagacgtaatcagacctgggatgaggcggaaggttccaggcgagggactccccctgccgaaaactcctgaaaagcgaggcgatctgattatcgagtttgaagtgatcttccccgagcgcattccacagaccagtagaacagtcctcgaacaggtgttacctatatga

SEQ ID NO: 8351 - RNA, 1023 nt, synthetic construct
  misc_feature 1..1023: note = derived and/or modified sequence opt4 fromDNJB1__Homo_sapiens__AAH02352
  source 1..1023: mol_type = other RNA
atgggcaaggactactaccagaccctgggcctggccagaggcgccagcgacgaggagatcaagagagcctacagaagacaggccctgagataccaccccgacaagaacaaggagcccggcgccgaggagaagttcaaggagatcgccgaggcctacgacgtgctgagcgaccccagaaagagagagatcttcgacagatacggcgaggagggcctgaagggcagcggccccagcggcggcagcggcggcggcgccaacggcaccagcttcagctacaccttccacggcgacccccacgccatgttcgccgagttcttcggcggcagaaaccccttcgacaccttcttcggccagagaaacggcgaggagggcatggacatcgacgaccccttcagcggcttccccatgggcatgggcggcttcaccaacgtgaacttcggcagaagcagaagcgcccaggagcccgccagaaagaagcaggacccccccgtgacccacgacctgagagtgagcctggaggagatctacagcggctgcaccaagaagatgaagatcagccacaagagactgaaccccgacggcaagagcatcagaaacgaggacaagatcctgaccatcgaggtgaagaagggctggaaggagggcaccaagatcaccttccccaaggagggcgaccagaccagcaacaacatccccgccgacatcgtgttcgtgctgaaggacaagccccacaacatcttcaagagagacggcagcgacgtgatctaccccgccagaatcagcctgagagaggccctgtgcggctgcaccgtgaacgtgcccaccctggacggcagaaccatccccgtggtgttcaaggacgtgatcagacccggcatgagaagaaaggtgcccggcgagggcctgcccctgcccaagacccccgagaagagaggcgacctgatcatcgagttcgaggtgatcttccccgagagaatcccccagaccagcagaaccgtgctggagcaggtgctgcccatctga

SEQ ID NO: 8352 - RNA, 1023 nt, synthetic construct
  misc_feature 1..1023: note = derived and/or modified sequence opt5 fromDNJB1__Homo_sapiens__AAH02352
  source 1..1023: mol_type = other RNA
atgggcaaggactactatcagaccctggggctcgccagaggagctagcgatgaggaaatcaaacgggcctaccgcagacaagcgctgcggtatcaccccgacaagaacaaagagcctggcgctgaagagaagttcaaagaaattgccgaggcctacgatgtgctttccgacccgcgcaagagagagatctttgatcggtatggggaagagggactgaagggctctgggcccagcggaggctccggcgggggagctaatggcacatctttcagctacacgtttcatggggaccctcacgccatgttcgctgaatttttcggaggccgcaacccctttgataccttctttgggcagagaaatggagaggagggcatggacattgatgaccctttctccggctttcccatggggatgggaggcttcacaaacgtcaattttgggcggtctcgcagcgcccaggaacctgcgcggaaaaagcaggatccgcccgttacccatgacctcagagtgtccctggaggaaatctatagcggatgcaccaaaaagatgaaaatttctcacaagcgccttaaccctgatggcaagtccatcagaaatgaggacaaaatcctgacaattgaagtgaagaaagggtggaaggagggaacaaaaatcaccttccccaaggagggcgaccaaacgagcaacaatattcctgccgatatcgtcttcgtgctcaaagacaagccccataacatttttaagcgggatggctctgacgttatctacccggctcgcatttccctgagagaagccctgtgtgggtgcaccgtgaatgtccctacactcgatggacggaccatccccgtggttttcaaagacgtgatcagacctggcatgcgccggaaggtccccggggagggactgccccttcctaaaacaccggaaaagagaggcgatctgattatcgagtttgaagtgattttccccgagcgcatccctcagaccagccggacggtgctcgagcaggtcctgcccatttga

SEQ ID NO: 8353 - protein, 324 aa, synthetic construct
  REGION 1..324: note = DNJB2__Homo_sapiens__P25686
MASYYEILDVPRSASADDIKKAYRRKALQWHPDKNPDNKEFAEKKFKEVAEAYEVLSDKHKREIYDRYGREGLTGTGTGPSRAEAGSGGPGFTFTFRSPEEVFREFFGSGDPFAELFDDLGPFSELQNRGSRHSGPFFTFSSSFPGHSDFSSSSFSFSPGAGAFRSVSTSTTFVQGRRITTRRIMENGQERVEVEEDGQLKSVTINGVPDDLALGLELSRREQQPSVTSRSGGTQVQQTPASCPLDSDLSEDEDLQLAMAYSLSEMEAAGKKPAGGREAQHRRQGRPKAQHQDPGLGGTQEGARGEATKRSPSPEEKASRCLIL

SEQ ID NO: 8354 - RNA, 975 nt, synthetic construct
  misc_feature 1..975: note = DNJB2__Homo_sapiens__AAH11609
  source 1..975: mol_type = other RNA
atggcatcctactacgagatcctagacgtgccgcgaagtgcgtccgctgatgacatcaagaaggcgtatcggcgcaaggctctccagtggcacccagacaaaaacccagataataaagagtttgctgagaagaaatttaaggaggtggccgaggcatatgaagtgctgtctgacaagcacaagcgggagatttacgaccgctatggccgggaagggctgacagggacaggaactggcccatctcgggcagaagctggcagtggtgggcctggcttcaccttcaccttccgcagccccgaggaggtcttccgggaattctttgggagtggagacccttttgcagagctctttgatgacctgggccccttctcagagcttcagaaccggggttcccgacactcaggccccttctttaccttctcttcctccttccctgggcactccgatttctcctcctcatctttctccttcagtcctggggctggtgcttttcgctctgtttctacatctaccacctttgtccaaggacgccgcatcaccacacgcagaatcatggagaacgggcaggagcgggtggaagtggaggaggatgggcagctgaagtcagtcacaatcaatggtgtcccagatgacctggcactgggcttggagctgagccgtcgcgagcagcagccgtcagtcacttccaggtctgggggcactcaggtccagcagacccctgcctcatgccccttggacagcgacctctctgaggatgaggacctgcagctggccatggcctacagcctgtcagagatggaggcagctgggaagaaacccgcaggtgggcgggaggcacagcaccgacggcaggggcggcccaaggcccagcaccaagatccaggcttgggggggacccaggagggtgcgaggggtgaagcaaccaaacgcagtccatccccagaggagaaggcctctcgctgcctcatcctctga

SEQ ID NO: 8355 - RNA, 975 nt, synthetic construct
  misc_feature 1..975: note = derived and/or modified sequence opt1 fromDNJB2__Homo_sapiens__AAH11609
  source 1..975: mol_type = other RNA
atggccagctactacgagatcctggacgtgccccgctccgccagcgcggacgacatcaagaaggcctaccggcgcaaggccctccagtggcacccggacaagaaccccgacaacaaggagttcgccgagaagaagttcaaggaggtcgccgaggcgtacgaggtgctgtccgacaagcacaagcgggagatctacgaccgctacggccgggaggggctgaccggcaccgggacgggccccagccgcgccgaggccgggtccggcggccccgggttcaccttcaccttccggagcccggaggaggtgttccgcgagttcttcggctccggggaccccttcgccgagctgttcgacgacctgggccccttcagcgagctgcagaaccgggggtcccgccacagcggccccttcttcaccttctccagctccttcccgggccacagcgacttctccagctccagcttctccttcagccccggggcgggcgccttccggagcgtctccacgagcaccaccttcgtgcaggggcgccggatcaccacgcgccggatcatggagaacggccaggagcgcgtggaggtcgaggaggacggccagctcaagtccgtgaccatcaacggggtgcccgacgacctggccctgggcctcgagctgagccggcgcgagcagcagccctccgtcaccagccggtccgggggcacccaggtgcagcagacgccggccagctgccccctggactccgacctcagcgaggacgaggacctgcagctggccatggcgtactccctcagcgagatggaggccgccgggaagaagcccgccggcggccgcgaggcccagcaccggcgccaggggcgccccaaggcgcagcaccaggacccgggcctcgggggcacccaggagggggcccggggcgaggccaccaagcgctcccccagccccgaggagaaggcctcccggtgcctgatcctctga

SEQ ID NO: 8356 - RNA, 975 nt, synthetic construct
  misc_feature 1..975: note = derived and/or modified sequence opt2 fromDNJB2__Homo_sapiens__AAH11609
  source 1..975: mol_type = other RNA
atggcctcctactacgagatcctcgacgtcccccgctccgcctccgccgacgacatcaagaaggcctaccgccgcaaggccctccagtggcaccccgacaagaaccccgacaacaaggagttcgccgagaagaagttcaaggaggtcgccgaggcctacgaggtcctctccgacaagcacaagcgcgagatctacgaccgctacggccgcgagggcctcaccggcaccggcaccggcccctcccgcgccgaggccggctccggcggccccggcttcaccttcaccttccgctcccccgaggaggtcttccgcgagttcttcggctccggcgaccccttcgccgagctcttcgacgacctcggccccttctccgagctccagaaccgcggctcccgccactccggccccttcttcaccttctcctcctccttccccggccactccgacttctcctcctcctccttctccttctcccccggcgccggcgccttccgctccgtctccacctccaccaccttcgtccagggccgccgcatcaccacccgccgcatcatggagaacggccaggagcgcgtcgaggtcgaggaggacggccagctcaagtccgtcaccatcaacggcgtccccgacgacctcgccctcggcctcgagctctcccgccgcgagcagcagccctccgtcacctcccgctccggcggcacccaggtccagcagacccccgcctcctgccccctcgactccgacctctccgaggacgaggacctccagctcgccatggcctactccctctccgagatggaggccgccggcaagaagcccgccggcggccgcgaggcccagcaccgccgccagggccgccccaaggcccagcaccaggaccccggcctcggcggcacccaggagggcgcccgcggcgaggccaccaagcgctccccctcccccgaggagaaggcctcccgctgcctcatcctctga

SEQ ID NO: 8357 - RNA, 975 nt, synthetic construct
  misc_feature 1..975: note = derived and/or modified sequence opt3 fromDNJB2__Homo_sapiens__AAH11609
  source 1..975: mol_type = other RNA
atggccagctactatgagatcctggacgtgcccagatccgcttctgcagatgacattaagaaagcctacaggcggaaggcgctccagtggcaccctgataaaaacccagacaataaggaatttgctgagaaaaagtttaaggaagtcgccgaggcatatgaagttctttcagataaacataagcgcgagatatacgaccgatatggccgtgaggggctgaccggaacaggtactggcccgagtagagccgaagctgggagcggaggccccggtttcacgtttaccttcaggtcccctgaggaagtgtttcgggagttctttgggtctggagatccattcgcagagttgtttgacgatttaggccccttctcggaactgcaaaaccgcggctcaagacacagcgggcctttcttcacatttagttcctctttcccaggacatagcgacttctcctcaagtagcttttctttctcccccggtgccggcgcttttaggtcagtaagcacgagtaccacattcgtgcaggggcggcgcatcaccactcgaagaattatggagaatggacaggaaagggtcgaggtggaagaggatggccagctaaaatctgttacaatcaacggtgtgcctgacgatctcgccctggggcttgagctgtcccggcgtgaacaacagccaagcgtcacctcgcgctctggaggcactcaggtgcagcaaactccggcgtcctgccccttggactcagacctcagtgaggatgaagacctgcagctggcaatggcctacagcctctccgagatggaagctgccggcaagaaacctgcagggggaagagaggctcagcacaggcggcagggtcgaccaaaggcccaacatcaggatcccggcttagggggaacccaggagggcgcgcgcggtgaagccacaaagagatctcctagcccagaggaaaaagcatcaaggtgtctgattctttga

SEQ ID NO: 8358 - RNA, 975 nt, synthetic construct
  misc_feature 1..975: note = derived and/or modified sequence opt4 fromDNJB2__Homo_sapiens__AAH11609
  source 1..975: mol_type = other RNA
atggccagctactacgagatcctggacgtgcccagaagcgccagcgccgacgacatcaagaaggcctacagaagaaaggccctgcagtggcaccccgacaagaaccccgacaacaaggagttcgccgagaagaagttcaaggaggtggccgaggcctacgaggtgctgagcgacaagcacaagagagagatctacgacagatacggcagagagggcctgaccggcaccggcaccggccccagcagagccgaggccggcagcggcggccccggcttcaccttcaccttcagaagccccgaggaggtgttcagagagttcttcggcagcggcgaccccttcgccgagctgttcgacgacctgggccccttcagcgagctgcagaacagaggcagcagacacagcggccccttcttcaccttcagcagcagcttccccggccacagcgacttcagcagcagcagcttcagcttcagccccggcgccggcgccttcagaagcgtgagcaccagcaccaccttcgtgcagggcagaagaatcaccaccagaagaatcatggagaacggccaggagagagtggaggtggaggaggacggccagctgaagagcgtgaccatcaacggcgtgcccgacgacctggccctgggcctggagctgagcagaagagagcagcagcccagcgtgaccagcagaagcggcggcacccaggtgcagcagacccccgccagctgccccctggacagcgacctgagcgaggacgaggacctgcagctggccatggcctacagcctgagcgagatggaggccgccggcaagaagcccgccggcggcagagaggcccagcacagaagacagggcagacccaaggcccagcaccaggaccccggcctgggcggcacccaggagggcgccagaggcgaggccaccaagagaagccccagccccgaggagaaggccagcagatgcctgatcctgtga

SEQ ID NO: 8359 - RNA, 975 nt, synthetic construct
  misc_feature 1..975: note = derived and/or modified sequence opt5 fromDNJB2__Homo_sapiens__AAH11609
  source 1..975: mol_type = other RNA
atggccagctactatgagatcctggacgtgcccagatccgcttctgccgatgacattaagaaagcgtaccggcgcaaggctctccagtggcaccctgataaaaacccggacaataaggaatttgccgagaaaaagtttaaggaagtcgccgaggcttatgaagttctgagcgataaacataagagagagatctacgaccggtatggccgcgaggggcttaccggaacaggcacggggccctccagagccgaagctggatctggcgggcctggattcacctttacattccggagccccgaggaagtgtttcgcgagttctttggctccggcgatcctttcgccgagctgtttgacgatctcgggcccttctctgaactgcaaaacagaggaagccggcactccggccctttcttcaccttttcttcttccttcccggggcatagcgacttctcttccagctctttttccttcagccccggagcgggcgcctttcgctccgtgtctacaagcaccacattcgtccaggggagacggattaccacgcgcagaatcatggagaatggacaggaacgggtggaggttgaagaggatggccagcttaaatccgtgaccattaacggcgtccctgacgatctggctctcgggctggagctgagccgcagagaacaacagccctctgtgacatcccggagcggaggcacccaggttcagcaaacccctgcctcttgccccctcgacagcgacctgtccgaggatgaagaccttcagctggctatggcctactctctcagcgagatggaagcggccgggaagaaaccggctggaggcagagaggcccagcaccgccggcaggggagacctaaggctcaacatcaggatcccggactgggcggcacacaggagggggcccgcggagaagccacgaagcggtcccctagccccgaggaaaaagctagcagatgtcttatcctgtga

SEQ ID NO: 8360 - protein, 145 aa, synthetic construct
  REGION 1..145: note = DNJB3__Homo_sapiens__Q8WWF6
MVDYYEVLDVPRQASSEAIKKAYRKLALKWHPDKNPENKEEAERRFKQVAEAYEVLSDAKKRDIYDRYGEAGAEGGCTGGRPFEDPFEYVFSFRDPADVFREFFGGQDPFSFDLLGNPLENILGGSEELLGKQKQSVCTPFLCLQ

SEQ ID NO: 8361 - RNA, 438 nt, synthetic construct
  misc_feature 1..438: note = DNJB3__Homo_sapiens__AAH17590
  source 1..438: mol_type = other RNA
atggtggactactacgaggtgctggacgtgccccggcaggcctcatccgaggccatcaagaaggcgtaccgcaagctggcgctcaagtggcaccccgacaaaaaccctgagaacaaggaggaagcggagaggagattcaagcaggtggccgaggcctacgaggtgttgtcggacgccaagaaacgcgatatctatgaccgctatggcgaggcgggcgcggagggcggctgcacaggcggcaggcccttcgaggaccccttcgagtacgtcttcagcttccgcgacccagccgacgtcttcagggagttcttcggcggccaggacccattctcctttgacctcttgggaaacccgctggagaatattttgggggggtcagaggaactgctggggaagcagaagcagagcgtctgcaccccttttctctgccttcagtga

SEQ ID NO: 8362 - RNA, 438 nt, synthetic construct
  misc_feature 1..438: note = derived and/or modified sequence opt1 fromDNJB3__Homo_sapiens__AAH17590
  source 1..438: mol_type = other RNA
atggtggactactacgaggtcctggacgtgccccgccaggccagctccgaggccatcaagaaggcgtaccggaagctcgccctgaagtggcacccggacaagaaccccgagaacaaggaggaggccgagcgccggttcaagcaggtcgccgaggcctacgaggtgctgagcgacgcgaagaagcgcgacatctacgaccggtacggcgaggccggggccgagggcgggtgcaccggcgggcgccccttcgaggaccccttcgagtacgtgttctccttccgggacccggccgacgtgttccgcgagttcttcggcggccaggaccccttcagcttcgacctcctggggaaccccctggagaacatcctcggcgggtccgaggagctgctgggcaagcagaagcagagcgtctgcacccccttcctctgcctgcagtga

SEQ ID NO: 8363 - RNA, 438 nt, synthetic construct
  misc_feature 1..438: note = derived and/or modified sequence opt2 fromDNJB3__Homo_sapiens__AAH17590
  source 1..438: mol_type = other RNA
atggtcgactactacgaggtcctcgacgtcccccgccaggcctcctccgaggccatcaagaaggcctaccgcaagctcgccctcaagtggcaccccgacaagaaccccgagaacaaggaggaggccgagcgccgcttcaagcaggtcgccgaggcctacgaggtcctctccgacgccaagaagcgcgacatctacgaccgctacggcgaggccggcgccgagggcggctgcaccggcggccgccccttcgaggaccccttcgagtacgtcttctccttccgcgaccccgccgacgtcttccgcgagttcttcggcggccaggaccccttctccttcgacctcctcggcaaccccctcgagaacatcctcggcggctccgaggagctcctcggcaagcagaagcagtccgtctgcacccccttcctctgcctccagtga

SEQ ID NO: 8364 - RNA, 438 nt, synthetic construct
  misc_feature 1..438: note = derived and/or modified sequence opt3 fromDNJB3__Homo_sapiens__AAH17590
  source 1..438: mol_type = other RNA
atggtggactactatgaggtcctggatgttcccagacaggccagctccgaagctatcaagaaagcatacaggaagctcgcccttaaatggcaccctgacaagaacccagagaataaagaagaggcggaacggcgcttcaagcaagtggctgaggcctatgaggtactgtctgatgcaaagaaacgagacatttacgatcgttatggcgaagccggggctgagggaggttgcaccggcgggagaccgtttgaagaccccttcgagtacgtgttttcattcagggatcctgcagacgtctttcgggagttctttggaggccaggatccattcagttttgacttgttaggtaaccccctggaaaatatactagggggaagcgaggaactcctgggcaagcagaaacagtccgtgtgtacacctttcctttgcctgcaatga

SEQ ID NO: 8365 - RNA, 438 nt, synthetic construct
  misc_feature 1..438: note = derived and/or modified sequence opt4 fromDNJB3__Homo_sapiens__AAH17590
  source 1..438: mol_type = other RNA
atggtggactactacgaggtgctggacgtgcccagacaggccagcagcgaggccatcaagaaggcctacagaaagctggccctgaagtggcaccccgacaagaaccccgagaacaaggaggaggccgagagaagattcaagcaggtggccgaggcctacgaggtgctgagcgacgccaagaagagagacatctacgacagatacggcgaggccggcgccgagggcggctgcaccggcggcagacccttcgaggaccccttcgagtacgtgttcagcttcagagaccccgccgacgtgttcagagagttcttcggcggccaggaccccttcagcttcgacctgctgggcaaccccctggagaacatcctgggcggcagcgaggagctgctgggcaagcagaagcagagcgtgtgcacccccttcctgtgcctgcagtga

SEQ ID NO: 8366 - RNA, 438 nt, synthetic construct
  misc_feature 1..438: note = derived and/or modified sequence opt5 fromDNJB3__Homo_sapiens__AAH17590
  source 1..438: mol_type = other RNA
atggtggactactatgaggtcctggatgttcccagacaggccagctccgaagctatcaagaaagcctaccggaagctcgcgctgaaatggcaccctgacaagaacccggagaataaagaagaggctgaacgcagattcaagcaagtggccgaggcctatgaggtgctttctgatgctaagaaacgggacatttacgatcgctatggcgaagccggggctgagggaggctgcaccgggggaagaccctttgaagaccctttcgagtacgtctttagcttccgggatcccgccgacgtgtttcgcgagttctttggcgggcaggatcctttctcctttgacctgctcggaaaccccctggaaaatatccttggcggctctgaggaactgctcgggaagcagaaacagagcgtttgtacacctttcctgtgcctgcaatga

SEQ ID NO: 8367 - protein, 337 aa, synthetic construct
  REGION 1..337: note = DNJB4__Homo_sapiens__Q9UDY4
MGKDYYCILGIEKGASDEDIKKAYRKQALKFHPDKNKSPQAEEKFKEVAEAYEVLSDPKKREIYDQFGEEGLKGGAGGTDGQGGTFRYTFHGDPHATFAAFFGGSNPFEIFFGRRMGGGRDSEEMEIDGDPFSAFGFSMNGYPRDRNSVGPSRLKQDPPVIHELRVSLEEIYSGCTKRMKISRKRLNADGRSYRSEDKILTIEIKKGWKEGTKITFPREGDETPNSIPADIVFIIKDKDHPKFKRDGSNIIYTAKISLREALCGCSINVPTLDGRNIPMSVNDIVKPGMRRRIIGYGLPFPKNPDQRGDLLIEFEVSFPDTISSSSKEVLRKHLPAS

SEQ ID NO: 8368 - RNA, 1014 nt, synthetic construct
  misc_feature 1..1014: note = DNJB4__Homo_sapiens__AAC14483
  source 1..1014: mol_type = other RNA
atggggaaagactattattgcattttgggaattgagaaaggagcttcagatgaagatattaaaaaggcttaccgaaaacaagccctcaaatttcatccggacaagaacaaatctcctcaggcagaggaaaaatttaaagaggtcgcagaagcttatgaagtattgagtgatcctaaaaagagagaaatatatgatcagtttggggaggaagggttgaaaggaggagcaggaggtactgatggacaaggaggtaccttccggtacacctttcatggcgatcctcatgctacatttgctgcatttttcggagggtccaacccctttgaaattttctttggaagacgaatgggtggtggtagagattctgaagaaatggaaatagatggtgatccttttagtgcctttggtttcagcatgaatggatatccaagagacaggaattctgtggggccatcccgcctcaaacaagatcctccagttattcatgaacttagagtatcacttgaagagatatatagtggttgtaccaaacggatgaagatttctcgaaaaaggctaaacgctgatggaaggagttacagatctgaggacaaaattcttaccattgagattaaaaaagggtggaaagaaggcaccaaaattacttttccaagagaaggagatgaaacaccaaatagtattccagcagacattgtttttatcattaaagacaaagatcatccaaaatttaaaagggatggatcaaatataatttatactgctaaaattagtttacgagaggcattgtgtggctgctcaattaatgtaccaacactggatggaagaaacatacctatgtcagtaaatgatattgtgaaacccggaatgaggagaagaattattggatatgggctgccatttccaaaaaatcctgaccaacgtggtgaccttctaatagaatttgaggtgtccttcccagatactatatcttcttcatccaaagaagtacttaggaaacatcttcctgcctcatag

SEQ ID NO: 8369 - RNA, 1014 nt, synthetic construct
  misc_feature 1..1014: note = derived and/or modified sequence opt1 fromDNJB4__Homo_sapiens__AAC14483
  source 1..1014: mol_type = other RNA
atgggcaaggactactactgcatcctggggatcgagaagggcgccagcgacgaggacatcaagaaggcctaccgcaagcaggcgctcaagttccaccccgacaagaacaagtccccgcaggccgaggagaagttcaaggaggtggccgaggcctacgaggtcctgagcgaccccaagaagcgggagatctacgaccagttcggggaggagggcctgaagggcggggccggcgggaccgacggccagggcgggaccttccgctacacgttccacggggacccccacgcgaccttcgccgccttcttcggcggctccaaccccttcgagatcttcttcgggcggcgcatgggcgggggccgggacagcgaggagatggagatcgacggcgacccgttctccgccttcgggttcagcatgaacggctacccccgcgaccggaactccgtggggcccagccgcctcaagcaggacccgcccgtgatccacgagctgcgggtctccctggaggagatctacagcggctgcaccaagcgcatgaagatctcccggaagcgcctcaacgcggacgggcggagctaccgctccgaggacaagatcctgaccatcgagatcaagaagggctggaaggagggcacgaagatcaccttcccccgggagggggacgagacccccaacagcatccccgccgacatcgtgttcatcatcaaggacaaggaccacccgaagttcaagcgcgacggctccaacatcatctacaccgccaagatcagcctgcgggaggccctctgcgggtgctccatcaacgtgcccacgctggacggccgcaacatccccatgagcgtcaacgacatcgtgaagcccgggatgcggcgccggatcatcggctacggcctgccgttccccaagaaccccgaccagcgcggggacctcctgatcgagttcgaggtgtccttccccgacaccatcagcagctccagcaaggaggtcctgcgcaagcacctcccggcctcctga

SEQ ID NO: 8370 - RNA, 1014 nt, synthetic construct
  misc_feature 1..1014: note = derived and/or modified sequence opt2 fromDNJB4__Homo_sapiens__AAC14483
  source 1..1014: mol_type = other RNA
atgggcaaggactactactgcatcctcggcatcgagaagggcgcctccgacgaggacatcaagaaggcctaccgcaagcaggccctcaagttccaccccgacaagaacaagtccccccaggccgaggagaagttcaaggaggtcgccgaggcctacgaggtcctctccgaccccaagaagcgcgagatctacgaccagttcggcgaggagggcctcaagggcggcgccggcggcaccgacggccagggcggcaccttccgctacaccttccacggcgacccccacgccaccttcgccgccttcttcggcggctccaaccccttcgagatcttcttcggccgccgcatgggcggcggccgcgactccgaggagatggagatcgacggcgaccccttctccgccttcggcttctccatgaacggctacccccgcgaccgcaactccgtcggcccctcccgcctcaagcaggacccccccgtcatccacgagctccgcgtctccctcgaggagatctactccggctgcaccaagcgcatgaagatctcccgcaagcgcctcaacgccgacggccgctcctaccgctccgaggacaagatcctcaccatcgagatcaagaagggctggaaggagggcaccaagatcaccttcccccgcgagggcgacgagacccccaactccatccccgccgacatcgtcttcatcatcaaggacaaggaccaccccaagttcaagcgcgacggctccaacatcatctacaccgccaagatctccctccgcgaggccctctgcggctgctccatcaacgtccccaccctcgacggccgcaacatccccatgtccgtcaacgacatcgtcaagcccggcatgcgccgccgcatcatcggctacggcctccccttccccaagaaccccgaccagcgcggcgacctcctcatcgagttcgaggtctccttccccgacaccatctcctcctcctccaaggaggtcctccgcaagcacctccccgcctcctga

SEQ ID NO: 8371 - RNA, 1014 nt, synthetic construct
  misc_feature 1..1014: note = derived and/or modified sequence opt3 fromDNJB4__Homo_sapiens__AAC14483
  source 1..1014: mol_type = other RNA
atgggcaaggactactattgcatcctggggattgagaaaggagccagcgatgaagacataaagaaggcttacagaaaacaggcactcaaattccaccccgataagaacaagtcccctcaagccgaggaaaaatttaaggaggtggcggaggcttatgaagtcctttctgacccgaaaaagagggagatctacgatcagttcggtgaagagggcctgaaagggggagccggcggtaccgacgggcagggaggcacatttcggtatactttccatggcgatccacacgcaacgtttgccgctttctttgggggatcaaatcccttcgaaatctttttcggtcgccgaatgggcgggggacgtgacagtgaggagatggaaattgatggcgacccttttagcgcattcggtttttccatgaacgggtacccaagagataggaactctgttggaccctcgcggttgaagcaggaccctccagtgattcatgagttacgcgtatcactggaagagatctatagcggctgtaccaagagaatgaaaataagtaggaagcggctaaatgccgatggccgctcctaccgatctgaagacaaaatcctcacaattgagatcaagaaagggtggaaggagggaactaaaattaccttccccagagaaggtgacgagacacctaatagcatcccagctgatatagtgttcattatcaaggacaaggatcacccgaaatttaagagggacggctccaacattatctacaccgccaaaatctcactgcgggaagcgctttgcgggtgtagtattaatgtccccactctggatggacgtaacatacctatgagcgtgaatgacatcgttaagccaggcatgcgcagaaggattatcggttatgggttgcccttccctaaaaacccagatcaacggggcgacctcctgatagagtttgaagtgtctttccccgatacaatttcctcaagcagtaaggaggtcctgcgaaagcatctcccggcatcttga

SEQ ID NO: 8372 - RNA, 1014 nt, synthetic construct
  misc_feature 1..1014: note = derived and/or modified sequence opt4 fromDNJB4__Homo_sapiens__AAC14483
  source 1..1014: mol_type = other RNA
atgggcaaggactactactgcatcctgggcatcgagaagggcgccagcgacgaggacatcaagaaggcctacagaaagcaggccctgaagttccaccccgacaagaacaagagcccccaggccgaggagaagttcaaggaggtggccgaggcctacgaggtgctgagcgaccccaagaagagagagatctacgaccagttcggcgaggagggcctgaagggcggcgccggcggcaccgacggccagggcggcaccttcagatacaccttccacggcgacccccacgccaccttcgccgccttcttcggcggcagcaaccccttcgagatcttcttcggcagaagaatgggcggcggcagagacagcgaggagatggagatcgacggcgaccccttcagcgccttcggcttcagcatgaacggctaccccagagacagaaacagcgtgggccccagcagactgaagcaggacccccccgtgatccacgagctgagagtgagcctggaggagatctacagcggctgcaccaagagaatgaagatcagcagaaagagactgaacgccgacggcagaagctacagaagcgaggacaagatcctgaccatcgagatcaagaagggctggaaggagggcaccaagatcaccttccccagagagggcgacgagacccccaacagcatccccgccgacatcgtgttcatcatcaaggacaaggaccaccccaagttcaagagagacggcagcaacatcatctacaccgccaagatcagcctgagagaggccctgtgcggctgcagcatcaacgtgcccaccctggacggcagaaacatccccatgagcgtgaacgacatcgtgaagcccggcatgagaagaagaatcatcggctacggcctgcccttccccaagaaccccgaccagagaggcgacctgctgatcgagttcgaggtgagcttccccgacaccatcagcagcagcagcaaggaggtgctgagaaagcacctgcccgccagctga

SEQ ID NO: 8373 - RNA, 1014 nt, synthetic construct
  misc_feature 1..1014: note = derived and/or modified sequence opt5 fromDNJB4__Homo_sapiens__AAC14483
  source 1..1014: mol_type = other RNA
atgggcaaggactactattgcatcctggggattgagaaaggagccagcgatgaagacatcaagaaggcttacagaaaacaggccctcaaattccaccccgataagaacaagtcccctcaagcggaggaaaaatttaaggaggtggctgaagcctatgaggtcctgtctgacccgaaaaagcgggagatttacgatcagttcggcgaagaggggcttaaaggaggcgccgggggaaccgacggccagggcgggacatttcgctatacgttccatggagatccccacgctacctttgccgctttctttggcgggagcaatcctttcgaaatctttttcggaagacggatgggcgggggacgcgactccgaggagatggaaattgatggcgaccccttttctgccttcggctttagcatgaacgggtaccctagagatcgcaattccgttggaccctctcggctgaagcaggaccctccggtgatccatgagctcagagtgagcctggaagagatctattccggctgtacaaagcggatgaaaattagccgcaagagacttaacgcggatgggcggtcttaccgctccgaagacaaaatcctgaccattgagatcaagaaaggatggaaggagggcacaaaaattaccttccccagagaaggggacgagacacctaatagcatccccgccgatattgtcttcatcatcaaggacaaggatcaccctaaatttaagcgggacggatctaacattatctacaccgctaaaatttccctccgcgaagccctgtgcggctgtagcatcaatgtgcccacgctggatggcagaaacattccgatgtctgttaatgacatcgtgaagcctgggatgcggagacgcatcattggatatggcctccccttccctaaaaaccccgatcaaagaggggacctgcttatcgagtttgaagtctccttccccgataccattagctcctctagcaaggaggtgctgcggaagcatctccctgcttcctga

SEQ ID NO: 8374 - protein, 348 aa, synthetic construct
  REGION 1..348: note = DNJB5__Homo_sapiens__O75953
MGKDYYKILGIPSGANEDEIKKAYRKMALKYHPDKNKEPNAEEKFKEIAEAYDVLSDPKKRGLYDQYGEEGLKTGGGTSGGSSGSFHYTFHGDPHATFASFFGGSNPFDIFFASSRSTRPFSGFDPDDMDVDEDEDPFGAFGRFGFNGLSRGPRRAPEPLYPRRKVQDPPVVHELRVSLEEIYHGSTKRMKITRRRLNPDGRTVRTEDKILHIVIKRGWKEGTKITFPKEGDATPDNIPADIVFVLKDKPHAHFRRDGTNVLYSALISLKEALCGCTVNIPTIDGRVIPLPCNDVIKPGTVKRLRGEGLPFPKVPTQRGDLIVEFKVRFPDRLTPQTRQILKQHLPCS

SEQ ID NO: 8375 - RNA, 1047 nt, synthetic construct
  misc_feature 1..1047: note = DNJB5__Homo_sapiens__AAC35860
  source 1..1047: mol_type = other RNA
atgggaaaagattattacaagattcttgggatcccatcgggggccaacgaggatgagatcaagaaagcctaccggaagatggccttgaagtaccacccagacaagaataaagaacccaacgctgaggagaagtttaaggagattgcagaggcctatgatgtgctaagtgaccccaagaaacggggcctgtatgaccagtatggggaggaaggcctgaagaccggcggtggcacatcaggtggctccagtggctcctttcactacacctttcatggggacccccatgccacctttgcctccttctttggtggctccaaccccttcgatatcttctttgccagcagccgctccactcggcccttcagtggctttgacccagatgacatggatgtggatgaagatgaggacccatttggcgctttcggccgttttggcttcaatgggctgagtaggggtccaaggcgagccccagaaccactgtaccctcggcgcaaggtgcaggaccccccagtggtgcacgagctgcgggtgtccctggaggagatctaccatggctccaccaagcgcatgaagatcacaaggcgtcgcctcaaccctgatgggcgaactgtgcgcaccgaggacaagatcctgcacatagtcatcaagcgtggctggaaggaaggcaccaagatcaccttccccaaagaaggcgacgccacacctgacaacatccctgctgacatcgtctttgtgctcaaagacaagccccatgcacacttccgccgagatggcaccaacgtgctctacagtgccctgatcagcctcaaggaggcgctgtgtggctgcactgtgaacattcccactatcgacggccgagtgatccctttgccctgcaatgatgtcatcaagccaggcaccgtgaagagactccgtggggagggccttcccttccccaaagtgccaactcagcgaggagacctcattgttgagttcaaagttcgcttcccagacagattaacaccacagacaagacagatccttaagcagcacctaccctgttcctag

SEQ ID NO: 8376 - RNA, 1047 nt, synthetic construct
  misc_feature 1..1047: note = derived and/or modified sequence opt1 fromDNJB5__Homo_sapiens__AAC35860
  source 1..1047: mol_type = other RNA
atgggcaaggactactacaagatcctggggatccccagcggcgccaacgaggacgagatcaagaaggcctaccgcaagatggcgctcaagtaccacccggacaagaacaaggagcccaacgccgaggagaagttcaaggagatcgccgaggcctacgacgtgctgtccgaccccaagaagcgggggctgtacgaccagtacggcgaggaggggctcaagaccggcggcgggaccagcggcgggtccagcggctccttccactacacgttccacggggacccccacgccaccttcgcgagcttcttcggcggctccaacccgttcgacatcttcttcgccagctcccgcagcacccggcccttctccgggttcgaccccgacgacatggacgtcgacgaggacgaggaccccttcggcgccttcgggcgcttcggcttcaacggcctgagccgggggccgcgccgggcccccgagcccctgtacccccgccggaaggtgcaggacccgcccgtggtccacgagctccgcgtgtccctggaggagatctaccacggcagcaccaagcggatgaagatcacgcgccggcgcctgaaccccgacgggcggaccgtgcgcaccgaggacaagatcctccacatcgtcatcaagcggggctggaaggaggggaccaagatcacgttccccaaggagggcgacgcgaccccggacaacatccccgccgacatcgtgttcgtgctgaaggacaagccccacgcccacttccgccgggacggcaccaacgtcctgtactccgccctcatcagcctgaaggaggccctgtgcgggtgcaccgtgaacatccccacgatcgacggccgcgtgatcccgctcccctgcaacgacgtcatcaagcccgggaccgtgaagcggctgcgcggcgaggggctgcccttcccgaaggtgcccacccagcgcggcgacctcatcgtcgagttcaaggtgcggttccccgaccgcctgacgccccagacccggcagatcctgaagcagcacctcccgtgctcctga

SEQ ID NO: 8377 - RNA, 1047 nt, synthetic construct
  misc_feature 1..1047: note = derived and/or modified sequence opt2 fromDNJB5__Homo_sapiens__AAC35860
  source 1..1047: mol_type = other RNA
atgggcaaggactactacaagatcctcggcatcccctccggcgccaacgaggacgagatcaagaaggcctaccgcaagatggccctcaagtaccaccccgacaagaacaaggagcccaacgccgaggagaagttcaaggagatcgccgaggcctacgacgtcctctccgaccccaagaagcgcggcctctacgaccagtacggcgaggagggcctcaagaccggcggcggcacctccggcggctcctccggctccttccactacaccttccacggcgacccccacgccaccttcgcctccttcttcggcggctccaaccccttcgacatcttcttcgcctcctcccgctccacccgccccttctccggcttcgaccccgacgacatggacgtcgacgaggacgaggaccccttcggcgccttcggccgcttcggcttcaacggcctctcccgcggcccccgccgcgcccccgagcccctctacccccgccgcaaggtccaggacccccccgtcgtccacgagctccgcgtctccctcgaggagatctaccacggctccaccaagcgcatgaagatcacccgccgccgcctcaaccccgacggccgcaccgtccgcaccgaggacaagatcctccacatcgtcatcaagcgcggctggaaggagggcaccaagatcaccttccccaaggagggcgacgccacccccgacaacatccccgccgacatcgtcttcgtcctcaaggacaagccccacgcccacttccgccgcgacggcaccaacgtcctctactccgccctcatctccctcaaggaggccctctgcggctgcaccgtcaacatccccaccatcgacggccgcgtcatccccctcccctgcaacgacgtcatcaagcccggcaccgtcaagcgcctccgcggcgagggcctccccttccccaaggtccccacccagcgcggcgacctcatcgtcgagttcaaggtccgcttccccgaccgcctcaccccccagacccgccagatcctcaagcagcacctcccctgctcctga

SEQ ID NO: 8378 - RNA, 1047 nt, synthetic construct
  misc_feature 1..1047: note = derived and/or modified sequence opt3 fromDNJB5__Homo_sapiens__AAC35860
  source 1..1047: mol_type = other RNA
atgggcaaggactactataaaatcctggggattcccagcggagccaacgaggatgaaataaagaaggcttacagaaaaatggcactcaaatatcaccctgacaagaataaggagccaaacgccgaagagaaattcaaggaaatcgcggaggcttacgatgtgctttccgacccgaaaaagaggggtctgtatgatcagtacggcgaggaagggttgaaaaccggaggcggtacatctgggggatcaagtggcagctttcattatactttccacggcgacccccatgccacgtttgcatccttctttgggggatctaatcctttcgatattttcttcgcctcgtcacggagcacccgcccatttagtggtttcgaccccgatgacatggatgtcgacgaggatgaagacccttttggcgctttcgggcgatttggattcaacggcttatcccgtggtccaagaagggcacccgagcctctgtacccacggcgcaaggttcaagacccgcccgtggtacacgagctaagagtgtctctcgaagagatctaccatgggagcacaaagaggatgaaaattactcggcgccgactgaatcctgatggaagaaccgtcaggacagaagacaagatccttcacatagtgatcaaacggggctggaaggagggcaccaaaattactttcccaaaggaaggggatgccacacccgacaacatccctgctgatattgtttttgtgctgaaagacaagccacacgcccatttccgtcgcgatggaaccaatgtcttgtattccgcgctcatctcactgaaggaggcactgtgcggttgtacggtgaacatacccactattgacggcagagtaatcccgctcccttgcaatgatgttattaaacccgggaccgtgaagaggttacggggagagggcctgccatttcctaaagtccccacacagcgaggtgaccttatcgtggaatttaaggtgcgctttccagatagattgactccccagaccaggcagatcctgaaacaacacctaccttgtagttga

SEQ ID NO: 8379 - RNA, 1047 nt, synthetic construct
  misc_feature 1..1047: note = derived and/or modified sequence opt4 fromDNJB5__Homo_sapiens__AAC35860
  source 1..1047: mol_type = other RNA
atgggcaaggactactacaagatcctgggcatccccagcggcgccaacgaggacgagatcaagaaggcctacagaaagatggccctgaagtaccaccccgacaagaacaaggagcccaacgccgaggagaagttcaaggagatcgccgaggcctacgacgtgctgagcgaccccaagaagagaggcctgtacgaccagtacggcgaggagggcctgaagaccggcggcggcaccagcggcggcagcagcggcagcttccactacaccttccacggcgacccccacgccaccttcgccagcttcttcggcggcagcaaccccttcgacatcttcttcgccagcagcagaagcaccagacccttcagcggcttcgaccccgacgacatggacgtggacgaggacgaggaccccttcggcgccttcggcagattcggcttcaacggcctgagcagaggccccagaagagcccccgagcccctgtaccccagaagaaaggtgcaggacccccccgtggtgcacgagctgagagtgagcctggaggagatctaccacggcagcaccaagagaatgaagatcaccagaagaagactgaaccccgacggcagaaccgtgagaaccgaggacaagatcctgcacatcgtgatcaagagaggctggaaggagggcaccaagatcaccttccccaaggagggcgacgccacccccgacaacatccccgccgacatcgtgttcgtgctgaaggacaagccccacgcccacttcagaagagacggcaccaacgtgctgtacagcgccctgatcagcctgaaggaggccctgtgcggctgcaccgtgaacatccccaccatcgacggcagagtgatccccctgccctgcaacgacgtgatcaagcccggcaccgtgaagagactgagaggcgagggcctgcccttccccaaggtgcccacccagagaggcgacctgatcgtggagttcaaggtgagattccccgacagactgaccccccagaccagacagatcctgaagcagcacctgccctgcagctga

SEQ ID NO: 8380 - RNA, 1047 nt, synthetic construct
  misc_feature 1..1047: note = derived and/or modified sequence opt5 fromDNJB5__Homo_sapiens__AAC35860
  source 1..1047: mol_type = other RNA
atgggcaaggactactataaaatcctggggattcccagcggagccaacgaagatgaaatcaagaaggcttacagaaaaatggccctcaaatatcaccctgacaagaataaggagccgaacgcggaagagaaattcaaggaaattgctgaggcctacgatgtgctgtccgaccccaaaaagcggggcctttatgatcagtacggggaggaaggactgaaaaccggcgggggaacatctggcggcagctccgggtcttttcactatacgttccacggagaccctcatgccacctttgctagcttctttggcgggtccaatcccttcgatatctttttcgcctctagccgctccacaagaccttttagcggattcgaccccgatgacatggatgtcgacgaggatgaagacccttttggcgctttcgggcggtttggattcaacggcctctctcgcggcccgagacgggcccccgagcctctgtacccccgcagaaaggttcaagaccctcccgtggtgcacgagcttcgggtctccctggaagagatttaccatgggagcaccaagcgcatgaaaatcacaagacggcgcctcaatccggatggaagaaccgtgcggacagaagacaagatcctgcacattgttatcaaacgcggctggaaggaggggaccaaaattacgttccctaaggaaggagatgcgacccccgacaacatccctgccgatattgtgtttgtcctgaaagacaagccccacgctcatttcagacgggatggcacaaatgtgctctattctgccctgatctcccttaaggaggctctgtgcgggtgtaccgttaacattcccacaatcgacggaagagtgatccctctcccgtgcaatgatgtcattaaacccggcaccgtgaagcgcctgcggggcgaggggcttccttttcccaaagtgcctacgcagagaggagacctgatcgtcgagttcaaggttcgctttcccgatcggctcacaccgcagaccagacagattctgaaacaacatctgccttgtagctga

SEQ ID NO: 8381 - protein, 326 aa, synthetic construct
  REGION 1..326: note = DNJB6__Homo_sapiens__O75190
MVDYYEVLGVQRHASPEDIKKAYRKLALKWHPDKNPENKEEAERKFKQVAEAYEVLSDAKKRDIYDKYGKEGLNGGGGGGSHFDSPFEFGFTFRNPDDVFREFFGGRDPFSFDFFEDPFEDFFGNRRGPRGSRSRGTGSFFSAFSGFPSFGSGFSSFDTGFTSFGSLGHGGLTSFSSTSFGGSGMGNFKSISTSTKMVNGRKITTKRIVENGQERVEVEEDGQLKSLTINGVADDDALAEERMRRGQNALPAQPAGLRPPKPPRPASLLRHAPHCLSEEEGEQDRPRAPGPWDPLASAAGLKEGGKRKKQKQREESKKKKSTKGNH

SEQ ID NO: 8382 - RNA, 981 nt, synthetic construct
  misc_feature 1..981: note = DNJB6__Homo_sapiens__AAH02446
  source 1..981: mol_type = other RNA
atggtggattactatgaagttctaggcgtgcagagacatgcctcacccgaggatattaaaaaggcatatcggaaactggcactgaagtggcatccagataaaaatcctgagaataaagaagaagcagagagaaaattcaagcaagtagcggaggcatatgaagtgctgtcggatgctaagaaacgggacatctatgacaaatatggcaaagaaggattaaatggtggaggaggaggtggaagtcattttgacagtccatttgaatttggcttcacattccgtaacccagatgatgtcttcagggaattttttggtggaagggacccattttcatttgacttctttgaagacccttttgaggacttctttgggaatcgaaggggtccccgaggaagcagaagccgagggacggggtcgtttttctctgcgttcagtggatttccgtcttttggaagtggattttcttcttttgatacaggatttacttcatttgggtcactaggtcacgggggcctcacttcattctcttccacgtcatttggtggtagtggcatgggcaacttcaaatcgatatcaacttcaactaaaatggttaatggcagaaaaatcactacaaagagaattgtcgagaacggtcaagaaagagtagaagttgaagaagatggccagttaaagtccttaacaataaatggtgtggccgacgacgatgccctcgctgaggagcgcatgcggagaggccagaacgccctgccagcccagcctgccggcctccgcccgccgaagccgccccggcctgcctcgctgctgagacacgcgcctcactgtctctctgaggaggagggcgagcaggaccgacctcgggcacccgggccctgggaccccctcgcgtccgcagcaggattgaaagaaggtggcaagaggaagaagcagaagcagagagaggagtcgaagaagaagaagtcgaccaaaggcaatcactag

SEQ ID NO: 8383 - RNA, 981 nt, synthetic construct
  misc_feature 1..981: note = derived and/or modified sequence opt1 fromDNJB6__Homo_sapiens__AAH02446
  source 1..981: mol_type = other RNA
atggtggactactacgaggtcctgggcgtgcagcgccacgccagccccgaggacatcaagaaggcctaccggaagctcgcgctgaagtggcacccggacaagaaccccgagaacaaggaggaggccgagcgcaagttcaagcaggtcgccgaggcctacgaggtgctgagcgacgccaagaagcgggacatctacgacaagtacgggaaggagggcctcaacgggggcgggggcggcgggagccacttcgactcccccttcgagttcggcttcaccttccgcaaccccgacgacgtgttccgggagttcttcgggggccgcgacccgttcagcttcgacttcttcgaggaccccttcgaggacttcttcgggaaccggcgcggcccccggggctcccgcagccgggggaccggctccttcttcagcgcgttctccgggttccccagcttcggctccggcttcagctccttcgacacggggttcaccagcttcggctccctggggcacggcgggctgaccagcttctccagcacctccttcggcggcagcgggatgggcaacttcaagagcatctccacgagcaccaagatggtgaacgggcgcaagatcaccaccaagcggatcgtcgagaacggccaggagcgcgtggaggtggaggaggacgggcagctcaagtccctgacgatcaacggcgtcgccgacgacgacgccctggccgaggagcggatgcgccggggccagaacgcgctcccggcccagcccgccgggctgcgcccgcccaagccgccccggcccgccagcctgctccgccacgcgccccactgcctgtccgaggaggagggcgagcaggaccggccccgcgcccccgggccctgggaccccctggccagcgccgccggcctcaaggagggcgggaagcgcaagaagcagaagcagcgggaggagtccaagaagaagaagtccaccaagggcaaccactga

SEQ ID NO: 8384 - RNA, 981 nt, synthetic construct
  misc_feature 1..981: note = derived and/or modified sequence opt2 fromDNJB6__Homo_sapiens__AAH02446
  source 1..981: mol_type = other RNA
atggtcgactactacgaggtcctcggcgtccagcgccacgcctcccccgaggacatcaagaaggcctaccgcaagctcgccctcaagtggcaccccgacaagaaccccgagaacaaggaggaggccgagcgcaagttcaagcaggtcgccgaggcctacgaggtcctctccgacgccaagaagcgcgacatctacgacaagtacggcaaggagggcctcaacggcggcggcggcggcggctcccacttcgactcccccttcgagttcggcttcaccttccgcaaccccgacgacgtcttccgcgagttcttcggcggccgcgaccccttctccttcgacttcttcgaggaccccttcgaggacttcttcggcaaccgccgcggcccccgcggctcccgctcccgcggcaccggctccttcttctccgccttctccggcttcccctccttcggctccggcttctcctccttcgacaccggcttcacctccttcggctccctcggccacggcggcctcacctccttctcctccacctccttcggcggctccggcatgggcaacttcaagtccatctccacctccaccaagatggtcaacggccgcaagatcaccaccaagcgcatcgtcgagaacggccaggagcgcgtcgaggtcgaggaggacggccagctcaagtccctcaccatcaacggcgtcgccgacgacgacgccctcgccgaggagcgcatgcgccgcggccagaacgccctccccgcccagcccgccggcctccgcccccccaagcccccccgccccgcctccctcctccgccacgccccccactgcctctccgaggaggagggcgagcaggaccgcccccgcgcccccggcccctgggaccccctcgcctccgccgccggcctcaaggagggcggcaagcgcaagaagcagaagcagcgcgaggagtccaagaagaagaagtccaccaagggcaaccactga

SEQ ID NO: 8385 - RNA, 981 nt, synthetic construct
  misc_feature 1..981: note = derived and/or modified sequence opt3 fromDNJB6__Homo_sapiens__AAH02446
  source 1..981: mol_type = other RNA
atggtggactactatgaggtcctgggcgttcagagacacgccagccccgaagatatcaagaaggcttacaggaaactcgcacttaaatggcatcctgacaagaacccagagaataaagaagaggccgaacggaagttcaagcaagtggcggaggcttatgaggtactgtccgatgccaaaaagcgcgacatttacgataaatatgggaaggaaggattgaacggtggcgggggaggcggttctcactttgactcaccgttcgagtttgggttcacctttcgaaatcccgatgacgtgttccgtgaatttttcggaggcagagatccttttagtttcgactttttcgaggatccatttgaggacttcttcggcaacaggcgggggccccgcggaagcagatccaggggtacaggctcgtttttctctgcattttcagggttccctagctttggaagtggcttctcctcttttgatactggtttcacgagctttgggtccttaggacatggcggcctgacctcattcagtagcacatcttttgggggatccggtatgggcaatttcaaatcaataagcaccagtactaagatggtcaacgggcggaagatcacaaccaaacgcattgtggaaaatggacaggagcgagttgaagtggaggaagacggccagctaaagtctctcactatcaacggtgtcgccgacgatgacgctctggcagaggagagaatgaggcgggggcagaatgcccttccagctcaacccgccggcctgcgtcctccaaaaccgccccgccctgcgtccttgctcagacacgcaccacattgcctgagcgaagaggaaggagagcaggataggccccgggcccctggcccatgggaccccctggcttcggccgcagggctcaaggaaggaggtaaacgaaagaaacagaagcagcgcgaggagtctaagaaaaagaaatccacaaagggcaaccactga

SEQ ID NO: 8386 - RNA, 981 nt, synthetic construct
  misc_feature 1..981: note = derived and/or modified sequence opt4 fromDNJB6__Homo_sapiens__AAH02446
  source 1..981: mol_type = other RNA
atggtggactactacgaggtgctgggcgtgcagagacacgccagccccgaggacatcaagaaggcctacagaaagctggccctgaagtggcaccccgacaagaaccccgagaacaaggaggaggccgagagaaagttcaagcaggtggccgaggcctacgaggtgctgagcgacgccaagaagagagacatctacgacaagtacggcaaggagggcctgaacggcggcggcggcggcggcagccacttcgacagccccttcgagttcggcttcaccttcagaaaccccgacgacgtgttcagagagttcttcggcggcagagaccccttcagcttcgacttcttcgaggaccccttcgaggacttcttcggcaacagaagaggccccagaggcagcagaagcagaggcaccggcagcttcttcagcgccttcagcggcttccccagcttcggcagcggcttcagcagcttcgacaccggcttcaccagcttcggcagcctgggccacggcggcctgaccagcttcagcagcaccagcttcggcggcagcggcatgggcaacttcaagagcatcagcaccagcaccaagatggtgaacggcagaaagatcaccaccaagagaatcgtggagaacggccaggagagagtggaggtggaggaggacggccagctgaagagcctgaccatcaacggcgtggccgacgacgacgccctggccgaggagagaatgagaagaggccagaacgccctgcccgcccagcccgccggcctgagaccccccaagccccccagacccgccagcctgctgagacacgccccccactgcctgagcgaggaggagggcgagcaggacagacccagagcccccggcccctgggaccccctggccagcgccgccggcctgaaggagggcggcaagagaaagaagcagaagcagagagaggagagcaagaagaagaagagcaccaagggcaaccactga

SEQ ID NO: 8387 - RNA, 981 nt, synthetic construct
  misc_feature 1..981: note = derived and/or modified sequence opt5 fromDNJB6__Homo_sapiens__AAH02446
  source 1..981: mol_type = other RNA
atggtggactactatgaggtcctgggcgttcagagacacgccagccccgaagatatcaagaaggcttaccggaaactcgccctgaaatggcatcctgacaagaacccggagaataaagaagaggcggaacgcaagttcaagcaagtggctgaggcctatgaggtgctttccgatgccaaaaagagagacatttacgataaatatgggaaggaaggactgaacggcgggggaggcgggggatctcactttgacagccccttcgagtttggcttcacctttcggaatcctgatgacgtcttccgcgaatttttcggcgggagagatcccttttccttcgactttttcgaggatccttttgaggacttcttcggaaaccggcgcggccccagagggtctcggagccgcggaacaggctcctttttctctgcttttagcgggttcccttcctttggaagcggcttctcttcctttgatacgggcttcaccagctttgggtctctcggacatggcgggctgacatccttcagctctacctcctttggaggcagcgggatgggaaatttcaaatccatctctacaagcaccaagatggtgaacggcagaaagattacaaccaaacggatcgttgaaaatggccaggagcgcgtggaagtcgaggaagacgggcagcttaagtccctgacgattaacggagtggccgacgatgacgctctcgccgaggagagaatgcggcgcggccagaatgcgctgccggcccaacccgctgggctgagacctcccaaacctccccggccggccagcctcctgagacacgctcctcattgcctttctgaagaggaaggagagcaggatcgcccccgggcccctggcccctgggaccccctggcgtccgccgctgggctcaaggaaggcggaaaaagaaagaaacagaagcagcgcgaggagagcaagaaaaagaaatctaccaagggcaaccactga

SEQ ID NO: 8388 - protein, 309 aa, synthetic construct
  REGION 1..309: note = DNJB7__Homo_sapiens__Q7Z6W7
MVDYYEVLGLQRYASPEDIKKAYHKVALKWHPDKNPENKEEAERKFKEVAEAYEVLSNDEKRDIYDKYGTEGLNGGGSHFDDECEYGFTFHKPDDVFKEIFHERDPFSFHFFEDSLEDLLNRPGSSYGNRNRDAGYFFSTASEYPIFEKFSSYDTGYTSQGSLGHEGLTSFSSLAFDNSGMDNYISVTTSDKIVNGRNINTKKIIESDQEREAEDNGELTFFLVNSVANEEGFAKECSWRTQSFNNYSPNSHSSKHVSQYTFVDNDEGGISWVTSNRDPPIFSAGVKEGGKRKKKKRKEVQKKSTKRNC

SEQ ID NO: 8389 - RNA, 930 nt, synthetic construct
  misc_feature 1..930: note = DNJB7__Homo_sapiens__AAI12136
  source 1..930: mol_type = other RNA
atggtggattactatgaagttctaggactgcaaagatatgcttcacctgaggacattaaaaaagcttatcataaagtggcacttaaatggcaccctgataaaaatccagaaaataaagaagaagcagagagaaaattcaaagaagtagctgaggcatacgaggtattatcaaatgatgagaaacgggacatttatgataaatatggcacagaaggattaaacggaggtggaagtcattttgatgatgaatgtgagtacggcttcacattccataagccagatgatgtttttaaagaaatttttcatgaaagggatccattttcttttcacttctttgaagactcgcttgaggacctgttaaatcgtccaggaagctcctatggaaacagaaacagagatgcaggatactttttctccactgccagtgaatatccaatttttgagaaattttcttcatatgatacaggatatacatcacagggttcattggggcatgaaggccttacttctttctcttccctggcttttgataatagtgggatggacaactacatatctgttacaacttcagacaaaatcgttaatggcagaaatattaatacaaagaaaattattgaaagtgatcaagaaagagaagctgaagataatggagagttgacattttttcttgtaaatagtgtggccaatgaagagggctttgcaaaagaatgcagctggagaacacagtcattcaacaactattcaccaaattctcacagctccaaacatgtatctcaatatactttcgtggacaatgatgagggaggtatatcttgggttaccagcaacagagatccccctattttctcagcaggagtcaaagagggtggtaagaggaaaaaaaagaagcgtaaagaggtgcaaaagaagtctaccaaaaggaattgttaa

SEQ ID NO: 8390 - RNA, 930 nt, synthetic construct
  misc_feature 1..930: note = derived and/or modified sequence opt1 fromDNJB7__Homo_sapiens__AAI12136
  source 1..930: mol_type = other RNA
atggtggactactacgaggtcctgggcctccagcgctacgccagccccgaggacatcaagaaggcctaccacaaggtggcgctgaagtggcacccggacaagaaccccgagaacaaggaggaggccgagcggaagttcaaggaggtggccgaggcctacgaggtcctgagcaacgacgagaagcgcgacatctacgacaagtacgggaccgagggcctcaacgggggcgggagccacttcgacgacgagtgcgagtacggcttcaccttccacaagcccgacgacgtgttcaaggagatcttccacgagcgggaccccttctccttccacttcttcgaggacagcctggaggacctgctcaaccgcccgggctccagctacgggaaccggaaccgcgacgccggctacttcttctccacggcgagcgagtaccccatcttcgagaagttctccagctacgacaccgggtacacctcccagggcagcctggggcacgagggcctgacctccttcagctccctcgccttcgacaacagcggcatggacaactacatctccgtgacgaccagcgacaagatcgtcaacgggcggaacatcaacaccaagaagatcatcgagtccgaccaggagcgcgaggccgaggacaacggcgagctgaccttcttcctggtgaacagcgtggccaacgaggaggggttcgcgaaggagtgcagctggcggacgcagtccttcaacaactacagccccaactcccacagctccaagcacgtcagccagtacaccttcgtggacaacgacgagggcggcatctcctgggtgaccagcaaccgcgacccgcccatcttctccgccggggtcaaggagggcgggaagcggaagaagaagaagcgcaaggaggtgcagaagaagtccaccaagcggaactgctga

SEQ ID NO: 8391 - RNA, 930 nt, synthetic construct
  misc_feature 1..930: note = derived and/or modified sequence opt2 fromDNJB7__Homo_sapiens__AAI12136
  source 1..930: mol_type = other RNA
atggtcgactactacgaggtcctcggcctccagcgctacgcctcccccgaggacatcaagaaggcctaccacaaggtcgccctcaagtggcaccccgacaagaaccccgagaacaaggaggaggccgagcgcaagttcaaggaggtcgccgaggcctacgaggtcctctccaacgacgagaagcgcgacatctacgacaagtacggcaccgagggcctcaacggcggcggctcccacttcgacgacgagtgcgagtacggcttcaccttccacaagcccgacgacgtcttcaaggagatcttccacgagcgcgaccccttctccttccacttcttcgaggactccctcgaggacctcctcaaccgccccggctcctcctacggcaaccgcaaccgcgacgccggctacttcttctccaccgcctccgagtaccccatcttcgagaagttctcctcctacgacaccggctacacctcccagggctccctcggccacgagggcctcacctccttctcctccctcgccttcgacaactccggcatggacaactacatctccgtcaccacctccgacaagatcgtcaacggccgcaacatcaacaccaagaagatcatcgagtccgaccaggagcgcgaggccgaggacaacggcgagctcaccttcttcctcgtcaactccgtcgccaacgaggagggcttcgccaaggagtgctcctggcgcacccagtccttcaacaactactcccccaactcccactcctccaagcacgtctcccagtacaccttcgtcgacaacgacgagggcggcatctcctgggtcacctccaaccgcgacccccccatcttctccgccggcgtcaaggagggcggcaagcgcaagaagaagaagcgcaaggaggtccagaagaagtccaccaagcgcaactgctga

SEQ ID NO: 8392 - RNA, 930 nt, synthetic construct
  misc_feature 1..930: note = derived and/or modified sequence opt3 fromDNJB7__Homo_sapiens__AAI12136
  source 1..930: mol_type = other RNA
atggtggactactatgaggtcctgggcctccagagatacgccagccccgaagatatcaagaaggcttatcacaaagttgcacttaaatggcatcctgacaagaacccagagaataaagaagaggccgaaaggaagttcaaggaggtggcggaggcttacgaagtactgtccaacgatgagaaacgggacatttatgataagtacgggaccgaaggattgaatggtggcgggtctcactttgacgatgagtgcgagtatggattcacatttcataaaccggacgatgtgttcaaggaaatatttcacgagcgcgaccccttctcatttcatttctttgaagatagtttagaggacctgctaaaccgacctggcagctcctacggtaatcgtaacagagatgccgggtacttcttttctactgcatcggaatatccaatcttcgagaaattttcaagctacgacacgggatataccagtcaaggctccctcggccacgaggggctgacatctttcagctcccttgccttcgacaattcaggaatggataactacattagtgtcactaccagcgacaagatcgtgaatggtaggaacattaatacaaagaaaatcatagaatctgatcaggagcgggaagctgaggacaacggcgaactgacctttttcttggttaattccgtggcaaacgaggaggggtttgccaaggaatgttcatggcgcactcagagcttcaataactatagtcccaactctcactccagcaaacatgtctcgcagtacacatttgtggataatgacgagggaggcatctcttgggtaacctccaacagagatcctccaattttctcagctggtgttaaggaagggggaaaaaggaagaaaaagaagcggaaagaggtgcaaaagaaaagtacgaagcgcaattgctga

SEQ ID NO: 8393 - RNA, 930 nt, synthetic construct
  misc_feature 1..930: note = derived and/or modified sequence opt4 fromDNJB7__Homo_sapiens__AAI12136
  source 1..930: mol_type = other RNA
atggtggactactacgaggtgctgggcctgcagagatacgccagccccgaggacatcaagaaggcctaccacaaggtggccctgaagtggcaccccgacaagaaccccgagaacaaggaggaggccgagagaaagttcaaggaggtggccgaggcctacgaggtgctgagcaacgacgagaagagagacatctacgacaagtacggcaccgagggcctgaacggcggcggcagccacttcgacgacgagtgcgagtacggcttcaccttccacaagcccgacgacgtgttcaaggagatcttccacgagagagaccccttcagcttccacttcttcgaggacagcctggaggacctgctgaacagacccggcagcagctacggcaacagaaacagagacgccggctacttcttcagcaccgccagcgagtaccccatcttcgagaagttcagcagctacgacaccggctacaccagccagggcagcctgggccacgagggcctgaccagcttcagcagcctggccttcgacaacagcggcatggacaactacatcagcgtgaccaccagcgacaagatcgtgaacggcagaaacatcaacaccaagaagatcatcgagagcgaccaggagagagaggccgaggacaacggcgagctgaccttcttcctggtgaacagcgtggccaacgaggagggcttcgccaaggagtgcagctggagaacccagagcttcaacaactacagccccaacagccacagcagcaagcacgtgagccagtacaccttcgtggacaacgacgagggcggcatcagctgggtgaccagcaacagagacccccccatcttcagcgccggcgtgaaggagggcggcaagagaaagaagaagaagagaaaggaggtgcagaagaagagcaccaagagaaactgctga

SEQ ID NO: 8394 - RNA, 930 nt, synthetic construct
  misc_feature 1..930: note = derived and/or modified sequence opt5 fromDNJB7__Homo_sapiens__AAI12136
  source 1..930: mol_type = other RNA
atggtggactactatgaggtcctgggcctccagagatacgccagccccgaagatatcaagaaggcttatcacaaagttgccctgaaatggcatcctgacaagaacccggagaataaagaagaggcggaacggaagttcaaggaggtggctgaggcctacgaagtgctttccaacgatgagaaacgcgacatttatgataagtacgggaccgaaggactgaatggcgggggatctcactttgacgatgagtgcgagtatggcttcacatttcataaacccgacgatgtcttcaaggaaatctttcacgagagagaccctttcagctttcatttctttgaagattccctcgaggacctgcttaaccggcccgggtctagctacggaaatcgcaacagagatgccggctacttcttttccacggcttctgaatatcctattttcgagaaatttagctcctacgacaccggctatacaagccaagggtctctgggacacgagggcctcacctccttcagctctctggccttcgacaattccgggatggataactacatcagcgtgacaacctctgacaagattgttaatggacggaacatcaatacaaagaaaatcattgaatccgatcaggagcgcgaagctgaggacaacggcgaactgacctttttcctcgtgaatagcgtcgccaacgaggaggggtttgcgaaggaatgttcctggagaacgcagtctttcaataactatagccccaactcccacagctctaaacatgtgtcccagtacacctttgttgataatgacgagggaggcatcagctgggtgacatctaaccgggatcctccgattttcagcgccggcgtcaaggaagggggaaaacgcaagaaaaagaagagaaaagaggtgcaaaagaaatccaccaagcggaattgctga

SEQ ID NO: 8395 - protein, 232 aa, synthetic construct
  REGION 1..232: note = DNJB8__Homo_sapiens__Q8NHS0
MANYYEVLGVQASASPEDIKKAYRKLALRWHPDKNPDNKEEAEKKFKLVSEAYEVLSDSKKRSLYDRAGCDSWRAGGGASTPYHSPFDTGYTFRNPEDIFREFFGGLDPFSFEFWDSPFNSDRGGRGHGLRGAFSAGFGEFPAFMEAFSSFNMLGCSGGSHTTFSSTSFGGSSSGSSGFKSVMSSTEMINGHKVTTKRIVENGQERVEVEEDGQLKSVTVNGKEQLKWMDSK

SEQ ID NO: 8396 - RNA, 699 nt, synthetic construct
  misc_feature 1..699: note = DNJB8__Homo_sapiens__AAH29521
  source 1..699: mol_type = other RNA
atggctaactactacgaagtgctgggcgtgcaggccagcgcttccccggaggacatcaagaaagcctaccgcaagctggcccttcgttggcaccccgacaagaaccctgacaataaggaggaggcggagaagaagttcaagctggtgtctgaggcctatgaggttctgtctgactccaagaaacgctccctgtatgaccgtgctggctgtgacagctggcgggctggtggcggggccagcacgccctaccacagccccttcgacaccggctacaccttccgtaaccctgaggacatcttccgggagtttttcggtggcctggaccctttctcctttgagttctgggacagcccattcaatagtgaccgtggtggccggggccatggcctgaggggggccttctcggcaggctttggagaatttccggccttcatggaggccttctcatccttcaacatgctgggctgcagcgggggcagccacaccaccttctcatccacctccttcgggggctccagttctggcagctcggggttcaagtcggtgatgtcgtccaccgagatgatcaatggccacaaggtcaccaccaagcgcatcgtggagaacgggcaggagcgcgtggaggtggaggaagacgggcagctcaagtcggtgactgtgaacggcaaggagcagctcaaatggatggacagcaagtag

SEQ ID NO: 8397 - RNA, 699 nt, synthetic construct
  misc_feature 1..699: note = derived and/or modified sequence opt1 fromDNJB8__Homo_sapiens__AAH29521
  source 1..699: mol_type = other RNA
atggccaactactacgaggtgctgggcgtccaggccagcgcgtcccccgaggacatcaagaaggcctaccgcaagctcgccctgcggtggcacccggacaagaaccccgacaacaaggaggaggccgagaagaagttcaagctggtgagcgaggcctacgaggtgctctccgacagcaagaagcgctccctgtacgaccgggcggggtgcgacagctggcgcgccggcgggggcgcctccaccccctaccacagccccttcgacaccgggtacacgttccggaacccggaggacatcttccgcgagttcttcggcggcctggaccccttctccttcgagttctgggacagccccttcaactccgaccgcgggggccgggggcacggcctccgcggggccttcagcgcgggcttcggcgagttccccgccttcatggaggccttctccagcttcaacatgctggggtgctccggcgggagccacaccaccttctccagcacctccttcggcggcagcagctccgggagctccggcttcaagagcgtcatgtccagcacggagatgatcaacgggcacaaggtgaccaccaagcggatcgtggagaacggccaggagcgggtcgaggtggaggaggacgggcagctgaagtccgtgaccgtcaacggcaaggagcagctcaagtggatggacagcaagtga

SEQ ID NO: 8398 - RNA, 699 nt, synthetic construct
  misc_feature 1..699: note = derived and/or modified sequence opt2 fromDNJB8__Homo_sapiens__AAH29521
  source 1..699: mol_type = other RNA
atggccaactactacgaggtcctcggcgtccaggcctccgcctcccccgaggacatcaagaaggcctaccgcaagctcgccctccgctggcaccccgacaagaaccccgacaacaaggaggaggccgagaagaagttcaagctcgtctccgaggcctacgaggtcctctccgactccaagaagcgctccctctacgaccgcgccggctgcgactcctggcgcgccggcggcggcgcctccaccccctaccactcccccttcgacaccggctacaccttccgcaaccccgaggacatcttccgcgagttcttcggcggcctcgaccccttctccttcgagttctgggactcccccttcaactccgaccgcggcggccgcggccacggcctccgcggcgccttctccgccggcttcggcgagttccccgccttcatggaggccttctcctccttcaacatgctcggctgctccggcggctcccacaccaccttctcctccacctccttcggcggctcctcctccggctcctccggcttcaagtccgtcatgtcctccaccgagatgatcaacggccacaaggtcaccaccaagcgcatcgtcgagaacggccaggagcgcgtcgaggtcgaggaggacggccagctcaagtccgtcaccgtcaacggcaaggagcagctcaagtggatggactccaagtga

SEQ ID NO: 8399 - RNA, 699 nt, synthetic construct
  misc_feature 1..699: note = derived and/or modified sequence opt3 fromDNJB8__Homo_sapiens__AAH29521
  source 1..699: mol_type = other RNA
atggccaactactatgaggtgctgggcgtccaggctagcgcatcccccgaagacatcaagaaagcctacagaaagctcgcgcttaggtggcaccctgataaaaatccagacaacaaggaggaagctgagaaaaagttcaagctggtttctgaagcctatgaggtgttgtcagatagtaaaaagcggagcttatacgaccgcgcagggtgcgattcctggcgagccggaggtggcgcttctaccccgtatcattcgccctttgacacagggtacactttccgtaatcctgaggatatttttagagaatttttcggaggcctggacccattctcatttgagttctgggatagcccctttaacagtgacaggggtgggcggggacacggcctacgcggcgcattctccgccgggtttggagagttccctgcttttatggaagccttctctagcttcaatatgctcggttgttccggcgggtcacatacgacctttagtagcacatctttcggaggctcctcaagcggtagttctgggtttaaatccgtaatgagctcgactgagatgataaacggacacaaggtgaccacaaaaagaatcgtcgaaaatggccaagagagggtggaagttgaggaagatggccagctgaagtctgtgaccgtcaacgggaaggagcagcttaaatggatggactccaagtga

SEQ ID NO: 8400 - RNA, 699 nt, synthetic construct
  misc_feature 1..699: note = derived and/or modified sequence opt4 fromDNJB8__Homo_sapiens__AAH29521
  source 1..699: mol_type = other RNA
atggccaactactacgaggtgctgggcgtgcaggccagcgccagccccgaggacatcaagaaggcctacagaaagctggccctgagatggcaccccgacaagaaccccgacaacaaggaggaggccgagaagaagttcaagctggtgagcgaggcctacgaggtgctgagcgacagcaagaagagaagcctgtacgacagagccggctgcgacagctggagagccggcggcggcgccagcaccccctaccacagccccttcgacaccggctacaccttcagaaaccccgaggacatcttcagagagttcttcggcggcctggaccccttcagcttcgagttctgggacagccccttcaacagcgacagaggcggcagaggccacggcctgagaggcgccttcagcgccggcttcggcgagttccccgccttcatggaggccttcagcagcttcaacatgctgggctgcagcggcggcagccacaccaccttcagcagcaccagcttcggcggcagcagcagcggcagcagcggcttcaagagcgtgatgagcagcaccgagatgatcaacggccacaaggtgaccaccaagagaatcgtggagaacggccaggagagagtggaggtggaggaggacggccagctgaagagcgtgaccgtgaacggcaaggagcagctgaagtggatggacagcaagtga

SEQ ID NO: 8401 - RNA, 699 nt, synthetic construct
  misc_feature 1..699: note = derived and/or modified sequence opt5 fromDNJB8__Homo_sapiens__AAH29521
  source 1..699: mol_type = other RNA
atggccaactactatgaggtgctgggcgtccaggctagcgcctcccccgaagacatcaagaaagcgtacagaaagctcgctctgcggtggcaccctgataaaaatccggacaacaaggaggaagccgagaaaaagttcaaacttgtttctgaagcctatgaggtgctgagcgattccaagaagcgctctctctacgacagagctgggtgcgatagctggcgggccggaggcggggcttccaccccctatcattctccttttgacacaggatacacgttccgcaatcccgaggatatttttagagaatttttcggcgggctggaccctttcagctttgagttctgggattccccctttaacagcgaccggggaggccgcggccacgggcttagaggagccttctctgcgggctttggggaatttcctgccttcatggaggctttctccagcttcaatatgctgggatgttctggcgggtcccataccacatttagctctacctccttcggaggcagctcctctggcagctccgggtttaaaagcgtgatgtcttccacagagatgatcaacggacacaaggtcaccacaaaacggattgtggaaaatggccaagagcgcgttgaagtggaggaagatgggcagctcaagagcgtcaccgtgaacggaaaggagcagctgaaatggatggactctaagtga

SEQ ID NO: 8402 - protein, 223 aa, synthetic construct
  REGION 1..223: note = DNJB9__Homo_sapiens__Q9UBS3
MATPQSIFIFAICILMITELILASKSYYDILGVPKSASERQIKKAFHKLAMKYHPDKNKSPDAEAKFREIAEAYETLSDANRRKEYDTLGHSAFTSGKGQRGSGSSFEQSFNFNFDDLFKDFGFFGQNQNTGSKKRFENHFQTRQDGGSSRQRHHFQEFSFGGGLFDDMFEDMEKMFSFSGFDSTNQHTVQTENRFHGSSKHCRTVTQRRGNMVTTYTDCSGQ

SEQ ID NO: 8403 - RNA, 672 nt, synthetic construct
  misc_feature 1..672: note = DNJB9__Homo_sapiens__AAD39845
  source 1..672: mol_type = other RNA
atggctactccccagtcaattttcatctttgcaatctgcattttaatgataacagaattaattctggcctcaaaaagctactatgatatcttaggtgtgccaaaatcggcatcagagcgccaaatcaagaaggcctttcacaagttggccatgaagtaccaccctgacaaaaataagagcccggatgctgaagcaaaattcagagagattgcagaagcatatgaaacactctcagatgctaatagacgaaaagagtatgatacacttggacacagtgcttttactagtggtaaaggacaaagaggtagtggaagttcttttgagcagtcatttaacttcaattttgatgacttatttaaagactttggcttttttggtcaaaaccaaaacactggatccaagaagcgttttgaaaatcatttccagacacgccaggatggtggttccagtagacaaaggcatcatttccaagaattttcttttggaggtggattatttgatgacatgtttgaagatatggagaaaatgttttcttttagtggttttgactctaccaatcagcatacagtacagactgaaaatagatttcatggatctagcaagcactgcaggactgtcactcaacgaagaggaaatatggttactacatacactgactgttcaggacagtag

SEQ ID NO: 8404 - RNA, 672 nt, synthetic construct
  misc_feature 1..672: note = derived and/or modified sequence opt1 fromDNJB9__Homo_sapiens__AAD39845
  source 1..672: mol_type = other RNA
atggccacgccccagagcatcttcatcttcgccatctgcatcctgatgatcaccgagctcatcctggcgtccaagagctactacgacatcctgggcgtgccgaagtccgccagcgagcgccagatcaagaaggccttccacaagctcgccatgaagtaccaccccgacaagaacaagtcccccgacgccgaggcgaagttccgggagatcgccgaggcctacgagaccctgagcgacgccaaccgccggaaggagtacgacaccctggggcactccgcgttcaccagcggcaaggggcagcgcggctccgggagctccttcgagcagagcttcaacttcaacttcgacgacctcttcaaggacttcggcttcttcggccagaaccagaacaccgggtccaagaagcggttcgagaaccacttccagacgcgccaggacggcgggagctcccggcagcgccaccacttccaggagttcagcttcggcgggggcctgttcgacgacatgttcgaggacatggagaagatgttctccttcagcggcttcgactccaccaaccagcacaccgtccagaccgagaaccggttccacgggagcagcaagcactgccgcacggtgacccagcggcgcggcaacatggtgaccacctacacggactgctccgggcagtga

SEQ ID NO: 8405 - RNA, 672 nt, synthetic construct
  misc_feature 1..672: note = derived and/or modified sequence opt2 fromDNJB9__Homo_sapiens__AAD39845
  source 1..672: mol_type = other RNA
atggccaccccccagtccatcttcatcttcgccatctgcatcctcatgatcaccgagctcatcctcgcctccaagtcctactacgacatcctcggcgtccccaagtccgcctccgagcgccagatcaagaaggccttccacaagctcgccatgaagtaccaccccgacaagaacaagtcccccgacgccgaggccaagttccgcgagatcgccgaggcctacgagaccctctccgacgccaaccgccgcaaggagtacgacaccctcggccactccgccttcacctccggcaagggccagcgcggctccggctcctccttcgagcagtccttcaacttcaacttcgacgacctcttcaaggacttcggcttcttcggccagaaccagaacaccggctccaagaagcgcttcgagaaccacttccagacccgccaggacggcggctcctcccgccagcgccaccacttccaggagttctccttcggcggcggcctcttcgacgacatgttcgaggacatggagaagatgttctccttctccggcttcgactccaccaaccagcacaccgtccagaccgagaaccgcttccacggctcctccaagcactgccgcaccgtcacccagcgccgcggcaacatggtcaccacctacaccgactgctccggccagtga

SEQ ID NO: 8406 - RNA, 672 nt, synthetic construct
  misc_feature 1..672: note = derived and/or modified sequence opt3 fromDNJB9__Homo_sapiens__AAD39845
  source 1..672: mol_type = other RNA
atggccacaccccagagcatcttcatttttgctatatgcatcctgatgattaccgagctcatccttgcatccaagtcttactatgacattctgggcgtgcctaaatcagccagtgaaagacaaatcaagaaagcgttccacaagttggctatgaaataccatccagataagaacaagagcccggacgccgaggcaaaatttagggaaatagccgaggcttatgaaactttatccgatgcaaatcggcgcaaggagtacgacacgctggggcactctgccttcacctcgggaaaaggtcagcgaggctcagggagcagttttgagcagtccttcaactttaatttcgatgacctatttaaggatttcggatttttcggccagaaccaaaatacaggttctaaaaagcgttttgaaaaccatttccagactagacaggacgggggaagctccaggcagcggcaccatttccaagagttttcattcggcggcgggctctttgatgacatgttcgaagatatggagaagatgtttagtttcagcggatttgactctaccaatcagcacacagtccagaccgagaaccgcttccacggttcctcaaaacattgtagaactgttacacagaggcggggcaatatggtgaccacgtatactgattgcagcgggcaatga

SEQ ID NO: 8407 - RNA, 672 nt, synthetic construct
  misc_feature 1..672: note = derived and/or modified sequence opt4 fromDNJB9__Homo_sapiens__AAD39845
  source 1..672: mol_type = other RNA
atggccaccccccagagcatcttcatcttcgccatctgcatcctgatgatcaccgagctgatcctggccagcaagagctactacgacatcctgggcgtgcccaagagcgccagcgagagacagatcaagaaggccttccacaagctggccatgaagtaccaccccgacaagaacaagagccccgacgccgaggccaagttcagagagatcgccgaggcctacgagaccctgagcgacgccaacagaagaaaggagtacgacaccctgggccacagcgccttcaccagcggcaagggccagagaggcagcggcagcagcttcgagcagagcttcaacttcaacttcgacgacctgttcaaggacttcggcttcttcggccagaaccagaacaccggcagcaagaagagattcgagaaccacttccagaccagacaggacggcggcagcagcagacagagacaccacttccaggagttcagcttcggcggcggcctgttcgacgacatgttcgaggacatggagaagatgttcagcttcagcggcttcgacagcaccaaccagcacaccgtgcagaccgagaacagattccacggcagcagcaagcactgcagaaccgtgacccagagaagaggcaacatggtgaccacctacaccgactgcagcggccagtga

SEQ ID NO: 8408 - RNA, 672 nt, synthetic construct
  misc_feature 1..672: note = derived and/or modified sequence opt5 fromDNJB9__Homo_sapiens__AAD39845
  source 1..672: mol_type = other RNA
atggccacaccccagagcatcttcatttttgctatctgcattctgatgatcaccgagctcattctggcctccaagtcttactatgacatccttggcgtgcctaaaagcgcgtccgaaagacaaatcaagaaggctttccacaaactggccatgaaataccatccggataagaacaagtctcccgacgccgaggctaaatttcgggaaattgccgaggcttatgaaacgctcagcgatgccaatcgcagaaaggagtacgacaccctggggcactccgcgttcacatctggaaaaggccagcgggggagcggatccagctttgagcagtctttcaactttaatttcgatgacctttttaaggatttcggctttttcgggcagaaccaaaataccggatccaaaaagcgctttgaaaaccatttccagacaagacaggacggcggcagctctcggcagcgccaccatttccaagagttttccttcgggggaggcctgtttgatgacatgttcgaagatatggagaagatgtttagcttctctgggtttgactccaccaatcagcacacagtccagaccgagaacagattccacggaagctccaaacattgtcggacggttacccagcgcagaggcaatatggtgacaacctatacagattgctctgggcaatga

SEQ ID NO: 8409 - protein, 554 aa, synthetic construct
  REGION 1..554: note = DNJC1__Homo_sapiens__Q96KC8
MTAPCSQPAQLPGRRQLGLVPFPPPPPRTPLLWLLLLLLAAVAPARGWESGDLELFDLVEEVQLNFYQFLGVQQDASSADIRKAYRKLSLTLHPDKNKDENAETQFRQLVAIYEVLKDDERRQRYDDILINGLPDWRQPVFYYRRVRKMSNAELALLLFIILTVGHYAVVWSIYLEKQLDELLSRKKREKKKKTGSKSVDVSKLGASEKNERLLMKPQWHDLLPCKLGIWFCLTLKALPHLIQDAGQFYAKYKETRLKEKEDALTRTELETLQKQKKVKKPKPEFPVYTPLETTYIQSYDHGTSIEEIEEQMDDWLENRNRTQKKQAPEWTEEDLSQLTRSMVKFPGGTPGRWEKIAHELGRSVTDVTTKAKQLKDSVTCSPGMVRLSELKSTVQNSRPIKTATTLPDDMITQREDAEGVAAEEEQEGDSGEQETGATDARPRRRKPARLLEATAKPEPEEKSRAKRQKDFDIAEQNESSDEESLRKERARSAEEPWTQNQQKLLELALQQYPRGSSDRWDKIARCVPSKSKEDCIARYKLLVELVQKKKQAKS

SEQ ID NO: 8410 - RNA, 1665 nt, synthetic construct
  misc_feature 1..1665: note = DNJC1__Homo_sapiens__AAI10895
  source 1..1665: mol_type = other RNA
atgacggctccttgctcccagccggcgcagcttcctggacgccgccagctcgggctggtgccgttcccgccgccgccgccgcggacgccgctgctgtggctgctgctgctgctgctggccgccgtggcgccggcgcgcggctgggagagcggagacctggagttgtttgacttagtggaggaggtgcagctcaacttctaccagttcctcggggtgcagcaggatgcatcatctgcagacatcagaaaagcatatcgtaagctttcactaactttacatccagacaagaataaagatgaaaatgcagaaactcagtttagacaattggtggccatttatgaagttttaaaggatgatgaacgaaggcagaggtatgatgatattctgatcaatggacttccagattggcgacagcctgtattctactacaggcgggtgagaaaaatgagcaatgctgagctggcattactcttgttcattattctcacagtgggtcattatgctgtggtttggtcaatctacctggaaaaacaactggatgaactactaagtagaaaaaagagagaaaagaaaaaaaagactggcagcaagagtgtggatgtatcaaaactcggtgcttcagaaaaaaatgaaagattgctgatgaaaccacagtggcatgatttgcttccatgcaaactggggatttggttttgccttacactaaaagcattacctcacctcatccaggatgctgggcagttttatgctaaatataaagaaacaagattgaaggaaaaggaagatgcactgactagaactgaacttgaaacacttcaaaaacagaagaaagttaaaaaaccaaaacctgaatttcctgtatacacacctttagaaactacatatattcagtcttatgatcatggaacttccatagaagaaattgaggaacaaatggatgattggttggaaaacaggaaccgaacacagaaaaaacaggcacctgaatggacagaagaggacctcagccaactgacaagaagtatggttaagttcccaggagggactccaggtcgatgggaaaagattgcccacgaattgggtcgatctgtgacagatgtgacaaccaaagccaagcaactgaaggattcagtgacctgctccccaggaatggttagactctccgaactcaaatcgacagttcagaattccaggcccatcaaaacggccaccaccttgcccgatgacatgatcacccagcgagaggacgcagagggggtggcagcggaggaggagcaggagggagactccggtgagcaggagaccggggccactgatgcccggcctcggaggcggaagccagccaggctgctggaggctacagcgaagccggagccagaggagaagtccagagccaagcggcagaaggactttgacatagcagaacaaaacgagtccagcgacgaggagagcctgagaaaagagagagctcggtctgcagaggagccgtggactcaaaatcaacagaaacttctggaactggcgttgcagcagtacccaaggggatcctctgaccgctgggacaaaatagccagatgtgtcccgtccaagagcaaggaagactgtatcgctaggtacaagttgctggttgaactggtccaaaagaaaaaacaagctaaaagctga

SEQ ID NO: 8411 - RNA, 1665 nt, synthetic construct
  misc_feature 1..1665: note = derived and/or modified sequence opt1 fromDNJC1__Homo_sapiens__AAI10895
  source 1..1665: mol_type = other RNA
atgaccgccccctgcagccagccggcccagctgcccggccgccggcagctcgggctggtgcccttcccgcccccgccgccccgcacgcccctgctctggctgctgctcctgctgctcgcggccgtcgcccccgcccggggctgggagtccggggacctggagctgttcgacctcgtggaggaggtgcagctgaacttctaccagttcctgggcgtccagcaggacgccagctccgcggacatccgcaaggcctaccggaagctcagcctgaccctgcaccccgacaagaacaaggacgagaacgccgagacccagttccgccagctcgtggccatctacgaggtgctgaaggacgacgagcggcgccagcggtacgacgacatcctgatcaacgggctccccgactggcgccagcccgtcttctactaccggcgcgtgcggaagatgtccaacgcggagctggccctgctcctgttcatcatcctgaccgtgggccactacgccgtcgtgtggagcatctacctcgagaagcagctggacgagctgctctcccgcaagaagcgggagaagaagaagaagaccggcagcaagtccgtggacgtcagcaagctgggggcctccgagaagaacgagcgcctgctcatgaagccccagtggcacgacctgctgccctgcaagctcggcatctggttctgcctgacgctgaaggccctcccccacctgatccaggacgcggggcagttctacgccaagtacaaggagacccggctgaaggagaaggaggacgccctcacccgcaccgagctggagacgctgcagaagcagaagaaggtgaagaagccgaagcccgagttccccgtgtacacgcccctcgagaccacctacatccagagctacgaccacggcacctccatcgaggagatcgaggagcagatggacgactggctggagaaccggaaccgcacccagaagaagcaggccccggagtggaccgaggaggacctgagccagctcacccggtccatggtcaagttccccgggggcacgcccggccgctgggagaagatcgcccacgagctggggcgcagcgtgaccgacgtgaccaccaaggcgaagcagctgaaggactccgtcacgtgcagccccggcatggtgcggctgtccgagctcaagagcaccgtgcagaacagccgcccgatcaagaccgccaccacgctgcccgacgacatgatcacccagcgggaggacgccgagggggtcgccgccgaggaggagcaggagggcgactccggcgagcaggagaccggggcgaccgacgcccgcccccggcgccggaagcccgcccgcctgctcgaggccacggccaagccggagcccgaggagaagtcccgggcgaagcgccagaaggacttcgacatcgccgagcagaacgagagcagcgacgaggagtccctgcggaaggagcgcgcccggagcgccgaggagccctggacccagaaccagcagaagctgctcgagctggcgctgcagcagtacccgcgcggctccagcgaccggtgggacaagatcgcccgctgcgtgccctccaagagcaaggaggactgcatcgcccggtacaagctcctggtggagctggtccagaagaagaagcaggccaagtcctga

SEQ ID NO: 8412 - RNA, 1665 nt, synthetic construct
  misc_feature 1..1665: note = derived and/or modified sequence opt2 fromDNJC1__Homo_sapiens__AAI10895
  source 1..1665: mol_type = other RNA
atgaccgccccctgctcccagcccgcccagctccccggccgccgccagctcggcctcgtccccttcccccccccccccccccgcacccccctcctctggctcctcctcctcctcctcgccgccgtcgcccccgcccgcggctgggagtccggcgacctcgagctcttcgacctcgtcgaggaggtccagctcaacttctaccagttcctcggcgtccagcaggacgcctcctccgccgacatccgcaaggcctaccgcaagctctccctcaccctccaccccgacaagaacaaggacgagaacgccgagacccagttccgccagctcgtcgccatctacgaggtcctcaaggacgacgagcgccgccagcgctacgacgacatcctcatcaacggcctccccgactggcgccagcccgtcttctactaccgccgcgtccgcaagatgtccaacgccgagctcgccctcctcctcttcatcatcctcaccgtcggccactacgccgtcgtctggtccatctacctcgagaagcagctcgacgagctcctctcccgcaagaagcgcgagaagaagaagaagaccggctccaagtccgtcgacgtctccaagctcggcgcctccgagaagaacgagcgcctcctcatgaagccccagtggcacgacctcctcccctgcaagctcggcatctggttctgcctcaccctcaaggccctcccccacctcatccaggacgccggccagttctacgccaagtacaaggagacccgcctcaaggagaaggaggacgccctcacccgcaccgagctcgagaccctccagaagcagaagaaggtcaagaagcccaagcccgagttccccgtctacacccccctcgagaccacctacatccagtcctacgaccacggcacctccatcgaggagatcgaggagcagatggacgactggctcgagaaccgcaaccgcacccagaagaagcaggcccccgagtggaccgaggaggacctctcccagctcacccgctccatggtcaagttccccggcggcacccccggccgctgggagaagatcgcccacgagctcggccgctccgtcaccgacgtcaccaccaaggccaagcagctcaaggactccgtcacctgctcccccggcatggtccgcctctccgagctcaagtccaccgtccagaactcccgccccatcaagaccgccaccaccctccccgacgacatgatcacccagcgcgaggacgccgagggcgtcgccgccgaggaggagcaggagggcgactccggcgagcaggagaccggcgccaccgacgcccgcccccgccgccgcaagcccgcccgcctcctcgaggccaccgccaagcccgagcccgaggagaagtcccgcgccaagcgccagaaggacttcgacatcgccgagcagaacgagtcctccgacgaggagtccctccgcaaggagcgcgcccgctccgccgaggagccctggacccagaaccagcagaagctcctcgagctcgccctccagcagtacccccgcggctcctccgaccgctgggacaagatcgcccgctgcgtcccctccaagtccaaggaggactgcatcgcccgctacaagctcctcgtcgagctcgtccagaagaagaagcaggccaagtcctga

SEQ ID NO: 8413 - RNA, 1665 nt, synthetic construct
  misc_feature 1..1665: note = derived and/or modified sequence opt3 fromDNJC1__Homo_sapiens__AAI10895
  source 1..1665: mol_type = other RNA
atgaccgccccctgcagccagcctgctcaactgccaggcagaaggcagctcgggcttgtgccgtttccccctccaccccctcggacaccactgttgtggttactgctactcctgcttgcagccgtcgcgcccgctcgcggatgggagtccggtgacctggaattgttcgatctcgttgaggaagtgcagctgaacttctaccagtttctgggcgtacaacaggacgcctcttcagcagatatccgaaaggcctatcgtaaactcagtttaactctgcaccctgacaagaataaagatgagaacgctgaaacgcagttcagacagcttgtggcaatttacgaggtcttgaaggacgatgagaggcggcaacgctatgacgatatactgatcaatgggctaccagactggagacagccggtgttttactataggcgggttcgcaaaatgagcaacgccgaactcgctctgcttctgttcattatcttgaccgtgggacattacgccgtcgtgtggtccatttatctcgagaagcagctggatgaattactgtctcgaaagaaaagagagaagaaaaagaaaacaggctcgaagtcagtagacgttagcaagctcggtgcgagtgagaaaaatgaaaggcttctgatgaagccccagtggcacgatttgctaccttgtaaactggggatctggttttgcctcactctgaaggcacttccacatctgatacaagacgccggacagttctacgctaaatacaaggagacccggttgaaagaaaaggaggacgccctcacacgtaccgaactggagactttacagaagcagaaaaaggtgaaaaagcccaaacctgagtttccagtctatacacccctggaaaccacgtacatccaatcctatgatcacggcacttctattgaggaaatcgaggaacagatggacgattggctagagaaccgcaatagaacccagaagaagcaagcaccggagtggacagaagaggacctcagccagctgactaggtccatggtgaaattccctggcgggacccccggacggtgggaaaagattgctcatgagcttggtcgatcagtgacagatgtcaccacgaaagccaagcagttgaaagacagtgttacttgtagcccaggcatggtgcgcctgtctgaactcaagtccacagtacagaactcaagacctatcaagaccgcgactacactgcccgatgacatgataacccaaagggaggatgccgagggggtggcagctgaagaggaacaggagggagacagcggcgagcaggaaacgggtgccaccgatgctcggccacgcagaaggaaacccgcccgtcttctggaggcaacagccaagcctgaaccagaggagaaaagtcgggctaagcgacagaaagactttgacattgcggaacaaaatgagtcttccgatgaagagagcttgagaaaggaaagggcacgctcggccgaggaaccgtggactcagaaccagcagaagctcctggagttagctctgcaacagtacccccgggggtcttccgacagatgggataaaatcgccaggtgcgtcccttcaaagagtaaagaggactgtattgcacgctataagctactcgtggaactggttcagaaaaagaaacaagccaagagctga

SEQ ID NO: 8414 - RNA, 1665 nt, synthetic construct
  misc_feature 1..1665: note = derived and/or modified sequence opt4 fromDNJC1__Homo_sapiens__AAI10895
  source 1..1665: mol_type = other RNA
atgaccgccccctgcagccagcccgcccagctgcccggcagaagacagctgggcctggtgcccttccccccccccccccccagaacccccctgctgtggctgctgctgctgctgctggccgccgtggcccccgccagaggctgggagagcggcgacctggagctgttcgacctggtggaggaggtgcagctgaacttctaccagttcctgggcgtgcagcaggacgccagcagcgccgacatcagaaaggcctacagaaagctgagcctgaccctgcaccccgacaagaacaaggacgagaacgccgagacccagttcagacagctggtggccatctacgaggtgctgaaggacgacgagagaagacagagatacgacgacatcctgatcaacggcctgcccgactggagacagcccgtgttctactacagaagagtgagaaagatgagcaacgccgagctggccctgctgctgttcatcatcctgaccgtgggccactacgccgtggtgtggagcatctacctggagaagcagctggacgagctgctgagcagaaagaagagagagaagaagaagaagaccggcagcaagagcgtggacgtgagcaagctgggcgccagcgagaagaacgagagactgctgatgaagccccagtggcacgacctgctgccctgcaagctgggcatctggttctgcctgaccctgaaggccctgccccacctgatccaggacgccggccagttctacgccaagtacaaggagaccagactgaaggagaaggaggacgccctgaccagaaccgagctggagaccctgcagaagcagaagaaggtgaagaagcccaagcccgagttccccgtgtacacccccctggagaccacctacatccagagctacgaccacggcaccagcatcgaggagatcgaggagcagatggacgactggctggagaacagaaacagaacccagaagaagcaggcccccgagtggaccgaggaggacctgagccagctgaccagaagcatggtgaagttccccggcggcacccccggcagatgggagaagatcgcccacgagctgggcagaagcgtgaccgacgtgaccaccaaggccaagcagctgaaggacagcgtgacctgcagccccggcatggtgagactgagcgagctgaagagcaccgtgcagaacagcagacccatcaagaccgccaccaccctgcccgacgacatgatcacccagagagaggacgccgagggcgtggccgccgaggaggagcaggagggcgacagcggcgagcaggagaccggcgccaccgacgccagacccagaagaagaaagcccgccagactgctggaggccaccgccaagcccgagcccgaggagaagagcagagccaagagacagaaggacttcgacatcgccgagcagaacgagagcagcgacgaggagagcctgagaaaggagagagccagaagcgccgaggagccctggacccagaaccagcagaagctgctggagctggccctgcagcagtaccccagaggcagcagcgacagatgggacaagatcgccagatgcgtgcccagcaagagcaaggaggactgcatcgccagatacaagctgctggtggagctggtgcagaagaagaagcaggccaagagctga

SEQ ID NO: 8415 - RNA, 1665 nt, synthetic construct
  misc_feature 1..1665: note = derived and/or modified sequence opt5 fromDNJC1__Homo_sapiens__AAI10895
  source 1..1665: mol_type = other RNA
atgaccgccccctgcagccagcctgctcaactgccgggcagacggcagctcgggctggtgcccttccctccccctccccctcgcacaccgcttctgtggctcctgcttctgctcctggccgcggtcgctcccgccagaggatgggagtccggcgacctggaactctttgatctggttgaggaagtgcagcttaacttctaccagtttctgggggtgcaacaggacgcctctagcgctgatatccggaaggcctatcgcaaactctccctgacgcttcaccctgacaagaataaagatgagaacgctgaaacccagttcagacagctggtcgccatttacgaggtgctcaaggacgatgagcggcgccaaagatatgacgatatcctgattaatggactgcccgactggcggcagcctgtgttttactatcgcagagttcggaaaatgtctaacgcggaactcgccctgcttctgttcatcattctcacagtcggccattacgctgtggtttggagcatctatctggagaagcagcttgatgaactgctctcccgcaagaaaagagagaagaaaaagaaaaccgggtctaagagcgtggacgtctccaagctgggagccagcgagaaaaatgaacggctgctcatgaagccccagtggcacgatctgcttccgtgtaaactgggcatctggttttgcctcacactgaaggcccttcctcatctgattcaagacgctggccagttctacgcgaaatacaaggagacccgcctcaaagaaaaggaggacgccctgacaagaaccgaactggagacgctccagaagcaaaagaaggtgaaaaagcccaaacctgagtttcccgtgtatacacccctggaaaccacctacatccagtcttatgatcacgggacatccattgaggaaatcgaggaacagatggacgattggcttgagaaccggaatagaacccagaagaagcaagctcctgagtggacggaagaggacctgagccagctcacacgctctatggtcaaattcccgggaggcacccccgggcggtgggaaaagattgcccatgagctgggaagatccgttacagatgtgaccaccaaagctaagcagctgaaagacagcgtgacatgttctcctggcatggtccgcctttccgaactcaagagcacggtgcagaactcccggcccatcaagaccgccacaaccctgcctgatgacatgattacacaaagagaggatgccgagggggttgctgcggaagaggaacaggagggagactctggcgagcaggaaaccggcgccacggatgctcgcccccggagacgcaaaccggcccggctgctcgaggccacagctaagcctgaacccgaggagaaaagcagagccaagcgccagaaagactttgacatcgcggaacaaaatgagtccagcgatgaagagtctctgcggaaggaaagagctcggtccgccgaggaaccttggacccagaaccagcagaaacttctggagctcgccctgcaacagtacccccgcgggagctctgacagatgggataaaatcgctcggtgcgtgcctagcaagtccaaagaggactgtattgccagatataagctgcttgtcgaactcgtgcagaaaaagaaacaagctaagtcttga

SEQ ID NO: 8416 - protein, 621 aa, synthetic construct
  REGION 1..621: note = DNJC2__Homo_sapiens__Q99543
MLLLPSAADGRGTAITHALTSASTLCQVEPVGRWFEAFVKRRNRNASASFQELEDKKELSEESEDEELQLEEFPMLKTLDPKDWKNQDHYAVLGLGHVRYKATQRQIKAAHKAMVLKHHPDKRKAAGEPIKEGDNDYFTCITKAYEMLSDPVKRRAFNSVDPTFDNSVPSKSEAKDNFFEVFTPVFERNSRWSNKKNVPKLGDMNSSFEDVDIFYSFWYNFDSWREFSYLDEEEKEKAECRDERRWIEKQNRATRAQRKKEEMNRIRTLVDNAYSCDPRIKKFKEEEKAKKEAEKKAKAEAKRKEQEAKEKQRQAELEAARLAKEKEEEEVRQQALLAKKEKDIQKKAIKKERQKLRNSCKTWNHFSDNEAERVKMMEEVEKLCDRLELASLQCLNETLTSCTKEVGKAALEKQIEEINEQIRKEKEEAEARMRQASKNTEKSTGGGGNGSKNWSEDDLQLLIKAVNLFPAGTNSRWEVIANYMNIHSSSGVKRTAKDVIGKAKSLQKLDPHQKDDINKKAFDKFKKEHGVVPQADNATPSERFEGPYTDFTPWTTEEQKLLEQALKTYPVNTPERWEKIAEAVPGRTKKDCMKRYKELVEMVKAKKAAQEQVLNASRAKK

SEQ ID NO: 8417 - RNA, 1866 nt, synthetic construct
  misc_feature 1..1866: note = DNJC2__Homo_sapiens__CCDS43628.1
  source 1..1866: mol_type = other RNA
atgctgcttctgccaagcgccgcggacggccggggcaccgccatcacccacgctctgacctctgcctctacactctgtcaagttgaacctgtgggaagatggtttgaagcttttgttaagaggagaaacagaaatgcttctgcctcttttcaggaactggaggataagaaagagttatccgaggaatcagaagatgaagaattgcagttggaagagtttcccatgctgaaaacacttgatcccaaagactggaagaaccaagatcattatgcagttcttggacttggccatgtgagatacaaggctacacagagacagatcaaagcagctcataaagcaatggttttaaaacatcacccagacaaacggaaagcagctggtgaaccaataaaagaaggagataatgactacttcacttgcataactaaagcttatgaaatgttatctgatccagtgaaaagacgagcatttaacagtgtagatcctacttttgataactcagttccttctaaaagtgaagcaaaggataatttcttcgaagtgtttaccccagtgtttgaaaggaattccagatggtcaaataaaaaaaatgttcctaaacttggtgatatgaattcatcatttgaagatgtagatatattttattctttctggtataattttgattcttggagagaattttcttatttagatgaagaagaaaaagaaaaagcagaatgtcgtgatgagaggagatggattgaaaagcagaacagagcaacaagagcacaaagaaaaaaagaagaaatgaacagaataagaacattagttgacaatgcatacagctgtgatccaaggataaaaaagttcaaggaagaagaaaaagccaagaaagaagcagaaaagaaagcaaaagcagaagctaaacggaaggagcaagaagctaaagaaaaacaaagacaagctgaattagaagctgctcggttagctaaggagaaagaagaggaggaagtcagacagcaagcattgctggcaaagaaggaaaaagatatccagaaaaaagccattaagaaggaaaggcaaaaacttcgaaactcatgcaagacctggaatcatttttctgataatgaggcagagcgggttaaaatgatggaagaagtggaaaaactttgtgatcggcttgaactggcaagcttacagtgcttgaatgaaacactcacatcatgcacaaaagaagtaggaaaggctgctttggaaaaacagatagaagaaataaatgagcaaatcagaaaagagaaagaggaagctgaggctcgtatgcgacaagcatctaagaacacagagaaatcaactggtggaggtggaaatggaagtaaaaattggtcagaagatgatctacaattactaattaaagctgtgaatctgttccctgctggaacaaattcaagatgggaagttattgctaattacatgaacatacattcttcctctggagtcaaaagaactgccaaagatgttattggcaaagcaaagagtctccaaaaacttgaccctcatcaaaaagatgacataaataaaaaggcatttgataagttcaaaaaagaacatggagtggtacctcaagcagacaacgcaacgccttcagaacgatttgaaggtccatatacagacttcaccccttggacaacagaagaacagaagcttttggaacaagctttgaaaacatacccagtaaatacacctgaaagatgggaaaaaatagcagaagcggtgcctggcaggacaaagaaggactgcatgaaacgatacaaggaacttgtcgagatggtaaaagcaaagaaagctgctcaagaacaagtgctgaatgcaagtagagccaagaaatga

SEQ ID NO: 8418 - RNA, 1866 nt, synthetic construct
  misc_feature 1..1866: note = derived and/or modified sequence opt1 fromDNJC2__Homo_sapiens__CCDS43628.1
  source 1..1866: mol_type = other RNA
atgctgctcctgcccagcgccgccgacggccgcgggaccgcgatcacccacgccctgacgtccgccagcaccctctgccaggtggagccggtgggccggtggttcgaggccttcgtgaagcgccggaaccgcaacgcctccgcgagcttccaggagctggaggacaagaaggagctgtccgaggagagcgaggacgaggagctccagctggaggagttccccatgctgaagaccctcgaccccaaggactggaagaaccaggaccactacgccgtgctggggctgggccacgtccggtacaaggccacccagcgccagatcaaggccgcgcacaaggccatggtgctcaagcaccaccccgacaagcggaaggccgccggggagccgatcaaggagggcgacaacgactacttcacgtgcatcaccaaggcctacgagatgctgtccgaccccgtgaagcgccgggcgttcaacagcgtcgaccccaccttcgacaactccgtgcccagcaagtccgaggccaaggacaacttcttcgaggtgttcaccccggtcttcgagcgcaacagccggtggtccaacaagaagaacgtgcccaagctgggcgacatgaacagctccttcgaggacgtggacatcttctacagcttctggtacaacttcgactcctggcgcgagttcagctacctcgacgaggaggagaaggagaaggccgagtgccgggacgagcgccggtggatcgagaagcagaaccgcgccacgcgggcccagcgcaagaaggaggagatgaaccggatccgcaccctggtcgacaacgcgtactcctgcgacccccggatcaagaagttcaaggaggaggagaaggccaagaaggaggccgagaagaaggccaaggccgaggcgaagcgcaaggagcaggaggccaaggagaagcagcgccaggccgagctggaggccgcccggctcgcgaaggagaaggaggaggaggaggtgcgccagcaggccctgctggccaagaaggagaaggacatccagaagaaggccatcaagaaggagcggcagaagctccgcaacagctgcaagacctggaaccacttcagcgacaacgaggcggagcgggtgaagatgatggaggaggtcgagaagctgtgcgaccgcctggagctcgcctccctgcagtgcctgaacgagaccctcacgagctgcaccaaggaggtggggaaggccgccctggagaagcagatcgaggagatcaacgagcagatccggaaggagaaggaggaggccgaggcgcgcatgcggcaggcctccaagaacaccgagaagtccaccggcgggggcgggaacggcagcaagaactggagcgaggacgacctgcagctcctgatcaaggccgtgaacctgttccccgccggcacgaactcccgctgggaggtcatcgccaactacatgaacatccacagctccagcggggtgaagcggaccgcgaaggacgtgatcggcaaggccaagtccctccagaagctggacccgcaccagaaggacgacatcaacaagaaggccttcgacaagttcaagaaggagcacggggtcgtgccccaggccgacaacgccacccccagcgagcgcttcgagggcccctacaccgacttcacgccgtggaccaccgaggagcagaagctgctcgagcaggcgctgaagacctaccccgtgaacacgcccgagcggtgggagaagatcgccgaggccgtccccggccgcaccaagaaggactgcatgaagcggtacaaggagctggtggagatggtcaaggccaagaaggcggcccaggagcaggtcctcaacgcctcccgcgccaagaagtga

SEQ ID NO: 8419 - RNA, 1866 nt, synthetic construct
  misc_feature 1..1866: note = derived and/or modified sequence opt2 fromDNJC2__Homo_sapiens__CCDS43628.1
  source 1..1866: mol_type = other RNA
atgctcctcctcccctccgccgccgacggccgcggcaccgccatcacccacgccctcacctccgcctccaccctctgccaggtcgagcccgtcggccgctggttcgaggccttcgtcaagcgccgcaaccgcaacgcctccgcctccttccaggagctcgaggacaagaaggagctctccgaggagtccgaggacgaggagctccagctcgaggagttccccatgctcaagaccctcgaccccaaggactggaagaaccaggaccactacgccgtcctcggcctcggccacgtccgctacaaggccacccagcgccagatcaaggccgcccacaaggccatggtcctcaagcaccaccccgacaagcgcaaggccgccggcgagcccatcaaggagggcgacaacgactacttcacctgcatcaccaaggcctacgagatgctctccgaccccgtcaagcgccgcgccttcaactccgtcgaccccaccttcgacaactccgtcccctccaagtccgaggccaaggacaacttcttcgaggtcttcacccccgtcttcgagcgcaactcccgctggtccaacaagaagaacgtccccaagctcggcgacatgaactcctccttcgaggacgtcgacatcttctactccttctggtacaacttcgactcctggcgcgagttctcctacctcgacgaggaggagaaggagaaggccgagtgccgcgacgagcgccgctggatcgagaagcagaaccgcgccacccgcgcccagcgcaagaaggaggagatgaaccgcatccgcaccctcgtcgacaacgcctactcctgcgacccccgcatcaagaagttcaaggaggaggagaaggccaagaaggaggccgagaagaaggccaaggccgaggccaagcgcaaggagcaggaggccaaggagaagcagcgccaggccgagctcgaggccgcccgcctcgccaaggagaaggaggaggaggaggtccgccagcaggccctcctcgccaagaaggagaaggacatccagaagaaggccatcaagaaggagcgccagaagctccgcaactcctgcaagacctggaaccacttctccgacaacgaggccgagcgcgtcaagatgatggaggaggtcgagaagctctgcgaccgcctcgagctcgcctccctccagtgcctcaacgagaccctcacctcctgcaccaaggaggtcggcaaggccgccctcgagaagcagatcgaggagatcaacgagcagatccgcaaggagaaggaggaggccgaggcccgcatgcgccaggcctccaagaacaccgagaagtccaccggcggcggcggcaacggctccaagaactggtccgaggacgacctccagctcctcatcaaggccgtcaacctcttccccgccggcaccaactcccgctgggaggtcatcgccaactacatgaacatccactcctcctccggcgtcaagcgcaccgccaaggacgtcatcggcaaggccaagtccctccagaagctcgacccccaccagaaggacgacatcaacaagaaggccttcgacaagttcaagaaggagcacggcgtcgtcccccaggccgacaacgccaccccctccgagcgcttcgagggcccctacaccgacttcaccccctggaccaccgaggagcagaagctcctcgagcaggccctcaagacctaccccgtcaacacccccgagcgctgggagaagatcgccgaggccgtccccggccgcaccaagaaggactgcatgaagcgctacaaggagctcgtcgagatggtcaaggccaagaaggccgcccaggagcaggtcctcaacgcctcccgcgccaagaagtga

SEQ ID NO: 8420 - RNA, 1866 nt, synthetic construct
  misc_feature 1..1866: note = derived and/or modified sequence opt3 fromDNJC2__Homo_sapiens__CCDS43628.1
  source 1..1866: mol_type = other RNA
atgctgctccttcccagcgccgctgacggcagagggaccgcaatcacacacgccctgacttccgcgtctacgttgtgccaggtggagcctgtcggaaggtggttcgaagcatttgttaagcggcgcaaccgaaatgcctcagcaagtttccaagagttagaagataaaaaggagctgagcgaagagtccgaggacgaggagctacagctcgaagagtttccaatgctgaaaacccttgatccgaaggactggaaaaaccaggatcattacgccgtgctgggtttgggccacgtacgttataaggctacacagagacaaattaaggcagcccataaagctatggtgctcaagcaccatcccgacaaaaggaaggccgcgggggagcctataaaagaaggagataatgactacttcacttgtatcaccaaggcatatgagatgctgtctgatccagtcaagcggcgcgcctttaactcggtggaccccacattcgataattcagttcctagcaaaagtgaagctaaggacaactttttcgaggtgtttaccccagtcttcgaaagaaattccaggtggtctaacaaaaagaatgtgcccaaactgggcgatatgaacagctcctttgaggacgtagacattttctactcattttggtataatttcgatagttggcgggagttcagctacctcgacgaagaggaaaaggagaaagccgaatgccgcgatgagcgaagatggatcgagaagcagaacagggcaactcgggctcagcgtaagaaagaagagatgaatcgcattagaacattagttgacaacgcctattcttgtgatcctaggatcaagaaatttaaggaagaggaaaaagcgaagaaggaggccgagaaaaaggcaaaagctgaagccaagcggaaagagcaggaagctaaggagaagcaacgacaggccgagctggaagcagcccgccttgctaaagagaaggaagaggaagaggtgagacagcaggcgttgctggctaaaaaggagaaagacatacaaaagaaggccatcaaaaaggaaaggcagaaactacggaatagttgcaagacctggaaccacttctcagataacgaggctgaacgcgtcaaaatgatggaggaagtggagaagctctgtgacagactggagcttgccagcctgcagtgcttgaatgaaacgctcacttcctgtaccaaagaggtgggtaaggcagccctggaaaagcaaattgaggaaatcaacgagcagattaggaaagagaaggaagaggctgaagcccgtatgcggcaggcatctaaaaatacagagaagtccactgggggaggcggcaacgggagcaaaaattggtcggaggatgacttacagctgctcatcaaggcggtcaacctttttccagctggaaccaattctcgatgggaagttatagccaactacatgaatattcactcctcaagtggtgtgaagagaacagcaaaagatgtaatcggcaaggccaaaagcctgcaaaagttggacccgcatcagaaagacgatattaacaagaaggctttcgacaaatttaagaaagagcacggggtggtcccccaggccgataatgcaaccccttccgaaaggttcgagggaccatacacggactttactccctggacaaccgaggaacagaagctactggagcaagctctcaaaacttatcctgtgaacacaccagaacgctgggagaagatcgccgaagcggttcccggccggaccaagaaagattgcatgaagagatacaaagagctggtggaaatggtcaaggccaaaaaggctgcacaggaacaggtgcttaatgcctctagggctaaaaagtga

SEQ ID NO: 8421 - RNA, 1866 nt, synthetic construct
  misc_feature 1..1866: note = derived and/or modified sequence opt4 fromDNJC2__Homo_sapiens__CCDS43628.1
  source 1..1866: mol_type = other RNA
atgctgctgctgcccagcgccgccgacggcagaggcaccgccatcacccacgccctgaccagcgccagcaccctgtgccaggtggagcccgtgggcagatggttcgaggccttcgtgaagagaagaaacagaaacgccagcgccagcttccaggagctggaggacaagaaggagctgagcgaggagagcgaggacgaggagctgcagctggaggagttccccatgctgaagaccctggaccccaaggactggaagaaccaggaccactacgccgtgctgggcctgggccacgtgagatacaaggccacccagagacagatcaaggccgcccacaaggccatggtgctgaagcaccaccccgacaagagaaaggccgccggcgagcccatcaaggagggcgacaacgactacttcacctgcatcaccaaggcctacgagatgctgagcgaccccgtgaagagaagagccttcaacagcgtggaccccaccttcgacaacagcgtgcccagcaagagcgaggccaaggacaacttcttcgaggtgttcacccccgtgttcgagagaaacagcagatggagcaacaagaagaacgtgcccaagctgggcgacatgaacagcagcttcgaggacgtggacatcttctacagcttctggtacaacttcgacagctggagagagttcagctacctggacgaggaggagaaggagaaggccgagtgcagagacgagagaagatggatcgagaagcagaacagagccaccagagcccagagaaagaaggaggagatgaacagaatcagaaccctggtggacaacgcctacagctgcgaccccagaatcaagaagttcaaggaggaggagaaggccaagaaggaggccgagaagaaggccaaggccgaggccaagagaaaggagcaggaggccaaggagaagcagagacaggccgagctggaggccgccagactggccaaggagaaggaggaggaggaggtgagacagcaggccctgctggccaagaaggagaaggacatccagaagaaggccatcaagaaggagagacagaagctgagaaacagctgcaagacctggaaccacttcagcgacaacgaggccgagagagtgaagatgatggaggaggtggagaagctgtgcgacagactggagctggccagcctgcagtgcctgaacgagaccctgaccagctgcaccaaggaggtgggcaaggccgccctggagaagcagatcgaggagatcaacgagcagatcagaaaggagaaggaggaggccgaggccagaatgagacaggccagcaagaacaccgagaagagcaccggcggcggcggcaacggcagcaagaactggagcgaggacgacctgcagctgctgatcaaggccgtgaacctgttccccgccggcaccaacagcagatgggaggtgatcgccaactacatgaacatccacagcagcagcggcgtgaagagaaccgccaaggacgtgatcggcaaggccaagagcctgcagaagctggacccccaccagaaggacgacatcaacaagaaggccttcgacaagttcaagaaggagcacggcgtggtgccccaggccgacaacgccacccccagcgagagattcgagggcccctacaccgacttcaccccctggaccaccgaggagcagaagctgctggagcaggccctgaagacctaccccgtgaacacccccgagagatgggagaagatcgccgaggccgtgcccggcagaaccaagaaggactgcatgaagagatacaaggagctggtggagatggtgaaggccaagaaggccgcccaggagcaggtgctgaacgccagcagagccaagaagtga

SEQ ID NO: 8422 - RNA, 1866 nt, synthetic construct
  misc_feature 1..1866: note = derived and/or modified sequence opt5 fromDNJC2__Homo_sapiens__CCDS43628.1
  source 1..1866: mol_type = other RNA
atgctgctcctgcccagcgccgctgacggcagagggaccgccatcacacacgcgcttacgtccgcttctaccctgtgccaggtggagcctgtcggacggtggttcgaagcctttgttaagcgcagaaaccggaatgccagcgcttccttccaagagctcgaagataaaaaggagctgtctgaagagagcgaggacgaagaacttcagctggaagagtttccgatgctcaaaacactggatcccaaggactggaaaaaccaggatcattacgccgtgctgggcctcgggcacgtgcgctataaggctacccagagacaaattaaggccgcgcataaagccatggtcctgaagcaccatcctgacaaacggaaggctgccggagagcccatcaaagaaggcgataatgactacttcacatgtattaccaaggcttatgagatgctttccgatcctgtgaagcgcagagcctttaactctgttgaccccacattcgataatagcgtgccttccaaaagcgaagcgaaggacaactttttcgaggtctttaccccggtgttcgaacggaatagccgctggtccaacaaaaagaatgttcccaaactgggggatatgaacagctcttttgaggacgtggacatcttctactccttttggtataatttcgatagctggagagagttctcttacctcgacgaagaggaaaaggagaaagccgaatgccgggatgagcgcagatggattgagaagcagaaccgggctacgcgcgcccagagaaagaaagaagagatgaatcggatcagaaccctggtcgacaacgcttattcctgtgatcctcgcatcaagaaatttaaggaagaggaaaaagccaagaaggaggccgagaaaaaggctaaagcggaagccaagcggaaagagcaggaagctaaggagaagcaaagacaggccgagcttgaagccgctcgcctggccaaagagaaggaagaggaagaggtgcggcagcaggcgctcctggctaaaaaggagaaagacattcaaaagaaggccatcaaaaaggaaagacagaaactgcgcaatagctgcaagacatggaaccacttctccgataacgaggccgaacgggtgaaaatgatggaggaagtcgagaagctctgtgacagactggagcttgcttctctgcagtgcctcaatgaaaccctgacaagctgtaccaaagaggttggaaaggccgctcttgaaaagcaaattgaggaaatcaacgagcagattcgcaaagagaaggaagaggccgaagcgcggatgagacaggcctccaaaaatacggagaagtctacaggcggcgggggaaacggctctaaaaattggtccgaggatgacctgcagctcctgatcaaggctgtgaacctgtttcccgccgggaccaatagccgctgggaagtgattgctaactacatgaatatccactctagctccggagtcaagcggacagccaaagatgtgatcggcaaggcgaaatctctccaaaagctggaccctcatcagaaagacgatattaacaagaaggccttcgacaaatttaagaaagagcacggggttgtgccccaggctgataatgccaccccgagcgaaagattcgagggaccttacaccgactttacaccctggacgaccgaggagcagaaacttctggagcaagctctcaagacatatcctgtcaacacccccgaacggtgggagaagatcgccgaagccgtgcccggccgcacaaagaaagattgcatgaagagatacaaagagctggttgaaatggtgaaggctaaaaaggcggcccaggagcaggtccttaatgcttcccgggccaaaaagtga

SEQ ID NO: 8423 - protein, 504 aa, synthetic construct
  REGION 1..504: note = DNJC3__Homo_sapiens__Q13217
MVAPGSVTSRLGSVFPFLLVLVDLQYEGAECGVNADVEKHLELGKKLLAAGQLADALSQFHAAVDGDPDNYIAYYRRATVFLAMGKSKAALPDLTKVIQLKMDFTAARLQRGHLLLKQGKLDEAEDDFKKVLKSNPSENEEKEAQSQLIKSDEMQRLRSQALNAFGSGDYTAAIAFLDKILEVCVWDAELRELRAECFIKEGEPRKAISDLKAASKLKNDNTEAFYKISTLYYQLGDHELSLSEVRECLKLDQDHKRCFAHYKQVKKLNKLIESAEELIRDGRYTDATSKYESVMKTEPSIAEYTVRSKERICHCFSKDEKPVEAIRVCSEVLQMEPDNVNALKDRAEAYLIEEMYDEAIQDYETAQEHNENDQQIREGLEKAQRLLKQSQKRDYYKILGVKRNAKKQEIIKAYRKLALQWHPDNFQNEEEKKKAEKKFIDIAAAKEVLSDPEMRKKFDDGEDPLDAESQQGGGGNPFHRSWNSWQGFNPFSSGGPFRFKFHFN

SEQ ID NO: 8424 - RNA, 1515 nt, synthetic construct
  misc_feature 1..1515: note = DNJC3__Homo_sapiens__AAC50502
  source 1..1515: mol_type = other RNA
atggtggcccccggctccgtgaccagccggctgggctcggtattccccttcctgctagtcctggtggatctgcagtacgaaggtgctgaatgtggagtaaatgcagatgttgagaaacatcttgaattgggcaagaaattacttgcagctggacagctagctgatgctttatctcagtttcatgctgccgtagatggtgaccctgataactatattgcttattatcggagggctactgtctttttagctatgggcaaatcaaaagctgcacttcctgatttaactaaagtgattcaattgaagatggacttcactgcagcaagattacagagaggtcacttattactcaaacaaggaaaacttgatgaagcagaagatgattttaaaaaagtgctcaaatctaatccaagtgaaaatgaagaaaaggaagcacagtctcaacttataaaatctgatgaaatgcagcgtttgcgttcacaagcacttaacgcttttggaagtggagattatactgctgctatagccttccttgataagattttagaggtttgtgtttgggatgcagaactacgggaacttcgagctgaatgttttataaaagaaggagaacctaggaaagctataagtgacttaaaagctgcgtcaaagttgaagaatgataatactgaagcgttttataaaataagcacactgtactaccaactaggagaccacgaactgtccctcagtgaagttcgggaatgtcttaaacttgaccaggatcataaaaggtgttttgcacactataaacaagtaaagaaacttaataagctgattgagtcagctgaagagctcatcagagatggcagatacacagatgctaccagcaaatatgaatctgtcatgaaaacagagccaagcattgctgaatatacagttcgttcaaaggagaggatttgccactgcttttctaaggacgagaagcctgttgaagctattagggtttgttctgaagttttacagatggaacctgacaatgtgaatgccctgaaagatcgagctgaggcctatttgatagaggaaatgtatgatgaagctattcaggattatgaaactgctcaggaacacaatgaaaatgatcagcagattcgagaaggtctagagaaagcacaaagattattgaaacagtcgcagaaacgagattattataaaatcttgggagtaaaaagaaatgccaaaaagcaagaaattattaaagcataccgaaaattagcactgcagtggcacccagataacttccagaatgaagaagaaaagaaaaaagctgagaaaaagttcattgatatagcagctgctaaagaagtcctctctgatccagaaatgagaaagaagtttgacgacggagaagatcctttggatgcagagagccagcaaggaggcggcggcaaccctttccacagaagctggaactcatggcaagggttcaatcccttcagctcaggcggaccatttagatttaaattccacttcaattaa

SEQ ID NO: 8425 - RNA, 1515 nt, synthetic construct
  misc_feature 1..1515: note = derived and/or modified sequence opt1 fromDNJC3__Homo_sapiens__AAC50502
  source 1..1515: mol_type = other RNA
atggtggcccccggcagcgtcacctcccgcctggggagcgtgttcccgttcctcctggtgctggtcgacctccagtacgagggcgccgagtgcggggtgaacgcggacgtggagaagcacctggagctgggcaagaagctcctggccgccgggcagctggccgacgccctctcccagttccacgcggccgtcgacggcgaccccgacaactacatcgcctactaccggcgcgccaccgtgttcctggcgatgggcaagagcaaggccgccctgcccgacctcacgaaggtgatccagctgaagatggacttcaccgccgcccggctgcagcgcgggcacctcctgctgaagcagggcaagctcgacgaggcggaggacgacttcaagaaggtcctgaagtccaaccccagcgagaacgaggagaaggaggcccagtcccagctgatcaagagcgacgagatgcagcggctccgctcccaggccctgaacgccttcgggagcggcgactacaccgccgcgatcgccttcctggacaagatcctcgaggtgtgcgtgtgggacgccgagctgcgggagctgcgcgccgagtgcttcatcaaggagggggagccgcggaaggccatctccgacctcaaggcggccagcaagctgaagaacgacaacaccgaggccttctacaagatctccacgctgtactaccagctcggcgaccacgagctgagcctgtccgaggtccgcgagtgcctcaagctggaccaggaccacaagcggtgcttcgcccactacaagcaggtcaagaagctgaacaagctcatcgagagcgccgaggagctgatccgcgacggccggtacaccgacgcgacctccaagtacgagagcgtgatgaagaccgagccctccatcgccgagtacacggtgcgcagcaaggagcggatctgccactgcttcagcaaggacgagaagcccgtggaggccatccgcgtgtgctccgaggtcctgcagatggagcccgacaacgtgaacgccctcaaggaccgggcggaggcctacctgatcgaggagatgtacgacgaggccatccaggactacgagaccgcccaggagcacaacgagaacgaccagcagatccgcgaggggctggagaaggcccagcggctcctgaagcagagccagaagcgcgactactacaagatcctgggcgtgaagcggaacgcgaagaagcaggagatcatcaaggcctaccgcaagctcgccctgcagtggcacccggacaacttccagaacgaggaggagaagaagaaggccgagaagaagttcatcgacatcgccgcggccaaggaggtcctgtccgaccccgagatgcgcaagaagttcgacgacggggaggaccccctcgacgccgagagccagcagggcggcgggggcaaccccttccaccggtcctggaacagctggcaggggttcaacccgttctccagcggcgggcccttccgcttcaagttccacttcaactga

SEQ ID NO: 8426 - RNA, 1515 nt, synthetic construct
  misc_feature 1..1515: note = derived and/or modified sequence opt2 fromDNJC3__Homo_sapiens__AAC50502
  source 1..1515: mol_type = other RNA
atggtcgcccccggctccgtcacctcccgcctcggctccgtcttccccttcctcctcgtcctcgtcgacctccagtacgagggcgccgagtgcggcgtcaacgccgacgtcgagaagcacctcgagctcggcaagaagctcctcgccgccggccagctcgccgacgccctctcccagttccacgccgccgtcgacggcgaccccgacaactacatcgcctactaccgccgcgccaccgtcttcctcgccatgggcaagtccaaggccgccctccccgacctcaccaaggtcatccagctcaagatggacttcaccgccgcccgcctccagcgcggccacctcctcctcaagcagggcaagctcgacgaggccgaggacgacttcaagaaggtcctcaagtccaacccctccgagaacgaggagaaggaggcccagtcccagctcatcaagtccgacgagatgcagcgcctccgctcccaggccctcaacgccttcggctccggcgactacaccgccgccatcgccttcctcgacaagatcctcgaggtctgcgtctgggacgccgagctccgcgagctccgcgccgagtgcttcatcaaggagggcgagccccgcaaggccatctccgacctcaaggccgcctccaagctcaagaacgacaacaccgaggccttctacaagatctccaccctctactaccagctcggcgaccacgagctctccctctccgaggtccgcgagtgcctcaagctcgaccaggaccacaagcgctgcttcgcccactacaagcaggtcaagaagctcaacaagctcatcgagtccgccgaggagctcatccgcgacggccgctacaccgacgccacctccaagtacgagtccgtcatgaagaccgagccctccatcgccgagtacaccgtccgctccaaggagcgcatctgccactgcttctccaaggacgagaagcccgtcgaggccatccgcgtctgctccgaggtcctccagatggagcccgacaacgtcaacgccctcaaggaccgcgccgaggcctacctcatcgaggagatgtacgacgaggccatccaggactacgagaccgcccaggagcacaacgagaacgaccagcagatccgcgagggcctcgagaaggcccagcgcctcctcaagcagtcccagaagcgcgactactacaagatcctcggcgtcaagcgcaacgccaagaagcaggagatcatcaaggcctaccgcaagctcgccctccagtggcaccccgacaacttccagaacgaggaggagaagaagaaggccgagaagaagttcatcgacatcgccgccgccaaggaggtcctctccgaccccgagatgcgcaagaagttcgacgacggcgaggaccccctcgacgccgagtcccagcagggcggcggcggcaaccccttccaccgctcctggaactcctggcagggcttcaaccccttctcctccggcggccccttccgcttcaagttccacttcaactga

SEQ ID NO: 8427 - RNA, 1515 nt, synthetic construct
  misc_feature 1..1515: note = derived and/or modified sequence opt3 fromDNJC3__Homo_sapiens__AAC50502
  source 1..1515: mol_type = other RNA
atggtggcccccggcagcgtcacctccagactggggtctgttttcccttttctccttgtgctggtagacttgcagtacgagggagctgaatgcggtgtgaacgcagatgtcgagaagcacttagaactgggcaaaaagctactcgccgcggggcaactggctgacgccctttcacagttccatgcagccgtggatggagacccagataattatatcgcttactataggcgggcaacagtttttctggccatgggcaaaagtaaggctgccttgccggacctcactaaagtgattcagctgaagatggatttcacggcggcacgcctgcagcgaggtcacctcttactgaagcaagggaaacttgacgaggccgaagatgactttaagaaagtcctcaagagcaacccctccgagaatgaggaaaaagaggctcagtctcagctgataaagtcggatgaaatgcagcgtctaagatcacaagccctcaacgcattcggaagcggcgactacaccgctgccatcgcgtttctggataagattcttgaggtgtgtgtatgggacgccgagctgagggaattgcgggcagagtgcttcatcaaagaaggcgagcctcgcaaggctattagtgacctcaaagccgcttccaagctgaaaaatgataacacagaagccttttataagatctctactttatactatcagctgggggaccatgagctcagcctttccgaggttagagaatgtctgaaattggatcaggaccacaagaggtgcttcgcacattacaaacaggtgaaaaagctaaataaactgatagagtcagccgaagagttgatccgggatggacgctacaccgacgctacaagtaagtatgaaagcgtcatgaaaaccgagccatctattgcggagtacactgtgcgatccaaggaaagaatctgtcactgcttttcaaaggatgagaaacccgtggaagcaattagggtctgtagcgaggttctgcaaatggaacctgacaacgtgaatgcccttaaggatcgggctgaggcctatctgatcgaggaaatgtacgacgaggcaatacaggattatgaaacagcccaggagcacaacgagaatgaccaacagattcgtgaaggtttggagaaagctcagcgcctcctgaagcagagtcaaaagagagactactataagatcttaggcgtaaagaggaacgccaaaaagcaggaaattatcaaagcataccggaagctggcgctacagtggcatccagataatttccagaacgaggaagagaaaaagaaggctgagaaaaagtttatcgacattgccgcagccaaagaagtgctctctgatcccgagatgcgaaagaaattcgacgatggggaagaccctctggatgctgagtcccaacagggaggcggtgggaatccattccaccgcagctggaactcgtggcagggatttaacccgttctcttccggcggcccctttagattcaagtttcatttcaattga

SEQ ID NO: 8428 - RNA, 1515 nt, synthetic construct
  misc_feature 1..1515: note = derived and/or modified sequence opt4 fromDNJC3__Homo_sapiens__AAC50502
  source 1..1515: mol_type = other RNA
atggtggcccccggcagcgtgaccagcagactgggcagcgtgttccccttcctgctggtgctggtggacctgcagtacgagggcgccgagtgcggcgtgaacgccgacgtggagaagcacctggagctgggcaagaagctgctggccgccggccagctggccgacgccctgagccagttccacgccgccgtggacggcgaccccgacaactacatcgcctactacagaagagccaccgtgttcctggccatgggcaagagcaaggccgccctgcccgacctgaccaaggtgatccagctgaagatggacttcaccgccgccagactgcagagaggccacctgctgctgaagcagggcaagctggacgaggccgaggacgacttcaagaaggtgctgaagagcaaccccagcgagaacgaggagaaggaggcccagagccagctgatcaagagcgacgagatgcagagactgagaagccaggccctgaacgccttcggcagcggcgactacaccgccgccatcgccttcctggacaagatcctggaggtgtgcgtgtgggacgccgagctgagagagctgagagccgagtgcttcatcaaggagggcgagcccagaaaggccatcagcgacctgaaggccgccagcaagctgaagaacgacaacaccgaggccttctacaagatcagcaccctgtactaccagctgggcgaccacgagctgagcctgagcgaggtgagagagtgcctgaagctggaccaggaccacaagagatgcttcgcccactacaagcaggtgaagaagctgaacaagctgatcgagagcgccgaggagctgatcagagacggcagatacaccgacgccaccagcaagtacgagagcgtgatgaagaccgagcccagcatcgccgagtacaccgtgagaagcaaggagagaatctgccactgcttcagcaaggacgagaagcccgtggaggccatcagagtgtgcagcgaggtgctgcagatggagcccgacaacgtgaacgccctgaaggacagagccgaggcctacctgatcgaggagatgtacgacgaggccatccaggactacgagaccgcccaggagcacaacgagaacgaccagcagatcagagagggcctggagaaggcccagagactgctgaagcagagccagaagagagactactacaagatcctgggcgtgaagagaaacgccaagaagcaggagatcatcaaggcctacagaaagctggccctgcagtggcaccccgacaacttccagaacgaggaggagaagaagaaggccgagaagaagttcatcgacatcgccgccgccaaggaggtgctgagcgaccccgagatgagaaagaagttcgacgacggcgaggaccccctggacgccgagagccagcagggcggcggcggcaaccccttccacagaagctggaacagctggcagggcttcaaccccttcagcagcggcggccccttcagattcaagttccacttcaactga

SEQ ID NO: 8429 - RNA, 1515 nt, synthetic construct
  misc_feature 1..1515: note = derived and/or modified sequence opt5 fromDNJC3__Homo_sapiens__AAC50502
  source 1..1515: mol_type = other RNA
atggtggcccccggcagcgtcacctccagactggggtctgttttcccttttctcctggtgcttgtggacctgcagtacgagggagctgaatgcggcgtcaacgccgatgtggagaagcacctcgaactggggaaaaagctgcttgcggctggacaactcgccgacgccctgagccagttccatgctgccgttgatggcgacccggataattatatcgcttactatcggcgcgccacagtgtttctggcgatggggaaatccaaggccgctctccccgacctgacgaaagtcattcagcttaagatggatttcaccgccgctagactgcagcggggacacctcctgcttaagcaaggcaaactggacgaggccgaagatgactttaagaaagtgctcaagtctaaccctagcgagaatgaggaaaaagaggcgcagtcccagctgatcaagtctgatgaaatgcagcgcctgagaagccaagccctcaacgctttcggctccggggactacacagccgctattgcctttctggataagatccttgaggtttgtgtgtgggacgccgagctgcgggaactccgcgctgagtgcttcattaaagaaggagagcccagaaaggcgatcagcgacctgaaagccgcttctaaacttaaaaatgataacaccgaagccttttataagatctccacactgtactatcagctcggcgaccatgagctgagcctgtctgaggtccgggaatgtctcaaactggatcaggaccacaagcgctgcttcgcccattacaaacaggtgaagaaacttaataagctgattgagtccgctgaggaactcatcagagatgggcggtacaccgacgccacaagcaagtatgaatctgtgatgaaaaccgagccttccattgcggagtacacggtccgcagcaaggaaagaatctgtcactgcttttccaaggatgagaaacccgttgaagctattcgggtgtgttctgaggtgctgcaaatggaacctgacaacgtcaatgcccttaaggatcgcgccgaggcttatctgatcgaggaaatgtacgacgaggccattcaggattatgaaaccgctcaggagcacaacgagaatgaccaacagatcagagaaggactcgagaaagcccagcggctgctgaagcagagccaaaagagagactactataagatcctcggcgtgaagcgcaacgcgaaaaagcaggaaattatcaaagcctaccggaagctggcccttcagtggcatccggataatttccagaacgaggaagagaaaaagaaggctgagaaaaagtttattgacatcgctgccgcgaaagaagttctgtccgatcccgagatgagaaagaaattcgacgatggggaagaccctctcgatgccgagagccaacagggaggcggcgggaatcccttccaccgctcttggaactcctggcagggatttaaccctttcagctctggcgggccctttcggttcaagtttcatttcaattga

SEQ ID NO: 8430 - protein, 241 aa, synthetic construct
  REGION 1..241: note = DNJC4__Homo_sapiens__Q9NNZ3
MPPLLPLRLCRLWPRNPPSRLLGAAAGQRSRPSTYYELLGVHPGASTEEVKRAFFSKSKELHPDRDPGNPSLHSRFVELSEAYRVLSREQSRRSYDDQLRSGSPPKSPRTTVHDKSAHQTHSSWTPPNAQYWSQFHSVRPQGPQLRQQQHKQNKQVLGYCLLLMLAGMGLHYIAFRKVKQMHLNFMDEKDRIITAFYNEARARARANRGILQQERQRLGQRQPPPSEPTQGPEIVPRGAGP

SEQ ID NO: 8431 - RNA, 726 nt, synthetic construct
  misc_feature 1..726: note = DNJC4__Homo_sapiens__AAF97845
  source 1..726: mol_type = other RNA
atgccgcccttactgcccctgcgcctgtgccggctgtggccccgcaaccctccctcccggctcctcggagcggccgccgggcagcggtccagacccagtacttattatgaactgttgggggtgcatcctggtgccagcactgaggaagttaaacgagctttcttctccaagtccaaagagctgcacccagaccgggaccctgggaacccaagcctgcacagccgctttgtggagctgagcgaggcataccgtgtgctcagccgtgagcagagccgccgcagctatgatgaccagctccgctcaggtagtcccccaaagtctccacgaaccacagtccatgacaagtctgcccaccaaacacacagctcctggacaccccccaacgcacagtactggtcccagtttcacagcgtgaggccacaggggccccagttgaggcagcagcaacacaaacaaaacaaacaagtgctggggtactgcctcctcctcatgctggcgggcatgggcctgcactacattgccttcaggaaggtgaagcagatgcaccttaacttcatggatgaaaaggatcggatcatcacagccttctacaacgaagcccgggcacgggccagggccaacagaggcatccttcagcaggagcgacaacggctagggcagcggcagccgccaccatccgagccaacccaaggccccgagatcgtgccccggggcgccggcccctga

SEQ ID NO: 8432 - RNA, 726 nt, synthetic construct
  misc_feature 1..726: note = derived and/or modified sequence opt1 fromDNJC4__Homo_sapiens__AAF97845
  source 1..726: mol_type = other RNA
atgcccccgctgctccccctgcgcctgtgccggctctggccccgcaacccgcccagccggctgctgggcgccgccgcggggcagcgctcccggcccagcacctactacgagctcctgggcgtgcaccccggggcctccaccgaggaggtcaagcgcgccttcttcagcaagtccaaggagctgcaccccgaccgggacccgggcaaccccagcctccactcccgcttcgtggagctgagcgaggcctaccgggtgctgtcccgcgagcagagccggcgctcctacgacgaccagctccggagcgggtccccgcccaagagcccccgcacgaccgtccacgacaagtccgcccaccagacccacagctcctggaccccgcccaacgcgcagtactggagccagttccactccgtgcggccccagggcccccagctgcgccagcagcagcacaagcagaacaagcaggtcctgggctactgcctcctgctgatgctcgccgggatgggcctgcactacatcgccttccggaaggtgaagcagatgcacctgaacttcatggacgagaaggaccgcatcatcacggccttctacaacgaggcgcgggcccgcgcccgggccaaccgcgggatcctccagcaggagcgccagcggctgggccagcgccagcccccgcccagcgagcccacccaggggcccgagatcgtgccccggggcgccggcccctga

SEQ ID NO: 8433 - RNA, 726 nt, synthetic construct
  misc_feature 1..726: note = derived and/or modified sequence opt2 fromDNJC4__Homo_sapiens__AAF97845
  source 1..726: mol_type = other RNA
atgccccccctcctccccctccgcctctgccgcctctggccccgcaaccccccctcccgcctcctcggcgccgccgccggccagcgctcccgcccctccacctactacgagctcctcggcgtccaccccggcgcctccaccgaggaggtcaagcgcgccttcttctccaagtccaaggagctccaccccgaccgcgaccccggcaacccctccctccactcccgcttcgtcgagctctccgaggcctaccgcgtcctctcccgcgagcagtcccgccgctcctacgacgaccagctccgctccggctccccccccaagtccccccgcaccaccgtccacgacaagtccgcccaccagacccactcctcctggaccccccccaacgcccagtactggtcccagttccactccgtccgcccccagggcccccagctccgccagcagcagcacaagcagaacaagcaggtcctcggctactgcctcctcctcatgctcgccggcatgggcctccactacatcgccttccgcaaggtcaagcagatgcacctcaacttcatggacgagaaggaccgcatcatcaccgccttctacaacgaggcccgcgcccgcgcccgcgccaaccgcggcatcctccagcaggagcgccagcgcctcggccagcgccagccccccccctccgagcccacccagggccccgagatcgtcccccgcggcgccggcccctga

SEQ ID NO: 8434 - RNA, 726 nt, synthetic construct
  misc_feature 1..726: note = derived and/or modified sequence opt3 fromDNJC4__Homo_sapiens__AAF97845
  source 1..726: mol_type = other RNA
atgccccctctgctcccacttaggctgtgcaggttgtggccgcggaatccccctagccgcttactgggcgccgctgcagggcagcgatcccgtccatctacctactatgagctactcggagtgcaccccggtgcctcaacagaagaggtcaagagagcgttctttagtaaaagcaaggaactgcatcctgacagggatccaggcaacccctcccttcactctcggttcgttgagctgtcggaggcttaccgcgtgttgtcaagagaacaaagcaggcggagttatgacgatcagctccgctccgggtctcctccaaaaagcccgcgaactacggtacatgacaagtccgcccaccagacccattcaagttggacaccccctaacgcacagtactggagccaatttcactctgtgagaccacagggaccccagctgaggcagcaacagcacaaacagaataagcaggtcctgggctattgtctcttactgatgcttgccggtatggggttgcattacatcgctttccggaaggtgaaacaaatgcacctgaactttatggatgagaaggaccgtattataactgcattctataatgaagcccgcgctagagccagggcgaaccggggaatcctacagcaggagcgacaacgcctcggccagagacagcctccaccctccgaaccgacccagggccctgagattgttcccagaggggcaggaccatga

SEQ ID NO: 8435 - RNA, 726 nt, synthetic construct
  misc_feature 1..726: note = derived and/or modified sequence opt4 fromDNJC4__Homo_sapiens__AAF97845
  source 1..726: mol_type = other RNA
atgccccccctgctgcccctgagactgtgcagactgtggcccagaaacccccccagcagactgctgggcgccgccgccggccagagaagcagacccagcacctactacgagctgctgggcgtgcaccccggcgccagcaccgaggaggtgaagagagccttcttcagcaagagcaaggagctgcaccccgacagagaccccggcaaccccagcctgcacagcagattcgtggagctgagcgaggcctacagagtgctgagcagagagcagagcagaagaagctacgacgaccagctgagaagcggcagcccccccaagagccccagaaccaccgtgcacgacaagagcgcccaccagacccacagcagctggaccccccccaacgcccagtactggagccagttccacagcgtgagaccccagggcccccagctgagacagcagcagcacaagcagaacaagcaggtgctgggctactgcctgctgctgatgctggccggcatgggcctgcactacatcgccttcagaaaggtgaagcagatgcacctgaacttcatggacgagaaggacagaatcatcaccgccttctacaacgaggccagagccagagccagagccaacagaggcatcctgcagcaggagagacagagactgggccagagacagcccccccccagcgagcccacccagggccccgagatcgtgcccagaggcgccggcccctga

SEQ ID NO: 8436 - RNA, 726 nt, synthetic construct
  misc_feature 1..726: note = derived and/or modified sequence opt5 fromDNJC4__Homo_sapiens__AAF97845
  source 1..726: mol_type = other RNA
atgccccctctgctcccgctgagactttgccggctgtggccccgcaaccctcccagcagactcctgggcgccgctgccgggcagcggtcccgcccttctacctactatgagcttctgggagtgcaccccggcgcgagcacagaagaggtcaagagagctttcttttccaaatctaaggaactccatcctgaccgggatccggggaatcccagcctgcactcccgcttcgttgagctgtctgaagcctacagagtgctcagccgggagcaatcccgcagaagctatgacgatcagctgcggtctggatcccctcccaaaagccctcgcacgaccgtgcatgacaagtctgcccaccagacacattccagctggacacccccgaacgctcagtactggtctcaatttcactccgtcagacctcagggcccccagcttcggcagcaacagcacaaacagaataaacaggtgctggggtattgtctcctgcttatgctggccggaatgggcctccattacatcgctttccgcaaggttaagcaaatgcacctgaactttatggatgagaaggacagaattatcaccgccttctataatgaagcgcgggccagagctcgcgccaaccggggcattctgcagcaggagagacaacgcctcgggcagcggcagcctcctcccagcgaacccacccagggaccggagatcgtgcccagaggcgctgggccttga

SEQ ID NO: 8437 - protein, 198 aa, synthetic construct
  REGION 1..198: note = DNJC5__Homo_sapiens__Q9H3Z4
MADQRQRSLSTSGESLYHVLGLDKNATSDDIKKSYRKLALKYHPDKNPDNPEAADKFKEINNAHAILTDATKRNIYDKYGSLGLYVAEQFGEENVNTYFVLSSWWAKALFVFCGLLTCCYCCCCLCCCFNCCCGKCKPKAPEGEETEFYVSPEDLEAQLQSDEREATDTPIVIQPASATETTQLTADSHPSYHTDGFN

SEQ ID NO: 8438 - RNA, 597 nt, synthetic construct
  misc_feature 1..597: note = DNJC5__Homo_sapiens__AAH53642
  source 1..597: mol_type = other RNA
atggcagaccagagacagcgctcactgtctacctctggggagtcattgtaccacgtccttgggttggacaagaacgcaacctcagatgacattaaaaagtcctatcggaagcttgccttgaaatatcaccccgacaagaaccccgacaacccggaggccgcggacaagtttaaggagatcaacaacgcgcacgccatcctcacggacgccacaaaaaggaacatctacgacaagtacggctcgctgggtctctacgtggccgagcagtttggggaagagaacgtgaacacctacttcgtgctgtccagctggtgggccaaggccctgtttgtcttctgcggcctcctcacgtgctgctactgctgctgctgtctgtgctgctgcttcaactgctgctgcgggaagtgtaagcccaaggcgcctgaaggcgaggagacggagttctacgtgtcccccgaggatctggaggcacagctgcagtctgacgagagggaggccacagacacgccgatcgtcatacagccggcatccgccaccgagaccacccagctcacagccgactcccaccccagctaccacactgacgggttcaactaa

SEQ ID NO: 8439 - RNA, 597 nt, synthetic construct
  misc_feature 1..597: note = derived and/or modified sequence opt1 fromDNJC5__Homo_sapiens__AAH53642
  source 1..597: mol_type = other RNA
atggccgaccagcgccagcggagcctgtccaccagcggcgagtccctctaccacgtgctggggctggacaagaacgccaccagcgacgacatcaagaagtcctaccgcaagctcgcgctgaagtaccaccccgacaagaacccggacaaccccgaggccgccgacaagttcaaggagatcaacaacgcccacgccatcctgacggacgcgaccaagcggaacatctacgacaagtacggcagcctcgggctgtacgtcgccgagcagttcggcgaggagaacgtgaacacctacttcgtgctgtccagctggtgggccaaggccctcttcgtcttctgcgggctgctgacctgctgctactgctgctgctgcctctgctgctgcttcaactgctgctgcggcaagtgcaagcccaaggcgcccgagggcgaggagacggagttctacgtgtccccggaggacctggaggcccagctgcagagcgacgagcgcgaggccaccgacacccccatcgtgatccagcccgcctccgccaccgagacgacccagctcaccgcggacagccacccctcctaccacaccgacgggttcaactga

SEQ ID NO: 8440 - RNA, 597 nt, synthetic construct
  misc_feature 1..597: note = derived and/or modified sequence opt2 fromDNJC5__Homo_sapiens__AAH53642
  source 1..597: mol_type = other RNA
atggccgaccagcgccagcgctccctctccacctccggcgagtccctctaccacgtcctcggcctcgacaagaacgccacctccgacgacatcaagaagtcctaccgcaagctcgccctcaagtaccaccccgacaagaaccccgacaaccccgaggccgccgacaagttcaaggagatcaacaacgcccacgccatcctcaccgacgccaccaagcgcaacatctacgacaagtacggctccctcggcctctacgtcgccgagcagttcggcgaggagaacgtcaacacctacttcgtcctctcctcctggtgggccaaggccctcttcgtcttctgcggcctcctcacctgctgctactgctgctgctgcctctgctgctgcttcaactgctgctgcggcaagtgcaagcccaaggcccccgagggcgaggagaccgagttctacgtctcccccgaggacctcgaggcccagctccagtccgacgagcgcgaggccaccgacacccccatcgtcatccagcccgcctccgccaccgagaccacccagctcaccgccgactcccacccctcctaccacaccgacggcttcaactga

SEQ ID NO: 8441 - RNA, 597 nt, synthetic construct
  misc_feature 1..597: note = derived and/or modified sequence opt3 fromDNJC5__Homo_sapiens__AAH53642
  source 1..597: mol_type = other RNA
atggccgaccagagacaaaggagcctgtccacctctggcgagtcactctaccacgtgcttgggctggataagaacgctacaagtgacgatatcaaaaagagctatcggaaattggcattaaagtaccatcccgacaaaaatcctgataacccagaagccgcggacaagttcaaggagattaataacgctcacgccatactgactgatgcaacgaaacgcaatatctatgacaagtacggatccctaggtctctatgtcgccgaacagtttggcgaggaaaacgttaatacctacttcgtgctgtcttcgtggtgggctaaagcactttttgtattctgcgggctgttgacatgttgctattgttgctgttgcctctgttgctgttttaactgctgttgcggaaagtgcaaaccgaaggcccccgagggcgaggaaactgagttctacgtgtcacctgaagatctggaggctcagctgcagagcgacgagcgagaagccaccgatacaccaattgtcatccaacccgcgagtgcaaccgagactacacagctcaccgccgactcccatccttcttaccacacggatggttttaattga

SEQ ID NO: 8442 - RNA, 597 nt, synthetic construct
  misc_feature 1..597: note = derived and/or modified sequence opt4 fromDNJC5__Homo_sapiens__AAH53642
  source 1..597: mol_type = other RNA
atggccgaccagagacagagaagcctgagcaccagcggcgagagcctgtaccacgtgctgggcctggacaagaacgccaccagcgacgacatcaagaagagctacagaaagctggccctgaagtaccaccccgacaagaaccccgacaaccccgaggccgccgacaagttcaaggagatcaacaacgcccacgccatcctgaccgacgccaccaagagaaacatctacgacaagtacggcagcctgggcctgtacgtggccgagcagttcggcgaggagaacgtgaacacctacttcgtgctgagcagctggtgggccaaggccctgttcgtgttctgcggcctgctgacctgctgctactgctgctgctgcctgtgctgctgcttcaactgctgctgcggcaagtgcaagcccaaggcccccgagggcgaggagaccgagttctacgtgagccccgaggacctggaggcccagctgcagagcgacgagagagaggccaccgacacccccatcgtgatccagcccgccagcgccaccgagaccacccagctgaccgccgacagccaccccagctaccacaccgacggcttcaactga

SEQ ID NO: 8443 - RNA, 597 nt, synthetic construct
  misc_feature 1..597: note = derived and/or modified sequence opt5 fromDNJC5__Homo_sapiens__AAH53642
  source 1..597: mol_type = other RNA
atggccgaccagagacaacggagcctgtccacctctggcgagagcctctaccacgtgctggggcttgataagaacgctacatccgacgatatcaaaaagtcttatcgcaaactggccctcaagtaccatcccgacaaaaatcctgataacccggaagcggctgacaagttcaaggagattaataacgcccacgccatcctgacggatgctaccaaaagaaatatttatgacaagtacggaagccttggcctgtatgtcgccgaacagtttggggaggaaaacgttaatacatacttcgtgctctcctcttggtgggctaaagccctgtttgtgttctgcggactgctcacctgttgctattgttgctgttgcctgtgttgctgttttaactgctgttgcggcaagtgcaaacccaaggcgcctgagggggaggaaacagagttctacgtcagccccgaagatcttgaggcccagctgcagtccgacgagcgggaagctaccgatacacctatcgtgattcaacccgccagcgctaccgagacgacccagctcacagccgactctcatccttcctaccacaccgatggatttaattga

SEQ ID NO: 8444 - protein, 494 aa, synthetic construct
  REGION 1..494: note = DNJC7__Homo_sapiens__Q99615
MAAAAECDVVMAATEPELLDDQEAKREAETFKEQGNAYYAKKDYNEAYNYYTKAIDMCPKNASYYGNRAATLMMLGRFREALGDAQQSVRLDDSFVRGHLREGKCHLSLGNAMAACRSFQRALELDHKNAQAQQEFKNANAVMEYEKIAETDFEKRDFRKVVFCMDRALEFAPACHRFKILKAECLAMLGRYPEAQSVASDILRMDSTNADALYVRGLCLYYEDCIEKAVQFFVQALRMAPDHEKACIACRNAKALKAKKEDGNKAFKEGNYKLAYELYTEALGIDPNNIKTNAKLYCNRGTVNSKLRKLDDAIEDCTNAVKLDDTYIKAYLRRAQCYMDTEQYEEAVRDYEKVYQTEKTKEHKQLLKNAQLELKKSKRKDYYKILGVDKNASEDEIKKAYRKRALMHHPDRHSGASAEVQKEEEKKFKEVGEAFTILSDPKKKTRYDSGQDLDEEGMNMGDFDPNNIFKAFFGGPGGFSFEASGPGNFFFQFG

SEQ ID NO: 8445 - RNA, 1485 nt, synthetic construct
  misc_feature 1..1485: note = DNJC7__Homo_sapiens__AAH11837
  source 1..1485: mol_type = other RNA
atggcggctgccgcggagtgcgatgtggtaatggcggcgaccgagccggagctgctcgacgaccaagaggcgaagagggaagcagagactttcaaggaacaaggaaatgcatactatgccaagaaagattacaatgaagcttataattattatacaaaagccatagatatgtgtcctaaaaatgctagctattatggtaatcgagcagccaccttgatgatgcttggaaggttccgggaagctcttggagatgcacaacagtcagtgaggttggatgacagttttgtccggggacatctacgagagggcaagtgccacctctctctggggaatgccatggcagcatgtcgcagcttccagagagccctagaactggatcataaaaatgctcaggcacaacaagagttcaagaatgctaatgcagtcatggaatatgagaaaatagcagaaacagattttgagaagcgagattttcggaaggttgttttctgcatggaccgtgccctagaatttgcccctgcctgccatcgcttcaaaatcctcaaggcagaatgtttagcaatgctgggtcgttatccagaagcacagtctgtggctagtgacattctacgaatggattccaccaatgcagatgctctgtatgtacgaggtctttgcctttattacgaagattgtattgagaaggcagttcagtttttcgtacaggctctcaggatggctcctgaccacgagaaggcctgcattgcctgcagaaatgccaaagcactcaaagcaaagaaagaagatgggaataaagcatttaaggaaggaaattacaaactagcatatgaactgtacacagaagccctggggatagaccccaacaatataaaaacaaatgctaaactctactgtaatcggggtacggttaattccaagcttaggaaactagatgatgcaatagaagactgcacaaatgcagtgaagcttgatgacacttacataaaagcctacttgagaagagctcagtgttacatggacacagaacagtatgaagaagcagtacgagactatgaaaaagtataccagacagagaaaacaaaagaacacaaacagctcctaaaaaatgcgcagctggaactgaagaagagtaagaggaaagattactacaagattctaggagtggacaagaatgcctctgaggacgagatcaagaaagcttatcggaaacgggccttgatgcaccatccagatcggcatagtggagccagtgctgaggttcagaaggaggaggagaagaagttcaaggaagttggagaggcctttactatcctctctgatcccaagaaaaagactcgctatgacagtggacaggacctagatgaggagggcatgaatatgggtgattttgatccaaacaatatcttcaaggcattctttggcggtcctggcggcttcagctttgaagcatctggtccagggaatttcttttttcaatttggctaa

SEQ ID NO: 8446 - RNA, 1485 nt, synthetic construct
  misc_feature 1..1485: note = derived and/or modified sequence opt1 fromDNJC7__Homo_sapiens__AAH11837
  source 1..1485: mol_type = other RNA
atggccgccgcggccgagtgcgacgtggtcatggccgccaccgagcccgagctgctcgacgaccaggaggccaagcgcgaggcggagaccttcaaggagcagggcaacgcctactacgccaagaaggactacaacgaggcctacaactactacacgaaggcgatcgacatgtgcccgaagaacgccagctactacgggaaccgggccgccaccctgatgatgctgggccgcttccgggaggccctcggggacgcgcagcagtccgtgcgcctggacgacagcttcgtgcggggccacctccgcgaggggaagtgccacctgtccctgggcaacgccatggccgcctgccggagcttccagcgcgccctggagctcgaccacaagaacgcgcaggcccagcaggagttcaagaacgccaacgccgtcatggagtacgagaagatcgccgagaccgacttcgagaagcgggacttccgcaaggtggtgttctgcatggaccgggcgctggagttcgcccccgcctgccaccgcttcaagatcctgaaggccgagtgcctcgccatgctgggccggtaccccgaggcgcagtccgtcgccagcgacatcctgcgcatggactccaccaacgccgacgccctctacgtgcgggggctgtgcctgtactacgaggactgcatcgagaaggcggtgcagttcttcgtccaggccctccgcatggcccccgaccacgagaaggcctgcatcgcctgccggaacgcgaaggccctgaaggccaagaaggaggacggcaacaaggccttcaaggaggggaactacaagctggcctacgagctctacacggaggcgctgggcatcgacccgaacaacatcaagaccaacgccaagctgtactgcaaccgcgggaccgtgaacagcaagctccggaagctggacgacgccatcgaggactgcaccaacgccgtgaagctggacgacacgtacatcaaggcctacctccgccgggcgcagtgctacatggacaccgagcagtacgaggaggccgtccgcgactacgagaaggtgtaccagaccgagaagaccaaggagcacaagcagctgctgaagaacgcccagctcgagctgaagaagtccaagcgcaaggactactacaagatcctgggcgtggacaagaacgccagcgaggacgagatcaagaaggcgtaccggaagcgcgccctcatgcaccaccccgaccggcactccggcgccagcgccgaggtccagaaggaggaggagaagaagttcaaggaggtgggggaggccttcacgatcctgtccgaccccaagaagaagacccgctacgacagcggccaggacctggacgaggaggggatgaacatgggcgacttcgaccccaacaacatcttcaaggcgttcttcggcgggccgggcgggttctccttcgaggccagcggccccgggaacttcttcttccagttcggctga

SEQ ID NO: 8447 - RNA, 1485 nt, synthetic construct
  misc_feature 1..1485: note = derived and/or modified sequence opt2 fromDNJC7__Homo_sapiens__AAH11837
  source 1..1485: mol_type = other RNA
atggccgccgccgccgagtgcgacgtcgtcatggccgccaccgagcccgagctcctcgacgaccaggaggccaagcgcgaggccgagaccttcaaggagcagggcaacgcctactacgccaagaaggactacaacgaggcctacaactactacaccaaggccatcgacatgtgccccaagaacgcctcctactacggcaaccgcgccgccaccctcatgatgctcggccgcttccgcgaggccctcggcgacgcccagcagtccgtccgcctcgacgactccttcgtccgcggccacctccgcgagggcaagtgccacctctccctcggcaacgccatggccgcctgccgctccttccagcgcgccctcgagctcgaccacaagaacgcccaggcccagcaggagttcaagaacgccaacgccgtcatggagtacgagaagatcgccgagaccgacttcgagaagcgcgacttccgcaaggtcgtcttctgcatggaccgcgccctcgagttcgcccccgcctgccaccgcttcaagatcctcaaggccgagtgcctcgccatgctcggccgctaccccgaggcccagtccgtcgcctccgacatcctccgcatggactccaccaacgccgacgccctctacgtccgcggcctctgcctctactacgaggactgcatcgagaaggccgtccagttcttcgtccaggccctccgcatggcccccgaccacgagaaggcctgcatcgcctgccgcaacgccaaggccctcaaggccaagaaggaggacggcaacaaggccttcaaggagggcaactacaagctcgcctacgagctctacaccgaggccctcggcatcgaccccaacaacatcaagaccaacgccaagctctactgcaaccgcggcaccgtcaactccaagctccgcaagctcgacgacgccatcgaggactgcaccaacgccgtcaagctcgacgacacctacatcaaggcctacctccgccgcgcccagtgctacatggacaccgagcagtacgaggaggccgtccgcgactacgagaaggtctaccagaccgagaagaccaaggagcacaagcagctcctcaagaacgcccagctcgagctcaagaagtccaagcgcaaggactactacaagatcctcggcgtcgacaagaacgcctccgaggacgagatcaagaaggcctaccgcaagcgcgccctcatgcaccaccccgaccgccactccggcgcctccgccgaggtccagaaggaggaggagaagaagttcaaggaggtcggcgaggccttcaccatcctctccgaccccaagaagaagacccgctacgactccggccaggacctcgacgaggagggcatgaacatgggcgacttcgaccccaacaacatcttcaaggccttcttcggcggccccggcggcttctccttcgaggcctccggccccggcaacttcttcttccagttcggctga

SEQ ID NO: 8448 - RNA, 1485 nt, synthetic construct
  misc_feature 1..1485: note = derived and/or modified sequence opt3 fromDNJC7__Homo_sapiens__AAH11837
  source 1..1485: mol_type = other RNA
atggccgctgcagccgagtgcgacgtggtcatggcggctaccgaacccgagctgctcgatgaccaggaagccaagagagaggcagaaacattcaaagagcaaggcaacgcctactatgctaagaaagattacaatgaggcatataactactatactaaggccatcgacatgtgtcctaaaaatgctagctactatgggaacagggccgcgacgcttatgatgctgggacggtttcgcgaagcattgggtgatgcccagcagtccgttcgattagacgattctttcgtgcgtggccacctgagagaggggaagtgccatctatcactcggaaatgctatggccgcatgtaggagttttcagcgggctctggaacttgaccacaagaacgcccaagcgcagcaggagttcaaaaatgccaacgcagtaatggagtacgaaaagattgctgagaccgattttgaaaaacgcgacttcagaaaggtggtcttttgcatggatagggccctggagttcgctccagcctgtcatcggtttaaaatattgaaggcagaatgcctcgccatgctgggccgctacccggaggctcagagcgtggcgtccgacatcctgcgaatggattctacaaatgcagacgccctctatgttagaggtttatgtctgtactatgaggactgcattgaaaaggctgtgcaattctttgtccaggcccttaggatggcacccgatcacgagaaagcctgtatcgcttgccggaacgccaaggcattgaaagcgaagaaagaagacgggaataaggctttcaaagagggaaactacaagctggcctatgaactatacactgaggcactcggcattgatcctaataacatcaagaccaatgccaaactgtattgtaaccgtggcacagtgaactcgaaacttcgcaaactggacgatgctatagaggactgcaccaatgccgtaaagttggatgacacttacatcaaagcatacctcagaagggctcagtgctatatggatacagaacagtacgaggaagccgttcgggactatgagaaggtgtaccaaaccgaaaagacgaaagagcataagcagctgttaaagaacgcgcagctggagctcaagaaatcaaagcgaaaggattattacaaaattcttggggtcgacaagaatgccagcgaagacgagatcaaaaaggcttatcgcaaaagagcactgatgcaccacccagataggcatagtggagcctccgctgaagtgcaaaaggaggaggaaaagaaatttaaggaggtgggtgaagccttcactattttgtctgaccccaaaaagaaaacccggtacgatagcggccaggacctagatgaggaagggatgaacatgggagacttcgatcctaataacatctttaaggcattctttggcggtccagggggattctcctttgaggcgtcaggccccggcaatttctttttccagtttgggtga

SEQ ID NO: 8449 - RNA, 1485 nt, synthetic construct
  misc_feature 1..1485: note = derived and/or modified sequence opt4 fromDNJC7__Homo_sapiens__AAH11837
  source 1..1485: mol_type = other RNA
atggccgccgccgccgagtgcgacgtggtgatggccgccaccgagcccgagctgctggacgaccaggaggccaagagagaggccgagaccttcaaggagcagggcaacgcctactacgccaagaaggactacaacgaggcctacaactactacaccaaggccatcgacatgtgccccaagaacgccagctactacggcaacagagccgccaccctgatgatgctgggcagattcagagaggccctgggcgacgcccagcagagcgtgagactggacgacagcttcgtgagaggccacctgagagagggcaagtgccacctgagcctgggcaacgccatggccgcctgcagaagcttccagagagccctggagctggaccacaagaacgcccaggcccagcaggagttcaagaacgccaacgccgtgatggagtacgagaagatcgccgagaccgacttcgagaagagagacttcagaaaggtggtgttctgcatggacagagccctggagttcgcccccgcctgccacagattcaagatcctgaaggccgagtgcctggccatgctgggcagataccccgaggcccagagcgtggccagcgacatcctgagaatggacagcaccaacgccgacgccctgtacgtgagaggcctgtgcctgtactacgaggactgcatcgagaaggccgtgcagttcttcgtgcaggccctgagaatggcccccgaccacgagaaggcctgcatcgcctgcagaaacgccaaggccctgaaggccaagaaggaggacggcaacaaggccttcaaggagggcaactacaagctggcctacgagctgtacaccgaggccctgggcatcgaccccaacaacatcaagaccaacgccaagctgtactgcaacagaggcaccgtgaacagcaagctgagaaagctggacgacgccatcgaggactgcaccaacgccgtgaagctggacgacacctacatcaaggcctacctgagaagagcccagtgctacatggacaccgagcagtacgaggaggccgtgagagactacgagaaggtgtaccagaccgagaagaccaaggagcacaagcagctgctgaagaacgcccagctggagctgaagaagagcaagagaaaggactactacaagatcctgggcgtggacaagaacgccagcgaggacgagatcaagaaggcctacagaaagagagccctgatgcaccaccccgacagacacagcggcgccagcgccgaggtgcagaaggaggaggagaagaagttcaaggaggtgggcgaggccttcaccatcctgagcgaccccaagaagaagaccagatacgacagcggccaggacctggacgaggagggcatgaacatgggcgacttcgaccccaacaacatcttcaaggccttcttcggcggccccggcggcttcagcttcgaggccagcggccccggcaacttcttcttccagttcggctga

SEQ ID NO: 8450 - RNA, 1485 nt, synthetic construct
  misc_feature 1..1485: note = derived and/or modified sequence opt5 fromDNJC7__Homo_sapiens__AAH11837
  source 1..1485: mol_type = other RNA
atggccgctgccgcggagtgcgacgtggtcatggctgccaccgaacccgagctgctcgatgaccaggaagccaagagagaggctgaaacattcaaagagcaaggcaacgcctactatgctaagaaagattacaatgaggcctataactactatacgaaggcgatcgacatgtgtcctaaaaatgccagctactatgggaaccgggctgccaccctgatgatgcttggacgctttagagaagctctgggcgatgcccagcagtccgttcggctcgacgattctttcgtgcgcgggcacctgagagagggaaagtgccatcttagcctgggcaatgcgatggccgcttgtcggtcctttcagcgcgccctcgaactggaccacaagaacgctcaagcccagcaggagttcaaaaatgccaacgctgtgatggagtacgaaaagattgcggagacagattttgaaaagagagacttccggaaggtcgtgttttgcatggatcgcgccctggagttcgctccggcctgtcatagatttaaaatcctcaaggccgaatgcctggctatgcttgggcggtaccccgaggcccagtctgttgcgagcgacattctgcgcatggattccaccaatgctgacgccctctatgtgagaggactgtgtctttactatgaggactgcatcgaaaaggccgtccaattctttgtgcaggctctgcggatggcccctgatcacgagaaggcttgtattgcctgccgcaacgcgaaagccctcaaagctaagaaagaagacggcaataaggccttcaaagagggcaactacaagctggcttatgaactgtacacagaggccctcgggatcgatcccaataacatcaagaccaatgcgaaactgtattgtaacagaggaacagttaactctaaacttcggaaactggacgatgccattgaggactgcaccaatgctgtgaagctcgatgacacgtacatcaaagcctacctgagacgcgctcagtgctatatggataccgaacagtacgaggaagccgtccgggactatgagaaggtgtaccaaacagaaaagaccaaagagcataagcagcttctgaaaaacgcccagctcgagctgaagaaaagcaagagaaaggattattacaaaattctgggcgtggacaagaatgcttccgaagacgagatcaaaaaggcgtatcgcaaacgggccctcatgcaccaccctgatagacatagcggggcttctgccgaagtccaaaaggaggaggaaaagaaatttaaggaggttggagaagccttcacaattctgtccgaccccaaaaagaaaacccgctacgatagcggccaggaccttgatgaggaagggatgaacatgggagacttcgatcctaataacatctttaaggctttctttggcggccccgggggattctcttttgaggcctccggcccggggaatttctttttccagtttggatga

SEQ ID NO: 8451 - protein, 253 aa, synthetic construct
  REGION 1..253: note = DNJC8__Homo_sapiens__O75937
MAASGESGTSGGGGSTEEAFMTFYSEVKQIEKRDSVLTSKNQIERLTRPGSSYFNLNPFEVLQIDPEVTDEEIKKRFRQLSILVHPDKNQDDADRAQKAFEAVDKAYKLLLDQEQKKRALDVIQAGKEYVEHTVKERKKQLKKEGKPTIVEEDDPELFKQAVYKQTMKLFAELEIKRKEREAKEMHERKRQREEEIEAQEKAKREREWQKNFEESRDGRVDSWRNFQANTKGKKEKKNRTFLRPPKVKMEQRE

SEQ ID NO: 8452 - RNA, 762 nt, synthetic construct
  misc_feature 1..762: note = DNJC8__Homo_sapiens__AAH33159
  source 1..762: mol_type = other RNA
atggcggcttcaggagagagcgggacttcaggcggcggaggcagcaccgaggaagcatttatgaccttctacagtgaggtgaaacaaatagagaagagagactcggttctaacttcgaaaaatcagattgaaagactgacccgtcctggttcctcttacttcaatttgaacccatttgaggttcttcagatagatcctgaagttacagatgaagaaataaaaaagaggtttcggcagttatccatcttggtgcatcctgacaaaaatcaagatgatgctgacagagcacaaaaggcttttgaagctgtggacaaagcttacaagttgctactggatcaggagcaaaagaagagggccctggatgtaattcaggcaggaaaagaatacgtggaacacactgtgaaagagcgaaaaaaacaattaaagaaggaaggaaaacctacaattgtagaggaggatgatcctgagctgttcaaacaagctgtatataaacagacaatgaaactctttgcagagctggaaattaaaaggaaagagagagaagccaaagaaatgcatgaaaggaaacgacaaagggaagaagagattgaagctcaagaaaaagccaaacgggaaagagagtggcagaaaaactttgaggaaagtcgagatggtcgtgtggacagctggcgaaacttccaagccaatacgaaggggaagaaagagaagaaaaatcggaccttcctgagaccaccgaaagtaaaaatggagcaacgtgagtga

SEQ ID NO: 8453 - RNA, 762 nt, synthetic construct
  misc_feature 1..762: note = derived and/or modified sequence opt1 fromDNJC8__Homo_sapiens__AAH33159
  source 1..762: mol_type = other RNA
atggccgccagcggcgagtccgggaccagcggcgggggcgggtccaccgaggaggcgttcatgacgttctacagcgaggtgaagcagatcgagaagcgcgactccgtcctgaccagcaagaaccagatcgagcggctcacccgccccggctccagctacttcaacctgaaccccttcgaggtgctgcagatcgaccccgaggtgaccgacgaggagatcaagaagcggttccgccagctctccatcctggtccaccccgacaagaaccaggacgacgccgaccgggcccagaaggccttcgaggccgtggacaaggcgtacaagctgctcctggaccaggagcagaagaagcgcgccctggacgtgatccaggccggcaaggagtacgtcgagcacacggtgaaggagcggaagaagcagctcaagaaggaggggaagcccaccatcgtggaggaggacgacccggagctgttcaagcaggccgtctacaagcagaccatgaagctgttcgcggagctcgagatcaagcgcaaggagcgggaggccaaggagatgcacgagcgcaagcggcagcgcgaggaggagatcgaggcccaggagaaggccaagcgggagcgcgagtggcagaagaacttcgaggagagccgggacggccgcgtggactcctggcggaacttccaggccaacaccaaggggaagaaggagaagaagaaccgcacgttcctgcggccgcccaaggtgaagatggagcagcgcgagtga

SEQ ID NO: 8454 - RNA, 762 nt, synthetic construct
  misc_feature 1..762: note = derived and/or modified sequence opt2 fromDNJC8__Homo_sapiens__AAH33159
  source 1..762: mol_type = other RNA
atggccgcctccggcgagtccggcacctccggcggcggcggctccaccgaggaggccttcatgaccttctactccgaggtcaagcagatcgagaagcgcgactccgtcctcacctccaagaaccagatcgagcgcctcacccgccccggctcctcctacttcaacctcaaccccttcgaggtcctccagatcgaccccgaggtcaccgacgaggagatcaagaagcgcttccgccagctctccatcctcgtccaccccgacaagaaccaggacgacgccgaccgcgcccagaaggccttcgaggccgtcgacaaggcctacaagctcctcctcgaccaggagcagaagaagcgcgccctcgacgtcatccaggccggcaaggagtacgtcgagcacaccgtcaaggagcgcaagaagcagctcaagaaggagggcaagcccaccatcgtcgaggaggacgaccccgagctcttcaagcaggccgtctacaagcagaccatgaagctcttcgccgagctcgagatcaagcgcaaggagcgcgaggccaaggagatgcacgagcgcaagcgccagcgcgaggaggagatcgaggcccaggagaaggccaagcgcgagcgcgagtggcagaagaacttcgaggagtcccgcgacggccgcgtcgactcctggcgcaacttccaggccaacaccaagggcaagaaggagaagaagaaccgcaccttcctccgcccccccaaggtcaagatggagcagcgcgagtga

SEQ ID NO: 8455 - RNA, 762 nt, synthetic construct
  misc_feature 1..762: note = derived and/or modified sequence opt3 fromDNJC8__Homo_sapiens__AAH33159
  source 1..762: mol_type = other RNA
atggccgctagcggcgagtccgggacctctggaggtggcgggtcaacagaagaggcattcatgactttttacagtgaagtgaagcagatcgagaaaagagacagcgtcctgacgtccaagaaccaaattgaaaggctcacccggcccggatcttcgtatttcaatcttaacccttttgaggttctgcagatagatccagaggtgacagacgaagagatcaaaaagcgcttccgacagttgtcaattttagtacacccggataaaaatcaggacgatgccgaccgtgcgcaaaaggcttttgaagccgtggataaggcatacaaactgctactcgaccaggagcagaagaaaagagccctggatgtcatccaggctggcaaggagtatgtggaacatactgttaaagagaggaagaagcaacttaaaaaggaaggtaaacccaccattgtggaggaagacgatcctgagctgttcaagcaggcagtctacaaacagacaatgaagttgtttgccgagctcgaaatcaaacggaaggagcgcgaagctaaggagatgcacgaaagaaaaaggcagcgggaggaggaaatagaggcccaagaaaaggcgaaacgcgagcgagaatggcagaagaacttcgaggagagcagagacgggagggtggatagttggcggaattttcaggcaaacaccaaaggaaagaaggagaaaaagaatcgtactttcctgcgcccacccaaagtaaagatggaacaaagagaatga

SEQ ID NO: 8456 - RNA, 762 nt, synthetic construct
  misc_feature 1..762: note = derived and/or modified sequence opt4 fromDNJC8__Homo_sapiens__AAH33159
  source 1..762: mol_type = other RNA
atggccgccagcggcgagagcggcaccagcggcggcggcggcagcaccgaggaggccttcatgaccttctacagcgaggtgaagcagatcgagaagagagacagcgtgctgaccagcaagaaccagatcgagagactgaccagacccggcagcagctacttcaacctgaaccccttcgaggtgctgcagatcgaccccgaggtgaccgacgaggagatcaagaagagattcagacagctgagcatcctggtgcaccccgacaagaaccaggacgacgccgacagagcccagaaggccttcgaggccgtggacaaggcctacaagctgctgctggaccaggagcagaagaagagagccctggacgtgatccaggccggcaaggagtacgtggagcacaccgtgaaggagagaaagaagcagctgaagaaggagggcaagcccaccatcgtggaggaggacgaccccgagctgttcaagcaggccgtgtacaagcagaccatgaagctgttcgccgagctggagatcaagagaaaggagagagaggccaaggagatgcacgagagaaagagacagagagaggaggagatcgaggcccaggagaaggccaagagagagagagagtggcagaagaacttcgaggagagcagagacggcagagtggacagctggagaaacttccaggccaacaccaagggcaagaaggagaagaagaacagaaccttcctgagaccccccaaggtgaagatggagcagagagagtga

SEQ ID NO: 8457 - RNA, 762 nt, synthetic construct
  misc_feature 1..762: note = derived and/or modified sequence opt5 fromDNJC8__Homo_sapiens__AAH33159
  source 1..762: mol_type = other RNA
atggccgctagcggcgagtccgggacctctggaggcgggggaagcacagaagaggccttcatgacgttttactccgaagtgaagcagatcgagaaaagagactctgtcctgaccagcaagaaccaaattgaacggctcacacgccccggctcctcttatttcaatctgaacccttttgaggttcttcagatcgatccggaggtgaccgacgaagagattaaaaagagattccggcagctgagcatcctcgtgcaccccgataaaaatcaggacgatgcggaccgcgctcaaaaggcctttgaagccgtcgataaggcttacaaactgcttctggaccaggagcagaagaaaagagccctcgatgtgattcaggctgggaaggagtatgttgaacatacagtgaaagagcggaagaagcaactgaaaaaggaaggaaaacctaccatcgtcgaggaagacgatcccgagctgttcaagcaggccgtgtacaaacagacaatgaagctctttgcggagctggaaatcaaacgcaaggagagagaagccaaggagatgcacgaacggaaacgccagagagaggaggaaattgaggctcaagaaaaggccaaacgggagcgcgaatggcagaagaacttcgaggagtccagagacggccgggttgatagctggcgcaattttcaggctaacaccaaaggcaagaaggagaaaaagaatagaacgttccttcggcctcccaaagtgaagatggaacaaagagaatga

SEQ ID NO: 8458 - protein, 260 aa, synthetic construct
  REGION 1..260: note = DNJC9__Homo_sapiens__Q8WXX5
MGLLDLCEEVFGTADLYRVLGVRREASDGEVRRGYHKVSLQVHPDRVGEGDKEDATRRFQILGKVYSVLSDREQRAVYDEQGTVDEDSPVLTQDRDWEAYWRLLFKKISLEDIQAFEKTYKGSEEELADIKQAYLDFKGDMDQIMESVLCVQYTEEPRIRNIIQQAIDAGEVPSYNAFVKESKQKMNARKRRAQEEAKEAEMSRKELGLDEGVDSLKAAIQSRQKDRQKEMDNFLAQMEAKYCKSSKGGGKKSALKKEKK

SEQ ID NO: 8459 - RNA, 783 nt, synthetic construct
  misc_feature 1..783: note = DNJC9__Homo_sapiens__AAI36508
  source 1..783: mol_type = other RNA
atggggctgctggacctttgcgaggaagtgttcggcaccgccgacctttaccgggtgctgggcgtgcgacgcgaggcctccgacggcgaggtccgacgaggctaccacaaggtgtccctgcaggtacacccggaccgggtgggtgagggcgacaaggaggacgccacccgccgcttccagatcctgggaaaagtctattccgttctcagtgacagagaacagagagcagtgtacgatgagcagggaacagtggacgaggactctcctgtgctcacccaagaccgagactgggaggcgtattggcggctactctttaaaaagatatctttagaggacattcaagcttttgaaaagacatacaaaggttcggaagaagagctggctgatattaagcaggcctatctggacttcaagggtgacatggatcagatcatggagtctgtgctttgcgtgcagtacacagaggaacccaggataaggaatatcattcagcaagctattgacgccggagaggtcccatcctataatgcctttgtcaaagaatcgaaacaaaagatgaatgcaaggaaaaggagggctcaggaagaggccaaagaagcagaaatgagcagaaaggagttggggcttgatgaaggcgtggatagcctgaaggcagccattcagagcagacaaaaggatcggcaaaaggaaatggacaattttctggctcagatggaagcaaagtactgcaaatcttccaaaggaggagggaaaaaatctgctctcaagaaagaaaagaaataa

SEQ ID NO: 8460 - RNA, 783 nt, synthetic construct
  misc_feature 1..783: note = derived and/or modified sequence opt1 fromDNJC9__Homo_sapiens__AAI36508
  source 1..783: mol_type = other RNA
atgggcctgctcgacctgtgcgaggaggtgttcgggaccgccgacctgtaccgcgtcctcggcgtgcggcgcgaggccagcgacggggaggtgcggcgcggctaccacaaggtctccctccaggtgcaccccgaccgggtgggggagggcgacaaggaggacgcgacccgccggttccagatcctgggcaaggtctacagcgtgctctccgaccgcgagcagcgggccgtgtacgacgagcaggggacggtcgacgaggacagcccggtgctgacccaggaccgcgactgggaggcctactggcggctgctgttcaagaagatctccctggaggacatccaggccttcgagaagacctacaagggcagcgaggaggagctggccgacatcaagcaggcgtacctcgacttcaagggggacatggaccagatcatggagtccgtgctgtgcgtccagtacaccgaggagccccgcatccggaacatcatccagcaggccatcgacgccggcgaggtgcccagctacaacgccttcgtgaaggagtccaagcagaagatgaacgcgcgcaagcggcgcgcccaggaggaggccaaggaggccgagatgagccggaaggagctggggctcgacgagggcgtcgactccctgaaggccgcgatccagagccgccagaaggaccggcagaaggagatggacaacttcctggcccagatggaggccaagtactgcaagtccagcaagggcgggggcaagaagtccgccctcaagaaggagaagaagtga

SEQ ID NO: 8461 - RNA, 783 nt, synthetic construct
  misc_feature 1..783: note = derived and/or modified sequence opt2 fromDNJC9__Homo_sapiens__AAI36508
  source 1..783: mol_type = other RNA
atgggcctcctcgacctctgcgaggaggtcttcggcaccgccgacctctaccgcgtcctcggcgtccgccgcgaggcctccgacggcgaggtccgccgcggctaccacaaggtctccctccaggtccaccccgaccgcgtcggcgagggcgacaaggaggacgccacccgccgcttccagatcctcggcaaggtctactccgtcctctccgaccgcgagcagcgcgccgtctacgacgagcagggcaccgtcgacgaggactcccccgtcctcacccaggaccgcgactgggaggcctactggcgcctcctcttcaagaagatctccctcgaggacatccaggccttcgagaagacctacaagggctccgaggaggagctcgccgacatcaagcaggcctacctcgacttcaagggcgacatggaccagatcatggagtccgtcctctgcgtccagtacaccgaggagccccgcatccgcaacatcatccagcaggccatcgacgccggcgaggtcccctcctacaacgccttcgtcaaggagtccaagcagaagatgaacgcccgcaagcgccgcgcccaggaggaggccaaggaggccgagatgtcccgcaaggagctcggcctcgacgagggcgtcgactccctcaaggccgccatccagtcccgccagaaggaccgccagaaggagatggacaacttcctcgcccagatggaggccaagtactgcaagtcctccaagggcggcggcaagaagtccgccctcaagaaggagaagaagtga

SEQ ID NO: 8462 - RNA, 783 nt, synthetic construct
  misc_feature 1..783: note = derived and/or modified sequence opt3 fromDNJC9__Homo_sapiens__AAI36508
  source 1..783: mol_type = other RNA
atgggcctgctcgacctttgcgaggaagtgttcgggaccgccgatctgtacagagtcttgggagttaggcgggaggctagcgacggtgaagtgcgccgaggctatcacaaggtatccttacaggtgcatcccgatcgtgtcggggagggagacaaagaagatgcaacaagaaggtttcaaatcctgggcaaggtgtactctgttctatcagaccgggagcagcgcgccgtgtatgatgagcagggtactgtcgacgaagatagtcctgtgctcacgcaggacagagattgggaggcgtactggaggctgcttttcaaaaagattagcctggaagacatacaggcttttgagaaaacctataaggggtccgaggaagagttggccgatatcaagcaagcatacctcgacttcaaaggagacatggatcagattatggaatctgtactgtgtgttcagtatacagaggaaccacggatccgcaacattatccaacaggccatagacgctggcgaggtgccgtcgtacaatgcatttgtcaaggagtcaaaacagaagatgaacgcccgaaaaagaagggctcaggaagaggccaaggaagcggagatgagccggaaggaactgggcctcgatgagggggtggacagtttaaaagcagccatccaatcccgtcagaaggatcgccagaaagagatggacaatttcctggctcaaatggaagccaagtactgcaaatctagcaagggaggtggcaaaaagtccgcacttaagaaagagaagaaatga

SEQ ID NO: 8463 - RNA, 783 nt, synthetic construct
  misc_feature 1..783: note = derived and/or modified sequence opt4 fromDNJC9__Homo_sapiens__AAI36508
  source 1..783: mol_type = other RNA
atgggcctgctggacctgtgcgaggaggtgttcggcaccgccgacctgtacagagtgctgggcgtgagaagagaggccagcgacggcgaggtgagaagaggctaccacaaggtgagcctgcaggtgcaccccgacagagtgggcgagggcgacaaggaggacgccaccagaagattccagatcctgggcaaggtgtacagcgtgctgagcgacagagagcagagagccgtgtacgacgagcagggcaccgtggacgaggacagccccgtgctgacccaggacagagactgggaggcctactggagactgctgttcaagaagatcagcctggaggacatccaggccttcgagaagacctacaagggcagcgaggaggagctggccgacatcaagcaggcctacctggacttcaagggcgacatggaccagatcatggagagcgtgctgtgcgtgcagtacaccgaggagcccagaatcagaaacatcatccagcaggccatcgacgccggcgaggtgcccagctacaacgccttcgtgaaggagagcaagcagaagatgaacgccagaaagagaagagcccaggaggaggccaaggaggccgagatgagcagaaaggagctgggcctggacgagggcgtggacagcctgaaggccgccatccagagcagacagaaggacagacagaaggagatggacaacttcctggcccagatggaggccaagtactgcaagagcagcaagggcggcggcaagaagagcgccctgaagaaggagaagaagtga

SEQ ID NO: 8464 - RNA, 783 nt, synthetic construct
  misc_feature 1..783: note = derived and/or modified sequence opt5 fromDNJC9__Homo_sapiens__AAI36508
  source 1..783: mol_type = other RNA
atgggcctgctcgacctgtgcgaggaagtgttcgggaccgccgatctttacagagtcctgggagttcggcgcgaggctagcgacggcgaagtgagacgggggtatcacaaggtgtccctccaggtccatcccgatcgcgtgggagagggcgacaaagaagatgccacaagacggtttcaaatcctggggaaggtttactctgtgcttagcgaccgcgagcagagagcggtctatgatgagcagggaacggtggacgaagattcccctgttctgacccaggaccgggattgggaggcttactggcgcctcctgttcaaaaagatttctctggaagacatccaagcctttgagaaaacatataagggcagcgaggaggaactcgccgatattaagcaggcttacctggacttcaaaggcgacatggatcagatcatggaatccgtgctttgtgtccagtataccgaggaaccgcggattagaaacatcatccaacaggccattgacgctggggaggtgccctcttacaatgcctttgtgaaggagagcaaacagaagatgaacgcgcgcaaaagacgggcccaggaagaggctaaggaagccgagatgtcccgcaaggaactgggactcgatgagggcgtcgacagcctgaaagctgccatccaatctagacagaaggatcggcagaaagagatggacaatttccttgcgcaaatggaagccaagtactgcaaatccagcaaagggggaggcaagaagtctgctctgaagaaagagaagaaatga

SEQ ID NO: 8465 - protein, 428 aa, synthetic construct
  REGION 1..428: note = Elk-1__Homo_sapiens__P19419
MDPSVTLWQFLLQLLREQGNGHIISWTSRDGGEFKLVDAEEVARLWGLRKNKTNMNYDKLSRALRYYYDKNIIRKVSGQKFVYKFVSYPEVAGCSTEDCPPQPEVSVTSTMPNVAPAAIHAAPGDTVSGKPGTPKGAGMAGPGGLARSSRNEYMRSGLYSTFTIQSLQPQPPPHPRPAVVLPSAAPAGAAAPPSGSRSTSPSPLEACLEAEEAGLPLQVILTPPEAPNLKSEELNVEPGLGRALPPEVKVEGPKEELEVAGERGFVPETTKAEPEVPPQEGVPARLPAVVMDTAGQAGGHAASSPEISQPQKGRKPRDLELPLSPSLLGGPGPERTPGSGSGSGLQAPGPALTPSLLPTHTLTPVLLTPSSLPPSIHFWSTLSPIAPRSPAKLSFQFPSSGSAQVHIPSISVDGLSTPVVLSPGPQKP

SEQ ID NO: 8466 - RNA, 1287 nt, synthetic construct
  misc_feature 1..1287: note = Elk-1__Homo_sapiens__AAH56150
  source 1..1287: mol_type = other RNA
atggacccatctgtgacgctgtggcagtttctgctgcagctgctgagagagcaaggcaatggccacatcatctcctggacttcacgggatggtggtgaattcaagctggtggatgcagaggaggtggcccggctgtgggggctacgcaagaacaagaccaacatgaattacgacaagctcagccgggccttgcggtactactatgacaagaacatcatccgcaaggtgagcggccagaagttcgtctacaagtttgtgtcctaccctgaggtcgcagggtgctccactgaggactgcccgccccagccagaggtgtctgttacctccaccatgccaaatgtggcccctgctgctatacatgccgccccaggggacactgtctctggaaagccaggcacacccaagggtgcaggaatggcaggcccaggcggtttggcacgcagcagccggaacgagtacatgcgctcgggcctctattccaccttcaccatccagtctctgcagccgcagccaccccctcatcctcggcctgctgtggtgctccccagtgcagctcctgcaggggcagcagcgcccccctcggggagcaggagcaccagtccaagccccttggaggcctgtctggaggctgaagaggccggcttgcctctgcaggtcatcctgaccccgcccgaggccccaaacctgaaatcggaagagcttaatgtggagccgggtttgggccgggctttgcccccagaagtgaaagtagaagggcccaaggaagagttggaagttgcgggggagagagggtttgtgccagaaaccaccaaggccgagccagaagtccctccacaggagggcgtgccagcccggctgcccgcggttgttatggacaccgcagggcaggcgggcggccatgcggcttccagccctgagatctcccagccgcagaagggccggaagccccgggacctagagcttccactcagcccgagcctgctaggtgggccgggacccgaacggaccccaggatcgggaagtggctccggcctccaggctccggggccggcgctgaccccatccctgcttcctacgcatacattgaccccggtgctgctgacacccagctcgctgcctcctagcattcacttctggagcaccctgagtcccattgcgccccgtagcccggccaagctctccttccagtttccatccagtggcagcgcccaggtgcacatcccttctatcagcgtggatggcctctcgacccccgtggtgctctccccagggccccagaagccatga

SEQ ID NO: 8467 - RNA, 1287 nt, synthetic construct
  misc_feature 1..1287: note = derived and/or modified sequence opt1 fromElk-1__Homo_sapiens__AAH56150
  source 1..1287: mol_type = other RNA
atggaccccagcgtgaccctgtggcagttcctcctgcagctgctccgcgagcagggcaacgggcacatcatctcctggaccagccgggacggcggggagttcaagctggtcgacgccgaggaggtggcccgcctgtggggcctccggaagaacaagacgaacatgaactacgacaagctgtcccgcgcgctgcggtactactacgacaagaacatcatccgcaaggtgagcgggcagaagttcgtctacaagttcgtgtcctacccggaggtggccggctgcagcaccgaggactgcccgccccagcccgaggtctccgtgaccagcaccatgcccaacgtggcccccgccgccatccacgcggcccccggcgacacggtctccgggaagcccggcaccccgaagggggccggcatggccgggcccggcggcctcgcgcggagctcccgcaacgagtacatgcggagcgggctgtactccaccttcaccatccagagcctgcagccccagcccccgccccacccccgccccgccgtggtgctcccgtccgccgcccccgccggcgcggccgccccgcccagcgggtcccggagcacgtcccccagccccctggaggcctgcctggaggccgaggaggcgggcctccccctgcaggtcatcctgacgcccccggaggcccccaacctcaagagcgaggagctgaacgtggagcccggcctggggcgcgccctgcccccggaggtgaaggtcgagggccccaaggaggagctggaggtggccggggagcggggcttcgtgcccgagaccaccaaggccgagccggaggtcccgccccaggagggggtgcccgcgcgcctgcccgccgtggtcatggacaccgccggccaggccggcgggcacgccgcgtccagccccgagatctcccagccccagaagggccggaagccccgcgacctcgagctgccgctgagcccctccctcctcgggggccccgggcccgagcggaccccgggcagcggctccgggagcggcctgcaggcccccgggcccgccctcaccccctccctgctgccgacccacacgctcacccccgtgctgctgacccccagctccctgcccccgagcatccacttctggtccaccctcagccccatcgcgccccgctcccccgccaagctgagcttccagttcccgtccagcggctccgcccaggtgcacatccccagcatcagcgtcgacgggctctccacgcccgtggtcctgagcccgggcccccagaagccctga

SEQ ID NO: 8468 - RNA, 1287 nt, synthetic construct
  misc_feature 1..1287: note = derived and/or modified sequence opt2 fromElk-1__Homo_sapiens__AAH56150
  source 1..1287: mol_type = other RNA
atggacccctccgtcaccctctggcagttcctcctccagctcctccgcgagcagggcaacggccacatcatctcctggacctcccgcgacggcggcgagttcaagctcgtcgacgccgaggaggtcgcccgcctctggggcctccgcaagaacaagaccaacatgaactacgacaagctctcccgcgccctccgctactactacgacaagaacatcatccgcaaggtctccggccagaagttcgtctacaagttcgtctcctaccccgaggtcgccggctgctccaccgaggactgccccccccagcccgaggtctccgtcacctccaccatgcccaacgtcgcccccgccgccatccacgccgcccccggcgacaccgtctccggcaagcccggcacccccaagggcgccggcatggccggccccggcggcctcgcccgctcctcccgcaacgagtacatgcgctccggcctctactccaccttcaccatccagtccctccagccccagccccccccccacccccgccccgccgtcgtcctcccctccgccgcccccgccggcgccgccgcccccccctccggctcccgctccacctccccctcccccctcgaggcctgcctcgaggccgaggaggccggcctccccctccaggtcatcctcaccccccccgaggcccccaacctcaagtccgaggagctcaacgtcgagcccggcctcggccgcgccctcccccccgaggtcaaggtcgagggccccaaggaggagctcgaggtcgccggcgagcgcggcttcgtccccgagaccaccaaggccgagcccgaggtccccccccaggagggcgtccccgcccgcctccccgccgtcgtcatggacaccgccggccaggccggcggccacgccgcctcctcccccgagatctcccagccccagaagggccgcaagccccgcgacctcgagctccccctctccccctccctcctcggcggccccggccccgagcgcacccccggctccggctccggctccggcctccaggcccccggccccgccctcaccccctccctcctccccacccacaccctcacccccgtcctcctcaccccctcctccctccccccctccatccacttctggtccaccctctcccccatcgccccccgctcccccgccaagctctccttccagttcccctcctccggctccgcccaggtccacatcccctccatctccgtcgacggcctctccacccccgtcgtcctctcccccggcccccagaagccctga

SEQ ID NO: 8469 - RNA, 1287 nt, synthetic construct
  misc_feature 1..1287: note = derived and/or modified sequence opt3 fromElk-1__Homo_sapiens__AAH56150
  source 1..1287: mol_type = other RNA
atggaccccagcgtgaccctgtggcagttcctccttcaactgttgagagagcagggcaacgggcacatcatttcctggacatctagggatggaggtgaatttaagttagtcgacgccgaggaagttgctcggctgtggggcctacgcaaaaataagactaacatgaattacgataaactctcacgagcactgcgttattactatgacaagaacataatcagaaaagtgagtgggcagaagttcgtatacaagtttgtgagctatcctgaggtcgccggatgctccacggaagattgtccaccgcagcccgaggtgtctgttacctcgacaatgcctaatgtggcgccagctgccattcatgcagcccccggcgacactgtctcaggtaaacctgggaccccaaagggagctggcatggcaggccccgggggacttgccaggagcagtcggaacgagtacatgcgctccggtctgtattctacattcaccatccagagcttgcaacctcagccaccgccccaccctagaccagctgtggtactcccctccgccgcgcctgcaggcgccgctgccccaccctcagggagtaggagcacttctccgtcccctctggaagcatgcctggaggctgaagaggccggactccccttacaggttattctgacaccacctgaggcgcccaatcttaaatcagaagagttgaacgtggaaccaggcctgggtcgggccctaccccctgaggtcaaggtggaagggccaaaagaggagctcgaagtggcaggagagcgcggctttgtcccggaaaccacgaaggctgagcccgaagttcctccacaagagggcgtgcccgcccgactgcctgctgtagtgatggatactgccgggcaggcaggaggtcatgccgctagcagtccagagatctctcagccccagaagggcagaaaaccgagggaccttgaactgcctttgtccccaagcctcttagggggacccggccctgagcggacccccggttcggggtctggctccggactgcaagcgccaggccctgcactgacaccctcactccttccaactcacaccctgacaccggtcttgctaacccctagtagcctgcccccatccatacatttctggtctacgctcagccccatcgcccctcgttcaccagctaagctgagttttcagttcccctccagcgggtctgcccaggtgcacattccttcaatcagtgttgatggacttagcactccggtggtcctgtccccaggtccccaaaaaccttga

SEQ ID NO: 8470 - RNA, 1287 nt, synthetic construct
  misc_feature 1..1287: note = derived and/or modified sequence opt4 fromElk-1__Homo_sapiens__AAH56150
  source 1..1287: mol_type = other RNA
atggaccccagcgtgaccctgtggcagttcctgctgcagctgctgagagagcagggcaacggccacatcatcagctggaccagcagagacggcggcgagttcaagctggtggacgccgaggaggtggccagactgtggggcctgagaaagaacaagaccaacatgaactacgacaagctgagcagagccctgagatactactacgacaagaacatcatcagaaaggtgagcggccagaagttcgtgtacaagttcgtgagctaccccgaggtggccggctgcagcaccgaggactgccccccccagcccgaggtgagcgtgaccagcaccatgcccaacgtggcccccgccgccatccacgccgcccccggcgacaccgtgagcggcaagcccggcacccccaagggcgccggcatggccggccccggcggcctggccagaagcagcagaaacgagtacatgagaagcggcctgtacagcaccttcaccatccagagcctgcagccccagccccccccccaccccagacccgccgtggtgctgcccagcgccgcccccgccggcgccgccgccccccccagcggcagcagaagcaccagccccagccccctggaggcctgcctggaggccgaggaggccggcctgcccctgcaggtgatcctgaccccccccgaggcccccaacctgaagagcgaggagctgaacgtggagcccggcctgggcagagccctgccccccgaggtgaaggtggagggccccaaggaggagctggaggtggccggcgagagaggcttcgtgcccgagaccaccaaggccgagcccgaggtgcccccccaggagggcgtgcccgccagactgcccgccgtggtgatggacaccgccggccaggccggcggccacgccgccagcagccccgagatcagccagccccagaagggcagaaagcccagagacctggagctgcccctgagccccagcctgctgggcggccccggccccgagagaacccccggcagcggcagcggcagcggcctgcaggcccccggccccgccctgacccccagcctgctgcccacccacaccctgacccccgtgctgctgacccccagcagcctgccccccagcatccacttctggagcaccctgagccccatcgcccccagaagccccgccaagctgagcttccagttccccagcagcggcagcgcccaggtgcacatccccagcatcagcgtggacggcctgagcacccccgtggtgctgagccccggcccccagaagccctga

SEQ ID NO: 8471 - RNA, 1287 nt, synthetic construct
  misc_feature 1..1287: note = derived and/or modified sequence opt5 fromElk-1__Homo_sapiens__AAH56150
  source 1..1287: mol_type = other RNA
atggaccccagcgtgaccctgtggcagttcctcctgcaacttctgagagagcagggcaacgggcacatcatttcctggacatctcgggatggaggcgaatttaagctcgtcgacgccgaggaagttgctcgcctgtgggggcttcggaaaaataagacgaacatgaattacgataaactgagcagagccctccgctattactatgacaagaacatcattagaaaagtgtccggacagaagttcgtgtacaagtttgtctcttatcctgaggtggcgggctgcagcaccgaagattgtccgccccagcctgaggtttccgtgacatctaccatgcccaatgtcgctcctgccgccatccatgctgcccccggggacacagtgagcggaaaacctggcaccccgaagggcgctgggatggccggacccggcgggctggcgcggtccagccgcaacgagtacatgagatctggactgtattccacattcaccattcaaagcctccagcctcagccccctccccacccgcggcctgccgttgtgctgccctctgctgcccctgctggcgccgcggcccctccctccgggagccgctctacgtcccccagcccgcttgaggcttgcctggaggccgaagaggctggactccccctgcaggtcatccttacccctcccgaggcccctaatctgaaatccgaagaactcaacgtggaacccggcctgggcagagccctgccgcctgaggtgaaggtcgaagggcccaaagaggagctcgaagttgctggagagcggggctttgtgcctgaaacaaccaaggcggagcccgaagtgcctccccaagagggggtcccggcccgcctgcctgctgtggttatggatacagccggacaggccggcgggcatgctgcctctagccccgagatctcccagccccagaagggaagaaaacctcgggaccttgaactgccgctcagcccctctctgcttggcggccctgggcccgagcgcacccctggatccggcagcgggtctggactgcaagcgcccggccctgctctcacgcccagcctgctgccgacacacaccctcacacctgtgctgcttaccccctcctctctgcctcccagcattcatttctggtccaccctcagcccgatcgcccctagatctcccgccaagctgtcctttcagttccctagctctgggtccgctcaggtccacattcccagcatctccgtggatggcctttctacacccgttgtgctgagccctggaccgcaaaaaccctga

SEQ ID NO: 8472 - protein, 121 aa, synthetic construct
  REGION 1..121: note = Elk-1__Homo_sapiens__Q8N9S0
MDTAGQAGGHAASSPEISQPQKGRKPRDLELPLSPSLLGGPGPERTPSLLPTHTLTPVLLTPSSLPPSIHFWSTLSPIAPRSPAKLSFQFPSSGSAQVHIPSISVDGLSTPVVLSPGPQKP

SEQ ID NO: 8473 - RNA, 366 nt, synthetic construct
  misc_feature 1..366: note = Elk-1__Homo_sapiens__BAC04259
  source 1..366: mol_type = other RNA
atggacaccgcagggcaggcgggcggccatgcggcttccagccctgagatctcccagccgcagaagggccggaagccccgggacctagagcttccactcagcccgagcctgctaggtgggccgggacccgaacggaccccatccctgcttcctacgcatacattgaccccggtgctgctgacacccagctcgctgcctcctagcattcacttctggagcaccctgagtcccattgcgccccgtagcccggccaagctctccttccagtttccatccagtggcagcgcccaggtgcacatcccttctatcagcgtggatggcctctcgacccccgtggtgctctccccagggccccagaagccatga

SEQ ID NO: 8474 - RNA, 366 nt, synthetic construct
  misc_feature 1..366: note = derived and/or modified sequence opt1 fromElk-1__Homo_sapiens__BAC04259
  source 1..366: mol_type = other RNA
atggacaccgccggccaggccgggggccacgccgccagctcccccgagatcagccagccgcagaaggggcgcaagccccgggacctggagctccccctgtcccccagcctgctcggcgggccgggccccgagcgcaccccctccctgctgcccacgcacaccctcaccccggtgctgctgacccccagctccctcccgcccagcatccacttctggtccacgctgagccccatcgcgccccggtcccccgccaagctgagcttccagttcccctccagcggctccgcccaggtccacatcccgagcatctccgtggacgggctcagcacccccgtggtcctgtcccccggcccccagaagccgtga

SEQ ID NO: 8475 - RNA, 366 nt, synthetic construct
  misc_feature 1..366: note = derived and/or modified sequence opt2 fromElk-1__Homo_sapiens__BAC04259
  source 1..366: mol_type = other RNA
atggacaccgccggccaggccggcggccacgccgcctcctcccccgagatctcccagccccagaagggccgcaagccccgcgacctcgagctccccctctccccctccctcctcggcggccccggccccgagcgcaccccctccctcctccccacccacaccctcacccccgtcctcctcaccccctcctccctccccccctccatccacttctggtccaccctctcccccatcgccccccgctcccccgccaagctctccttccagttcccctcctccggctccgcccaggtccacatcccctccatctccgtcgacggcctctccacccccgtcgtcctctcccccggcccccagaagccctga

SEQ ID NO: 8476 - RNA, 366 nt, synthetic construct
  misc_feature 1..366: note = derived and/or modified sequence opt3 fromElk-1__Homo_sapiens__BAC04259
  source 1..366: mol_type = other RNA
atggacaccgccggccaggctgggggacacgcagccagctcccccgagatctctcaacctcagaagggtagaaaaccaagggatctggaactcccgctttcacccagtctgttgggcgggcctggaccagagcggacacccagcttactgcctactcatacgctaaccccagtgctcctgacaccctcctctcttcctccatcgattcacttctggtcaactctgagcccgatagcgccccgcagtcctgctaagttgtcctttcagttcccatctagcggctccgcccaggtccatatcccctcaattagtgttgacggtctcagcacccctgtggtactgtctccagggccccaaaaaccgtga

SEQ ID NO: 8477 - RNA, 366 nt, synthetic construct
  misc_feature 1..366: note = derived and/or modified sequence opt4 fromElk-1__Homo_sapiens__BAC04259
  source 1..366: mol_type = other RNA
atggacaccgccggccaggccggcggccacgccgccagcagccccgagatcagccagccccagaagggcagaaagcccagagacctggagctgcccctgagccccagcctgctgggcggccccggccccgagagaacccccagcctgctgcccacccacaccctgacccccgtgctgctgacccccagcagcctgccccccagcatccacttctggagcaccctgagccccatcgcccccagaagccccgccaagctgagcttccagttccccagcagcggcagcgcccaggtgcacatccccagcatcagcgtggacggcctgagcacccccgtggtgctgagccccggcccccagaagccctga

SEQ ID NO: 8478 - RNA, 366 nt, synthetic construct
  misc_feature 1..366: note = derived and/or modified sequence opt5 fromElk-1__Homo_sapiens__BAC04259
  source 1..366: mol_type = other RNA
atggacaccgccggccaggctgggggacacgccgcgagctcccccgagatctctcaacctcagaagggcagaaaaccgcgggatctggaactccccctgagcccttcccttctcgggggacccggccctgagcgcacaccctctctgctgcctacgcatacccttacaccggtgctgctcacccccagctccctgcctccctctattcacttctggagcacactgtcccctatcgctcccagaagcccggccaagctctcttttcagttcccttccagcgggtctgcccaggtccatattccctccatcagcgttgacggactgtctacccctgtggtgctttcccccggcccccaaaaaccttga

SEQ ID NO: 8479 - protein, 379 aa, synthetic construct
  REGION 1..379: note = ERK1__Homo_sapiens__P27361
MAAAAAQGGGGGEPRRTEGVGPGVPGEVEMVKGQPFDVGPRYTQLQYIGEGAYGMVSSAYDHVRKTRVAIKKISPFEHQTYCQRTLREIQILLRFRHENVIGIRDILRASTLEAMRDVYIVQDLMETDLYKLLKSQQLSNDHICYFLYQILRGLKYIHSANVLHRDLKPSNLLINTTCDLKICDFGLARIADPEHDHTGFLTEYVATRWYRAPEIMLNSKGYTKSIDIWSVGCILAEMLSNRPIFPGKHYLDQLNHILGILGSPSQEDLNCIINMKARNYLQSLPSKTKVAWAKLFPKSDSKALDLLDRMLTFNPNKRITVEEALAHPYLEQYYDPTDEPVAEEPFTFAMELDDLPKERLKELIFQETARFQPGVLEAP

SEQ ID NO: 8480 - RNA, 1140 nt, synthetic construct
  misc_feature 1..1140: note = ERK1__Homo_sapiens__AAH13992
  source 1..1140: mol_type = other RNA
atggcggcggcggcggctcaggggggcgggggcggggagccccgtagaaccgagggggtcggcccgggggtcccgggggaggtggagatggtgaaggggcagccgttcgacgtgggcccgcgctacacgcagttgcagtacatcggcgagggcgcgtacggcatggtcagctcggcctatgaccacgtgcgcaagactcgcgtggccatcaagaagatcagccccttcgaacatcagacctactgccagcgcacgctccgggagatccagatcctgctgcgcttccgccatgagaatgtcatcggcatccgagacattctgcgggcgtccaccctggaagccatgagagatgtctacattgtgcaggacctgatggagactgacctgtacaagttgctgaaaagccagcagctgagcaatgaccatatctgctacttcctctaccagatcctgcggggcctcaagtacatccactccgccaacgtgctccaccgagatctaaagccctccaacctgctcatcaacaccacctgcgaccttaagatttgtgatttcggcctggcccggattgccgatcctgagcatgaccacaccggcttcctgacggagtatgtggctacgcgctggtaccgggccccagagatcatgctgaactccaagggctataccaagtccatcgacatctggtctgtgggctgcattctggctgagatgctctctaaccggcccatcttccctggcaagcactacctggatcagctcaaccacattctgggcatcctgggctccccatcccaggaggacctgaattgtatcatcaacatgaaggcccgaaactacctacagtctctgccctccaagaccaaggtggcttgggccaagcttttccccaagtcagactccaaagcccttgacctgctggaccggatgttaacctttaaccccaataaacggatcacagtggaggaagcgctggctcacccctacctggagcagtactatgacccgacggatgagccagtggccgaggagcccttcaccttcgccatggagctggatgacctacctaaggagcggctgaaggagctcatcttccaggagacagcacgcttccagcccggagtgctggaggccccctag

SEQ ID NO: 8481 - RNA, 1140 nt, synthetic construct
  misc_feature 1..1140: note = derived and/or modified sequence opt1 fromERK1__Homo_sapiens__AAH13992
  source 1..1140: mol_type = other RNA
atggccgccgcggccgcccagggcgggggcgggggcgagccccgccggaccgagggggtgggcccgggcgtccccggggaggtggagatggtgaagggccagcccttcgacgtcgggccccgctacacccagctgcagtacatcggcgagggggcctacggcatggtgagctccgcctacgaccacgtgcggaagacgcgcgtcgcgatcaagaagatcagcccgttcgagcaccagacctactgccagcggaccctccgcgagatccagatcctgctgcggttccgccacgagaacgtgatcggcatccgggacatcctccgcgcctccaccctggaggccatgcgggacgtgtacatcgtccaggacctgatggagacggacctctacaagctgctcaagagccagcagctctccaacgaccacatctgctacttcctgtaccagatcctgcgcgggctcaagtacatccacagcgccaacgtgctgcaccgggacctgaagccctccaacctcctgatcaacacgacctgcgacctgaagatctgcgacttcggcctcgcgcgcatcgccgaccccgagcacgaccacaccgggttcctgaccgagtacgtggccacccggtggtaccgcgcccccgagatcatgctgaacagcaagggctacaccaagtccatcgacatctggagcgtcggctgcatcctcgccgagatgctgtccaaccggccgatcttccccgggaagcactacctggaccagctcaaccacatcctgggcatcctggggagcccctcccaggaggacctcaactgcatcatcaacatgaaggcgcgcaactacctgcagagcctgccctccaagaccaaggtggcctgggccaagctgttccccaagagcgactccaaggccctggacctgctcgaccggatgctgacgttcaacccgaacaagcgcatcaccgtggaggaggccctggcgcacccctacctcgagcagtactacgaccccaccgacgagccggtcgccgaggagcccttcaccttcgccatggagctggacgacctgcccaaggagcggctcaaggagctgatcttccaggagacggcccgcttccagcccggcgtgctggaggccccgtga

SEQ ID NO: 8482 - RNA, 1140 nt, synthetic construct
  misc_feature 1..1140: note = derived and/or modified sequence opt2 fromERK1__Homo_sapiens__AAH13992
  source 1..1140: mol_type = other RNA
atggccgccgccgccgcccagggcggcggcggcggcgagccccgccgcaccgagggcgtcggccccggcgtccccggcgaggtcgagatggtcaagggccagcccttcgacgtcggcccccgctacacccagctccagtacatcggcgagggcgcctacggcatggtctcctccgcctacgaccacgtccgcaagacccgcgtcgccatcaagaagatctcccccttcgagcaccagacctactgccagcgcaccctccgcgagatccagatcctcctccgcttccgccacgagaacgtcatcggcatccgcgacatcctccgcgcctccaccctcgaggccatgcgcgacgtctacatcgtccaggacctcatggagaccgacctctacaagctcctcaagtcccagcagctctccaacgaccacatctgctacttcctctaccagatcctccgcggcctcaagtacatccactccgccaacgtcctccaccgcgacctcaagccctccaacctcctcatcaacaccacctgcgacctcaagatctgcgacttcggcctcgcccgcatcgccgaccccgagcacgaccacaccggcttcctcaccgagtacgtcgccacccgctggtaccgcgcccccgagatcatgctcaactccaagggctacaccaagtccatcgacatctggtccgtcggctgcatcctcgccgagatgctctccaaccgccccatcttccccggcaagcactacctcgaccagctcaaccacatcctcggcatcctcggctccccctcccaggaggacctcaactgcatcatcaacatgaaggcccgcaactacctccagtccctcccctccaagaccaaggtcgcctgggccaagctcttccccaagtccgactccaaggccctcgacctcctcgaccgcatgctcaccttcaaccccaacaagcgcatcaccgtcgaggaggccctcgcccacccctacctcgagcagtactacgaccccaccgacgagcccgtcgccgaggagcccttcaccttcgccatggagctcgacgacctccccaaggagcgcctcaaggagctcatcttccaggagaccgcccgcttccagcccggcgtcctcgaggccccctga

SEQ ID NO: 8483 - RNA, 1140 nt, synthetic construct
  misc_feature 1..1140: note = derived and/or modified sequence opt3 fromERK1__Homo_sapiens__AAH13992
  source 1..1140: mol_type = other RNA
atggccgctgcagccgcgcagggcgggggaggtggcgagcccagaaggaccgaaggggtgggacctggcgtcccaggtgaggttgaaatggtgaaggggcaaccgttcgacgtaggaccccggtacacacagctgcagtatatcggcgagggcgcttacgggatggtgagctccgcctatgatcacgtccgcaaaactcgagtggcaattaagaaaatatctccttttgaacatcagacgtactgccaacgtaccctcagagagatccagattcttctgaggttccggcacgagaacgttatcggtattcgcgacatcttgagagcctcaacattagaagctatgagggatgtgtatatagtccaggacctgatggagactgatctatacaagctcctgaaaagtcagcaacttagcaatgaccatatctgttattttctgtaccagattttgcggggactcaagtacatccactccgcaaacgtgctgcatcgcgatctgaagccatctaatctcttaattaacaccacatgcgacctgaaaatctgtgatttcggccttgcccgaatagctgaccccgaacacgatcacaccgggtttttgactgagtatgtagccacaagatggtacagggcgcctgagattatgttaaattcgaagggatataccaaatcaatcgacatttggagcgttggctgcatcctagcagaaatgctcagtaaccggccaatcttccccggtaagcattacctggatcagcttaatcacattctggggatattgggatccccttctcaggaggacctcaactgtatcattaatatgaaagcccgtaactatctgcaaagcctgccatccaagacgaaggtggcttgggccaaactgtttccgaagtcagacagtaaagcactcgatcttctggaccgcatgttgactttcaatcccaacaagagaatcaccgtcgaagaggctctagcccatccttacctggaacagtattacgatccaacagacgagcccgtggcggaggaaccttttactttcgccatggagctcgatgacctgccaaaagaaaggcttaaggagctgatatttcaggaaaccgcacggttccaacccggcgtgttggaggctccgtga

SEQ ID NO: 8484 - RNA, 1140 nt, synthetic construct
  misc_feature 1..1140: note = derived and/or modified sequence opt4 fromERK1__Homo_sapiens__AAH13992
  source 1..1140: mol_type = other RNA
atggccgccgccgccgcccagggcggcggcggcggcgagcccagaagaaccgagggcgtgggccccggcgtgcccggcgaggtggagatggtgaagggccagcccttcgacgtgggccccagatacacccagctgcagtacatcggcgagggcgcctacggcatggtgagcagcgcctacgaccacgtgagaaagaccagagtggccatcaagaagatcagccccttcgagcaccagacctactgccagagaaccctgagagagatccagatcctgctgagattcagacacgagaacgtgatcggcatcagagacatcctgagagccagcaccctggaggccatgagagacgtgtacatcgtgcaggacctgatggagaccgacctgtacaagctgctgaagagccagcagctgagcaacgaccacatctgctacttcctgtaccagatcctgagaggcctgaagtacatccacagcgccaacgtgctgcacagagacctgaagcccagcaacctgctgatcaacaccacctgcgacctgaagatctgcgacttcggcctggccagaatcgccgaccccgagcacgaccacaccggcttcctgaccgagtacgtggccaccagatggtacagagcccccgagatcatgctgaacagcaagggctacaccaagagcatcgacatctggagcgtgggctgcatcctggccgagatgctgagcaacagacccatcttccccggcaagcactacctggaccagctgaaccacatcctgggcatcctgggcagccccagccaggaggacctgaactgcatcatcaacatgaaggccagaaactacctgcagagcctgcccagcaagaccaaggtggcctgggccaagctgttccccaagagcgacagcaaggccctggacctgctggacagaatgctgaccttcaaccccaacaagagaatcaccgtggaggaggccctggcccacccctacctggagcagtactacgaccccaccgacgagcccgtggccgaggagcccttcaccttcgccatggagctggacgacctgcccaaggagagactgaaggagctgatcttccaggagaccgccagattccagcccggcgtgctggaggccccctga

SEQ ID NO: 8485 - RNA, 1140 nt, synthetic construct
  misc_feature 1..1140: note = derived and/or modified sequence opt5 fromERK1__Homo_sapiens__AAH13992
  source 1..1140: mol_type = other RNA
atggccgctgccgcggctcagggcgggggaggcggggagcccagacggaccgaaggagtgggccctggggtcccgggagaggttgaaatggtgaagggccaacccttcgacgtgggccctcgctacacacagctgcagtatatcggggagggagcctacggcatggtcagctccgcctatgatcacgtgagaaaaacgcgggttgctattaagaaaatctctccctttgaacatcagacctactgccaacgcacactcagagagattcagatcctgcttcggttccgccacgagaacgtgattgggatcagagacatcctgcgggccagcaccctcgaagctatgcgcgatgtctatattgtgcaggacctgatggagacagatctttacaagctgctcaaatcccagcaactgtctaatgaccatatctgttattttctgtaccagattctcagaggactgaagtacatccacagcgccaacgttcttcatcgggatctgaagccttccaatctcctgattaacaccacatgcgaccttaaaatctgtgatttcggcctggcgcgcattgccgaccccgaacacgatcacaccgggtttctcacggagtatgtggctaccagatggtaccgggcccctgagatcatgctcaattctaagggatatacaaaaagcatcgacatttggtccgtcggctgcatcctggctgaaatgctgagcaaccgcccgattttccccggcaagcattacctggatcagcttaatcacatcctggggattctcggatctccttcccaggaggacctgaactgtatcatcaatatgaaagccagaaactatcttcaaagcctgccctctaagaccaaggtggcgtgggccaaactctttcctaagtccgacagcaaagctctggatctgctcgaccggatgctgacattcaatcccaacaagagaattaccgtggaagaggcccttgctcatccgtacctggaacagtattacgatcctacggacgagcccgtcgccgaggaaccttttacattcgccatggagctcgatgacctgcccaaagaacgccttaaggagctgatctttcaggaaaccgctcggttccaacccggcgttctcgaggcgccttga

SEQ ID NO: 8486 - protein, 360 aa, synthetic construct [sequence omitted]

SEQ ID NO: 8487 - RNA, 1083 nt, synthetic construct
  misc_feature 1..1083: note = ERK2__Homo_sapiens__AAA58459
  source 1..1083: mol_type = other RNA
atggcggcggcggcggcggcgggcgcgggcccggagatggtccgcgggcaggtgttcgacgtggggccgcgctacaccaacctctcgtacatcggcgagggcgcctacggcatggtgtgctctgcttatgataatgtcaacaaagttcgagtagctatcaagaaaatcagcccctttgagcaccagacctactgccagagaaccctgagggagataaaaatcttactgcgcttcagacatgagaacatcattggaatcaatgacattattcgagcaccaaccatcgagcaaatgaaagatgtatatatagtacaggacctcatggaaacagatctttacaagctcttgaagacacaacacctcagcaatgaccatatctgctattttctctaccagatcctcagagggttaaaatatatccattcagctaacgttctgcaccgtgacctcaagccttccaacctgctgctcaacaccacctgtgatctcaagatctgtgactttggcctggcccgtgttgcagatccagaccatgatcacacagggttcctgacagaatatgtggccacacgttggtacagggctccagaaattatgttgaattccaagggctacaccaagtccattgatatttggtctgtaggctgcattctggcagaaatgctttccaacaggcccatctttccagggaagcattatcttgaccagctgaatcacattttgggtattcttggatccccatcacaagaagacctgaattgtataataaatttaaaagctaggaactatttgctttctcttccacacaaaaataaggtgccatggaacaggctgttcccaaatgctgactccaaagctctggacttattggacaaaatgttgacattcaacccacacaagaggattgaagtagaacaggctctggcccacccatatctggagcagtattacgacccgagtgacgagcccatcgccgaagcaccattcaagttcgacatggaattggatgacttgcctaaggaaaagctaaaagaactaatttttgaagagactgctagattccagccaggatacagatcttaa

SEQ ID NO: 8488 - RNA, 1083 nt, synthetic construct
  misc_feature 1..1083: note = derived and/or modified sequence opt1 fromERK2__Homo_sapiens__AAA58459
  source 1..1083: mol_type = other RNA
atggccgccgcggccgccgccggcgccgggcccgagatggtgcgcggccaggtcttcgacgtggggccgcggtacaccaacctgagctacatcggcgagggggcgtacggcatggtgtgctccgcctacgacaacgtcaacaaggtgcgcgtggccatcaagaagatcagccccttcgagcaccagacctactgccagcggacgctccgcgagatcaagatcctgctgcggttccgccacgagaacatcatcggcatcaacgacatcatccgggcccccaccatcgagcagatgaaggacgtctacatcgtgcaggacctcatggagaccgacctgtacaagctgctcaagacccagcacctgtccaacgaccacatctgctacttcctgtaccagatcctccgcgggctgaagtacatccacagcgcgaacgtgctgcaccgggacctcaagccctccaacctgctgctcaacacgacctgcgacctgaagatctgcgacttcggcctggcccgcgtcgccgacccggaccacgaccacaccgggttcctcaccgagtacgtggccacgcggtggtaccgcgcccccgagatcatgctgaacagcaagggctacaccaagtccatcgacatctggagcgtggggtgcatcctggcggagatgctctccaaccggcccatcttccccggcaagcactacctggaccagctgaaccacatcctcggcatcctggggagcccgtcccaggaggacctgaactgcatcatcaacctcaaggcccgcaactacctgctgagcctcccccacaagaacaaggtcccctggaaccggctgttccccaacgccgactccaaggccctggacctcctggacaagatgctgaccttcaacccgcacaagcgcatcgaggtggagcaggccctcgcgcacccctacctggagcagtactacgaccccagcgacgagcccatcgccgaggccccgttcaagttcgacatggagctggacgacctccccaaggagaagctgaaggagctgatcttcgaggagaccgcccggttccagcccggctaccgctcctga

SEQ ID NO: 8489 - RNA, 1083 nt, synthetic construct
  misc_feature 1..1083: note = derived and/or modified sequence opt2 fromERK2__Homo_sapiens__AAA58459
  source 1..1083: mol_type = other RNA
atggccgccgccgccgccgccggcgccggccccgagatggtccgcggccaggtcttcgacgtcggcccccgctacaccaacctctcctacatcggcgagggcgcctacggcatggtctgctccgcctacgacaacgtcaacaaggtccgcgtcgccatcaagaagatctcccccttcgagcaccagacctactgccagcgcaccctccgcgagatcaagatcctcctccgcttccgccacgagaacatcatcggcatcaacgacatcatccgcgcccccaccatcgagcagatgaaggacgtctacatcgtccaggacctcatggagaccgacctctacaagctcctcaagacccagcacctctccaacgaccacatctgctacttcctctaccagatcctccgcggcctcaagtacatccactccgccaacgtcctccaccgcgacctcaagccctccaacctcctcctcaacaccacctgcgacctcaagatctgcgacttcggcctcgcccgcgtcgccgaccccgaccacgaccacaccggcttcctcaccgagtacgtcgccacccgctggtaccgcgcccccgagatcatgctcaactccaagggctacaccaagtccatcgacatctggtccgtcggctgcatcctcgccgagatgctctccaaccgccccatcttccccggcaagcactacctcgaccagctcaaccacatcctcggcatcctcggctccccctcccaggaggacctcaactgcatcatcaacctcaaggcccgcaactacctcctctccctcccccacaagaacaaggtcccctggaaccgcctcttccccaacgccgactccaaggccctcgacctcctcgacaagatgctcaccttcaacccccacaagcgcatcgaggtcgagcaggccctcgcccacccctacctcgagcagtactacgacccctccgacgagcccatcgccgaggcccccttcaagttcgacatggagctcgacgacctccccaaggagaagctcaaggagctcatcttcgaggagaccgcccgcttccagcccggctaccgctcctga

SEQ ID NO: 8490 - RNA, 1083 nt, synthetic construct
  misc_feature 1..1083: note = derived and/or modified sequence opt3 fromERK2__Homo_sapiens__AAA58459
  source 1..1083: mol_type = other RNA
atggccgctgcagccgcggctggcgccgggcccgagatggtgagaggacaggtcttcgacgttggtcctaggtacaccaacctgagctatatcggcgaaggggcatacggaatggtgtgctccgcctatgataatgtaaacaaggtgcgggtcgctattaaaaagatatctccatttgagcaccaaacatactgtcagcgcactctccgagaaatcaaaattcttctgcgtttcagacatgagaatatcattggcatcaacgacataatcagggcaccgacgattgaacagatgaaggatgtgtatatcgttcaggacttgatggagaccgatttatacaaactgctaaagacacaacacctctcaaatgaccatatttgctattttctgtaccagatccttcggggtctgaagtacatacacagtgccaacgtgttgcatcgcgatctcaaacccagcaatctgctgctcaacactacctgtgacttaaagatttgcgatttcgggctggctagagtcgccgaccctgatcacgaccacacaggatttcttaccgagtatgtggcgactaggtggtaccgggcaccagaaatcatgttgaactccaaaggctatacaaagtctattgatatctggtcggtaggctgtatcctggccgagatgctatcaaatcgccccattttccctgggaaacattacctcgaccagctgaatcacatacttggaatcctgggtagcccaagtcaggaagacttgaactgcattatcaatctcaaggctcgaaactatctgttatccctgccccataagaataaagttccttggaacagactctttccaaacgccgattctaaggcacttgacctgttggataaaatgctaaccttcaatccgcacaagaggatagaggtggagcaagctctggcccacccctacctcgaacagtattacgaccctagcgatgagccaattgcggaagccccctttaaattcgacatggagctggatgaccttcctaaggaaaaactgaaggagttgatctttgaggaaacggcacggttccagccaggctaccgttcctga

SEQ ID NO: 8491 - RNA, 1083 nt, synthetic construct
  misc_feature 1..1083: note = derived and/or modified sequence opt4 fromERK2__Homo_sapiens__AAA58459
  source 1..1083: mol_type = other RNA
atggccgccgccgccgccgccggcgccggccccgagatggtgagaggccaggtgttcgacgtgggccccagatacaccaacctgagctacatcggcgagggcgcctacggcatggtgtgcagcgcctacgacaacgtgaacaaggtgagagtggccatcaagaagatcagccccttcgagcaccagacctactgccagagaaccctgagagagatcaagatcctgctgagattcagacacgagaacatcatcggcatcaacgacatcatcagagcccccaccatcgagcagatgaaggacgtgtacatcgtgcaggacctgatggagaccgacctgtacaagctgctgaagacccagcacctgagcaacgaccacatctgctacttcctgtaccagatcctgagaggcctgaagtacatccacagcgccaacgtgctgcacagagacctgaagcccagcaacctgctgctgaacaccacctgcgacctgaagatctgcgacttcggcctggccagagtggccgaccccgaccacgaccacaccggcttcctgaccgagtacgtggccaccagatggtacagagcccccgagatcatgctgaacagcaagggctacaccaagagcatcgacatctggagcgtgggctgcatcctggccgagatgctgagcaacagacccatcttccccggcaagcactacctggaccagctgaaccacatcctgggcatcctgggcagccccagccaggaggacctgaactgcatcatcaacctgaaggccagaaactacctgctgagcctgccccacaagaacaaggtgccctggaacagactgttccccaacgccgacagcaaggccctggacctgctggacaagatgctgaccttcaacccccacaagagaatcgaggtggagcaggccctggcccacccctacctggagcagtactacgaccccagcgacgagcccatcgccgaggcccccttcaagttcgacatggagctggacgacctgcccaaggagaagctgaaggagctgatcttcgaggagaccgccagattccagcccggctacagaagctga

SEQ ID NO: 8492 - RNA, 1083 nt, synthetic construct
  misc_feature 1..1083: note = derived and/or modified sequence opt5 fromERK2__Homo_sapiens__AAA58459
  source 1..1083: mol_type = other RNA
atggccgctgccgcggctgccggcgccgggcccgagatggtgagaggacaggtcttcgacgttggccctcggtacaccaacctgagctatatcggggaaggagcttacggcatggtgtgctccgcctatgataatgtgaacaaggtccgcgtggctattaaaaagatctctccgtttgagcaccaaacatactgtcagagaacgctccgggaaattaaaatcctgcttcgcttcagacatgagaatattatcgggatcaacgacattatccgggcccccaccattgaacagatgaaggatgtttatatcgtgcaggacctgatggagacagatctctacaaactgcttaagacccaacacctgagcaatgaccatatttgctattttctctaccagatcctgcgcggactgaagtacattcactccgcgaacgtcctccatagagatctgaaaccttctaatcttctgctcaacacaacctgtgacctgaagatctgcgatttcggccttgcccgggtggctgaccccgatcacgaccacacaggctttctgaccgagtatgttgccacgcgctggtacagagctcctgaaatcatgctcaatagcaaagggtataccaagtccattgatatctggtctgtgggatgtattctggccgagatgctgagcaaccggcccatcttccctggcaaacattacctcgaccagctgaatcacattcttgggatcctgggatccccgagccaggaagacctcaactgcatcattaatctgaaggcgcgcaactatcttctgtctctcccccataagaataaagtcccttggaacagactgtttcccaacgccgattccaaggctctggacctcctggataaaatgcttacattcaatcctcacaagcggatcgaggtggagcaagccctggctcacccctacctcgaacagtattacgacccgagcgatgagcctattgccgaagccccctttaaattcgacatggagctggatgaccttcctaaggaaaaactgaaggagctcatctttgaggaaaccgctcgcttccagcccggctacagatcttga

SEQ ID NO: 8493 - protein, 22 aa, synthetic construct
  REGION 1..22: note = Fibrinogen__Homo_sapiens__A0A024R8B4
MGGAAQLEDRPRDKPQTNQPRC

SEQ ID NO: 8494 - RNA, 69 nt, synthetic construct
  misc_feature 1..69: note = Fibrinogen__Homo_sapiens__EAW87951
  source 1..69: mol_type = other RNA
atgggcggcgctgcccaacttgaggaccggccgcgcgacaagccgcagacaaatcagccccgttgctga

SEQ ID NO: 8495 - RNA, 69 nt, synthetic construct
  misc_feature 1..69: note = derived and/or modified sequence opt1 fromFibrinogen__Homo_sapiens__EAW87951
  source 1..69: mol_type = other RNA
atgggcggggccgcccagctggaggaccgcccccgggacaagccgcagaccaaccagccccgctgctga

SEQ ID NO: 8496 - RNA, 69 nt, synthetic construct
  misc_feature 1..69: note = derived and/or modified sequence opt2 fromFibrinogen__Homo_sapiens__EAW87951
  source 1..69: mol_type = other RNA
atgggcggcgccgcccagctcgaggaccgcccccgcgacaagccccagaccaaccagccccgctgctga

SEQ ID NO: 8497 - RNA, 69 nt, synthetic construct
  misc_feature 1..69: note = derived and/or modified sequence opt3 fromFibrinogen__Homo_sapiens__EAW87951
  source 1..69: mol_type = other RNA
atgggcggggccgctcagctggaggacagacccagggataagcctcaaaccaaccagccacggtgctga

SEQ ID NO: 8498 - RNA, 69 nt, synthetic construct
  misc_feature 1..69: note = derived and/or modified sequence opt4 fromFibrinogen__Homo_sapiens__EAW87951
  source 1..69: mol_type = other RNA
atgggcggcgccgcccagctggaggacagacccagagacaagccccagaccaaccagcccagatgctga

SEQ ID NO: 8499 - RNA, 69 nt, synthetic construct
  misc_feature 1..69: note = derived and/or modified sequence opt5 fromFibrinogen__Homo_sapiens__EAW87951
  source 1..69: mol_type = other RNA
atgggcggggccgctcagctggaggacagaccccgggataagcctcaaaccaaccagccgcgctgctga

SEQ ID NO: 8500 - protein, 439 aa, synthetic construct
  REGION 1..439: note = Fibrinogen__Homo_sapiens__A4D1B8
MKLANWYWLSSAVLATYGFLVVANNETEEIKDERAKDVCPVRLESRGKCEEAGECPYQVSLPPLTIQLPKQFSRIEEVFKEVQNLKEIVNSLKKSCQDCKLQADDNGDPGRNGLLLPSTGAPGEVGDNRVRELESEVNKLSSELKNAKEEINVLHGRLEKLNLVNMNNIENYVDSKVANLTFVVNSLDGKCSKCPSQEQIQSRPVQHLIYKDCSDYYAIGKRSSETYRVTPDPKNSSFEVYCDMETMGGGWTVLQARLDGSTNFTRTWQDYKAGFGNLRREFWLGNDKIHLLTKSKEMILRIDLEDFNGVELYALYDQFYVANEFLKYRLHVGNYNGTAGDALRFNKHYNHDLKFFTTPDKDNDRYPSGNCGLYYSSGWWFDACLSANLNGKYYHQKYRGVRNGIFWGTWPGVSEAHPGGYKSSFKEAKMMIRPKHFKP

SEQ ID NO: 8501 - RNA, 1320 nt, synthetic construct
  misc_feature 1..1320: note = Fibrinogen__Homo_sapiens__BAG35554
  source 1..1320: mol_type = other RNA
atgaagctggctaactggtactggctgagctcagctgttcttgccacttacggttttttggttgtggcaaacaatgaaacagaggaaattaaagatgaaagagcaaaggatgtctgcccagtgagactagaaagcagagggaaatgcgaagaggcaggggagtgcccctaccaggtaagcctgccccccttgactattcagctcccgaagcaattcagcaggatcgaggaggtgttcaaagaagtccaaaacctcaaggaaatcgtaaatagtctaaagaaatcttgccaagactgcaagctgcaggctgatgacaacggagacccaggcagaaacggactgttgttacccagtacaggagccccgggagaggttggtgataacagagttagagaattagagagtgaggttaacaagctgtcctctgagctaaagaatgccaaagaggagatcaatgtacttcatggtcgcctggagaagctgaatcttgtaaatatgaacaacatagaaaattatgttgacagcaaagtggcaaatctaacatttgttgtcaatagtttggatggcaaatgttcaaagtgtcccagccaagaacaaatacagtcacgtccagttcaacatctaatatataaagattgctctgactactacgcaataggcaaaagaagcagtgagacctacagagttacacctgatcccaaaaatagtagctttgaagtttactgtgacatggagaccatggggggaggctggacagtgctgcaggcacgcctcgatgggagcaccaacttcaccagaacatggcaagactacaaagcaggctttggaaacctcagaagggaattttggctggggaacgataaaattcatcttctgaccaagagtaaggaaatgattctgagaatagatcttgaagactttaatggtgtcgaactatatgccttgtatgatcagttttatgtggctaatgagtttctcaaatatcgtttacacgttggtaactataatggcacagctggagatgcattacgtttcaacaaacattacaaccacgatctgaagtttttcaccactccagataaagacaatgatcgatatccttctgggaactgtgggctgtactacagttcaggctggtggtttgatgcatgtctttctgcaaacttaaatggcaaatattatcaccaaaaatacagaggtgtccgtaatgggattttctggggtacctggcctggtgtaagtgaggcacaccctggtggctacaagtcctccttcaaagaggctaagatgatgatcagacccaagcactttaagccataa

SEQ ID NO: 8502 - RNA, 1320 nt, synthetic construct
  misc_feature 1..1320: note = derived and/or modified sequence opt1 fromFibrinogen__Homo_sapiens__BAG35554
  source 1..1320: mol_type = other RNA
atgaagctggccaactggtactggctcagctccgccgtgctggcgacctacggcttcctggtcgtggccaacaacgagaccgaggagatcaaggacgagcgcgccaaggacgtgtgccccgtccggctcgagagccgcgggaagtgcgaggaggccggcgagtgcccgtaccaggtgtccctgccgcccctgacgatccagctccccaagcagttcagccggatcgaggaggtgttcaaggaggtccagaacctgaaggagatcgtgaactccctgaagaagtcctgccaggactgcaagctccaggccgacgacaacggggaccccggccgcaacgggctgctgctccccagcaccggcgcgcccggcgaggtgggggacaaccgggtccgcgagctggagagcgaggtgaacaagctgtccagcgagctcaagaacgccaaggaggagatcaacgtgctgcacggccggctggagaagctcaacctggtcaacatgaacaacatcgagaactacgtggactccaaggtggccaacctgaccttcgtcgtgaacagcctcgacgggaagtgctccaagtgccccagccaggagcagatccagtcccgcccggtgcagcacctgatctacaaggactgcagcgactactacgccatcggcaagcggtccagcgagacctaccgcgtcacgcccgaccccaagaactccagcttcgaggtgtactgcgacatggagaccatgggcgggggctggaccgtgctgcaggcgcggctcgacgggagcaccaacttcacgcgcacctggcaggactacaaggccggcttcgggaacctgcggcgcgagttctggctgggcaacgacaagatccacctcctgaccaagtccaaggagatgatcctgcggatcgacctcgaggacttcaacggcgtcgagctgtacgccctgtacgaccagttctacgtggccaacgagttcctcaagtaccgcctgcacgtggggaactacaacggcaccgccggggacgcgctgcggttcaacaagcactacaaccacgacctcaagttcttcacgacccccgacaaggacaacgaccgctacccgagcggcaactgcgggctgtactactccagcggctggtggttcgacgcctgcctgtccgccaacctcaacggcaagtactaccaccagaagtaccgcggggtccggaacggcatcttctgggggacctggcccggcgtgagcgaggcccaccccgggggctacaagtccagcttcaaggaggccaagatgatgatccggcccaagcacttcaagccgtga

SEQ ID NO: 8503 - RNA, 1320 nt, synthetic construct
  misc_feature 1..1320: note = derived and/or modified sequence opt2 fromFibrinogen__Homo_sapiens__BAG35554
  source 1..1320: mol_type = other RNA
atgaagctcgccaactggtactggctctcctccgccgtcctcgccacctacggcttcctcgtcgtcgccaacaacgagaccgaggagatcaaggacgagcgcgccaaggacgtctgccccgtccgcctcgagtcccgcggcaagtgcgaggaggccggcgagtgcccctaccaggtctccctcccccccctcaccatccagctccccaagcagttctcccgcatcgaggaggtcttcaaggaggtccagaacctcaaggagatcgtcaactccctcaagaagtcctgccaggactgcaagctccaggccgacgacaacggcgaccccggccgcaacggcctcctcctcccctccaccggcgcccccggcgaggtcggcgacaaccgcgtccgcgagctcgagtccgaggtcaacaagctctcctccgagctcaagaacgccaaggaggagatcaacgtcctccacggccgcctcgagaagctcaacctcgtcaacatgaacaacatcgagaactacgtcgactccaaggtcgccaacctcaccttcgtcgtcaactccctcgacggcaagtgctccaagtgcccctcccaggagcagatccagtcccgccccgtccagcacctcatctacaaggactgctccgactactacgccatcggcaagcgctcctccgagacctaccgcgtcacccccgaccccaagaactcctccttcgaggtctactgcgacatggagaccatgggcggcggctggaccgtcctccaggcccgcctcgacggctccaccaacttcacccgcacctggcaggactacaaggccggcttcggcaacctccgccgcgagttctggctcggcaacgacaagatccacctcctcaccaagtccaaggagatgatcctccgcatcgacctcgaggacttcaacggcgtcgagctctacgccctctacgaccagttctacgtcgccaacgagttcctcaagtaccgcctccacgtcggcaactacaacggcaccgccggcgacgccctccgcttcaacaagcactacaaccacgacctcaagttcttcaccacccccgacaaggacaacgaccgctacccctccggcaactgcggcctctactactcctccggctggtggttcgacgcctgcctctccgccaacctcaacggcaagtactaccaccagaagtaccgcggcgtccgcaacggcatcttctggggcacctggcccggcgtctccgaggcccaccccggcggctacaagtcctccttcaaggaggccaagatgatgatccgccccaagcacttcaagccctga

SEQ ID NO: 8504 - RNA, 1320 nt, synthetic construct
  misc_feature 1..1320: note = derived and/or modified sequence opt3 fromFibrinogen__Homo_sapiens__BAG35554
  source 1..1320: mol_type = other RNA
atgaagctggccaactggtactggctcagctccgctgtgcttgcaacctatggcttcctggtcgttgccaataacgagacagaagagatcaaagacgaaagagcgaaggatgtgtgccccgtaaggttggagtctcgggggaaatgtgaagaggctggagagtgcccttaccaggtgtcattaccaccgctgactattcaactacccaagcagtttagtcgcatagaagaggtcttcaaagaagtgcagaatctcaaggagatcgttaacagcctgaagaaatcctgtcaggactgcaaacttcaagccgatgacaatggtgatcctggccgaaacgggctgttgctcccatctacgggagcacccggcgaggtgggtgacaatcgtgtcagagaactggagtcggaagtgaacaagctgtcaagcgagctcaagaatgccaaagaagagattaacgtattacacgggaggctggagaaacttaatttggttaacatgaataacatcgaaaattatgtggatagtaaggtcgctaacctgacctttgtggtgaactccctagacggaaagtgttctaagtgccctagccaggagcagattcagtcccggccagtccaacatctcatctacaaagattgttcagactattacgcaataggcaagcgcagtagcgaaacatatagagttactcccgatcctaaaaattcttccttcgaggtgtactgcgacatggaaaccatgggcgggggatggacagtactgcaggccaggcttgatggttcaaccaactttactcggacatggcaggactacaaggctggcttcgggaatctgcgccgagagttttggttgggaaacgacaaaatccacctcctgaccaagagcaaggagatgattttaagaatcgatctggaagacttcaatggcgtggagctctatgccctttacgatcagttttatgtcgcgaacgagttcctgaaatacaggttgcatgtgggtaattataacgggacggcaggagacgccctacggtttaataagcactacaaccatgatctgaaattctttactaccccagacaaggataatgaccgttatccgagtggcaactgtggcctctactactcttccgggtggtggttcgatgcttgcctgagcgccaatcttaacggaaaatattaccaccaaaagtatcgcggtgttagaaatggcattttctgggggacatggcccggagtgtcggaagcacaccctggcggttacaagtcttcctttaaagaagctaagatgatgatcaggccaaaacatttcaagccctga

SEQ ID NO: 8505 - RNA, 1320 nt, synthetic construct
  misc_feature 1..1320: note = derived and/or modified sequence opt4 fromFibrinogen__Homo_sapiens__BAG35554
  source 1..1320: mol_type = other RNA
atgaagctggccaactggtactggctgagcagcgccgtgctggccacctacggcttcctggtggtggccaacaacgagaccgaggagatcaaggacgagagagccaaggacgtgtgccccgtgagactggagagcagaggcaagtgcgaggaggccggcgagtgcccctaccaggtgagcctgccccccctgaccatccagctgcccaagcagttcagcagaatcgaggaggtgttcaaggaggtgcagaacctgaaggagatcgtgaacagcctgaagaagagctgccaggactgcaagctgcaggccgacgacaacggcgaccccggcagaaacggcctgctgctgcccagcaccggcgcccccggcgaggtgggcgacaacagagtgagagagctggagagcgaggtgaacaagctgagcagcgagctgaagaacgccaaggaggagatcaacgtgctgcacggcagactggagaagctgaacctggtgaacatgaacaacatcgagaactacgtggacagcaaggtggccaacctgaccttcgtggtgaacagcctggacggcaagtgcagcaagtgccccagccaggagcagatccagagcagacccgtgcagcacctgatctacaaggactgcagcgactactacgccatcggcaagagaagcagcgagacctacagagtgacccccgaccccaagaacagcagcttcgaggtgtactgcgacatggagaccatgggcggcggctggaccgtgctgcaggccagactggacggcagcaccaacttcaccagaacctggcaggactacaaggccggcttcggcaacctgagaagagagttctggctgggcaacgacaagatccacctgctgaccaagagcaaggagatgatcctgagaatcgacctggaggacttcaacggcgtggagctgtacgccctgtacgaccagttctacgtggccaacgagttcctgaagtacagactgcacgtgggcaactacaacggcaccgccggcgacgccctgagattcaacaagcactacaaccacgacctgaagttcttcaccacccccgacaaggacaacgacagataccccagcggcaactgcggcctgtactacagcagcggctggtggttcgacgcctgcctgagcgccaacctgaacggcaagtactaccaccagaagtacagaggcgtgagaaacggcatcttctggggcacctggcccggcgtgagcgaggcccaccccggcggctacaagagcagcttcaaggaggccaagatgatgatcagacccaagcacttcaagccctga

SEQ ID NO: 8506 - RNA, 1320 nt, synthetic construct
  misc_feature 1..1320: note = derived and/or modified sequence opt5 fromFibrinogen__Homo_sapiens__BAG35554
  source 1..1320: mol_type = other RNA
atgaagctggccaactggtactggctcagctccgctgtgctggccacctatggcttccttgtcgttgcgaataacgagacagaagagatcaaagacgaaagagctaaggatgtgtgccccgtgcggctggagtctcgcgggaaatgtgaagaggccggagagtgcccttaccaggtcagcctcccgcccctgacgattcaacttcctaagcagttttccagaatcgaagaggtgttcaaagaagttcagaatctgaaggagattgtgaactctctcaagaaaagctgtcaggactgcaagctgcaagccgatgacaatggcgatcccgggcggaacggactgctcctgccttccaccggcgctcccggggaggtcggagacaatcgcgtgagagaacttgagtctgaagttaacaaactgagctccgagctcaagaatgccaaagaagagatcaacgtgctgcacggccggcttgagaagctgaatctcgtcaacatgaataacattgaaaattatgtggatagcaaggtggctaacctgacatttgtcgttaactctctggacggcaaatgttccaagtgccctagccaggagcagatccagtctcgcccggtgcaacatctcatctacaaagattgttccgactattacgccattgggaagagaagctctgaaacctatcgggtgacacccgatcctaaaaattccagcttcgaggtctactgcgacatggaaaccatgggaggcgggtggacagtgctgcaggcgcgccttgatggatccaccaactttacgagaacctggcaggactacaaggccggcttcgggaatctgcggcgcgagttttggctcggaaacgacaaaatccatctgcttacaaagtctaaggagatgattctgagaatcgatctcgaagacttcaatggcgttgagctgtatgctctgtacgatcagttttatgtggccaacgagttcctcaaataccggctgcacgtcggcaattataacgggaccgctggagacgcccttcgctttaataagcactacaaccatgatctgaaattctttacaacccccgacaaggataatgacagatatcctagcggcaactgtgggctctactactccagcggatggtggttcgatgcgtgcctgtctgccaatcttaacggcaaatattaccaccaaaagtatagaggggtgcggaatggaattttctggggcacgtggcccggcgtttccgaagctcaccctgggggatacaagagctcttttaaagaagccaagatgatgatccgcccgaaacatttcaagccctga

SEQ ID NO: 8507 - protein, 461 aa, synthetic construct [sequence omitted]

SEQ ID NO: 8508 - RNA, 1386 nt, synthetic construct
  misc_feature 1..1386: note = Fibrinogen__Homo_sapiens__BAF85178
  source 1..1386: mol_type = other RNA
atggtcaacgaccggtggaagaccatgggcggcgctgcccaacttgaggaccggccgcgcgacaagccgcagcggccgagctgcggctacgtgctgtgcaccgtgctgctggccctggctgtgctgctggctgtagctgtcaccggtgccgtgctcttcctgaaccacgcccacgcgccgggcacggcgcccccacctgtcgtcagcactggggctgccggcgccaacagcgccctggtcactgtggaaagggcggacagctcgcacctcagcatcctcattgacccgcgctgccccgacctcaccgacagcttcgcacgcctggagagcgcccaggcctcggtgctgcaggcgctgacagagcaccaggcccagccacggctggtgggcgaccaggagcaggagctgctggacacgctggccgaccagctgccccggctgctggcccgagcctcagagctgcagacggagtgcatggggctgcggaaggggcatggcacgctgggccagggcctcagcgccctgcagagtgagcagggccgcctcatccagcttctctctgagagccagggccacatggctcacctggtgaactccgtcagcgacatcctggatgccctgcagagggaccgggggctgggccggccccgcaacaaggccgaccttcagagagcgcctgcccggggaacccggccccggggctgtgccactggctcccggccccgagactgtctggacgtcctcctaagcggacagcaggacgatggcgtctactctgtctttcccacccactacccggccggcttccaggtgtactgtgacatgcgcacggacggcggcggctggacggtgtttcagcgccgggaggacggctccgtgaacttcttccggggctgggacgcgtaccgagacggctttggcaggctcaccggggagcactggctagggctcaagaggatccacgccctgaccacacaggctgcctacgagctgcacgtggacctggaggactttgagaatggcacggcctatgcccgctacgggagcttcggcgtgggcttgttctccgtggaccctgaggaagacgggtacccgctcaccgtggctgactattccggcactgcaggcgactccctcctgaagcacagcggcatgaggttcaccaccaaggaccgtgacagcgaccattcagagaacaactgtgccgccttctaccgcggtgcctggtggtaccgcaactgccacacgtccaacctcaatgggcagtacctgcgcggtgcgcacgcctcctatgccgacggcgtggagtggtcctcctggaccggctggcagtactcactcaagttctctgagatgaagatccggccggtccgggaggaccgctag

SEQ ID NO: 8509 - RNA, 1386 nt, synthetic construct
  misc_feature 1..1386: note = derived and/or modified sequence opt1 fromFibrinogen__Homo_sapiens__BAF85178
  source 1..1386: mol_type = other RNA
atggtgaacgaccgctggaagaccatgggcggggccgcccagctggaggaccggccccgcgacaagccgcagcggcccagctgcggctacgtcctctgcaccgtgctgctggcgctcgccgtgctgctggccgtcgccgtgacgggggccgtcctcttcctgaaccacgcgcacgcccccggcaccgcgcccccgcccgtggtgtccaccggggccgccggcgccaacagcgccctggtgaccgtcgagcgcgccgactccagccacctctccatcctgatcgacccccggtgccccgacctgacggacagcttcgcccgcctcgagtccgcgcaggccagcgtgctgcaggccctgaccgagcaccaggcccagccgcggctcgtgggcgaccaggagcaggagctgctggacaccctcgccgaccagctgccccgcctgctcgcgcgggcctccgagctgcagaccgagtgcatggggctgcgcaagggccacgggacgctcggccaggggctgagcgccctgcagtccgagcagggccggctcatccagctgctgagcgagtcccagggccacatggcccacctcgtcaacagcgtgtccgacatcctggacgccctgcagcgcgaccgggggctcggccgcccccggaacaaggcggacctgcagcgcgcccccgcccgggggacccgcccgcggggctgcgccaccggcagccgcccccgggactgcctggacgtgctcctgtccgggcagcaggacgacggcgtctacagcgtgttccccacccactaccccgccgggttccaggtgtactgcgacatgcgcacggacggcgggggctggaccgtcttccagcgccgggaggacggctccgtgaacttcttccgcgggtgggacgcgtaccgggacggcttcgggcgcctgaccggcgagcactggctcgggctgaagcggatccacgccctgaccacgcaggccgcctacgagctccacgtggacctggaggacttcgagaacggcaccgcgtacgcccgctacggcagcttcggggtcggcctgttcagcgtggacccggaggaggacgggtaccccctcaccgtggccgactactccggcaccgccggggacagcctgctgaagcactccggcatgcggttcacgaccaaggaccgcgacagcgaccactccgagaacaactgcgccgcgttctaccggggcgcctggtggtaccgcaactgccacaccagcaacctcaacgggcagtacctgcggggcgcccacgcctcctacgccgacggggtcgagtggagctcctggaccggctggcagtacagcctgaagttctccgagatgaagatccgccccgtgcgggaggaccgctga

SEQ ID NO: 8510 - RNA, 1386 nt, synthetic construct
  misc_feature 1..1386: note = derived and/or modified sequence opt2 fromFibrinogen__Homo_sapiens__BAF85178
  source 1..1386: mol_type = other RNA
atggtcaacgaccgctggaagaccatgggcggcgccgcccagctcgaggaccgcccccgcgacaagccccagcgcccctcctgcggctacgtcctctgcaccgtcctcctcgccctcgccgtcctcctcgccgtcgccgtcaccggcgccgtcctcttcctcaaccacgcccacgcccccggcaccgcccccccccccgtcgtctccaccggcgccgccggcgccaactccgccctcgtcaccgtcgagcgcgccgactcctcccacctctccatcctcatcgacccccgctgccccgacctcaccgactccttcgcccgcctcgagtccgcccaggcctccgtcctccaggccctcaccgagcaccaggcccagccccgcctcgtcggcgaccaggagcaggagctcctcgacaccctcgccgaccagctcccccgcctcctcgcccgcgcctccgagctccagaccgagtgcatgggcctccgcaagggccacggcaccctcggccagggcctctccgccctccagtccgagcagggccgcctcatccagctcctctccgagtcccagggccacatggcccacctcgtcaactccgtctccgacatcctcgacgccctccagcgcgaccgcggcctcggccgcccccgcaacaaggccgacctccagcgcgcccccgcccgcggcacccgcccccgcggctgcgccaccggctcccgcccccgcgactgcctcgacgtcctcctctccggccagcaggacgacggcgtctactccgtcttccccacccactaccccgccggcttccaggtctactgcgacatgcgcaccgacggcggcggctggaccgtcttccagcgccgcgaggacggctccgtcaacttcttccgcggctgggacgcctaccgcgacggcttcggccgcctcaccggcgagcactggctcggcctcaagcgcatccacgccctcaccacccaggccgcctacgagctccacgtcgacctcgaggacttcgagaacggcaccgcctacgcccgctacggctccttcggcgtcggcctcttctccgtcgaccccgaggaggacggctaccccctcaccgtcgccgactactccggcaccgccggcgactccctcctcaagcactccggcatgcgcttcaccaccaaggaccgcgactccgaccactccgagaacaactgcgccgccttctaccgcggcgcctggtggtaccgcaactgccacacctccaacctcaacggccagtacctccgcggcgcccacgcctcctacgccgacggcgtcgagtggtcctcctggaccggctggcagtactccctcaagttctccgagatgaagatccgccccgtccgcgaggaccgctga

SEQ ID NO: 8511 - RNA, 1386 nt, synthetic construct
  misc_feature 1..1386: note = derived and/or modified sequence opt3 fromFibrinogen__Homo_sapiens__BAF85178
  source 1..1386: mol_type = other RNA
atggtgaacgacagatggaagaccatgggcggggccgctcagctggaggataggccccgggacaaacctcaacgcccaagctgcggatacgtcctctgtacagttcttctggcattggccgtgttactggcggtagctgtgactggtgccgtcctattcctcaatcacgcacatgccccgggcacggctccccctccagtggtttccaccggggcagccggagctaactctgccctggtgacagtcgaacgagcggattcaagtcaccttagcatcctgattgacccccgttgccctgatttgactgactcctttgcaagactcgagtctgcccaggcttcggtgctgcaggccctgaccgaacatcaggcacaaccaaggctcgtaggcgatcaggagcaggaattactggacacacttgctgatcagttgccccggctgctagcccgcgcgtcagagctccaaaccgagtgtatgggtctgagaaaggggcacggaactcttggccagggcctgagcgccttgcagagtgaacaggggaggctcatacaactgttatccgagtctcagggacatatggcacacctggttaatagcgtgtccgacatcctcgatgcccttcagcgggaccgcggtctgggccgacctagaaacaaagctgatttgcaaagggctccagcccgggggacacgtccgcgcggatgcgcaaccggctcaagacccagggactgtctagacgtcctgctcagtggtcagcaggatgacggggtgtatagcgtgttccctacgcactacccagccggatttcaggtctattgcgatatgcggactgacggcggcgggtggaccgttttccaacgacgcgaagatggatctgtgaactttttcagaggttgggacgcttacagggatggctttgggcggctgacaggagagcattggcttggcctgaagcgcattcacgcgttgactacccaggcagcctatgagctccatgtagacctggaagatttcgagaatggtacagcttacgccagatatgggtcctttggcgtgggattattctcagtcgaccccgaagaggatggctaccctctgaccgtggcagactacagcgggacggccggagacagtctactcaaacactctggtatgaggtttactacaaaggatcgtgactccgatcacagcgaaaataactgtgctgccttctatcggggcgcatggtggtaccgaaattgccatacctcgaacctgaatgggcagtatcttagaggagcgcacgcttcttacgccgacggcgttgagtggtcctcatggactggttggcagtatagtttgaagtttagcgagatgaaaatcaggccagtgcgcgaagatcggtga

SEQ ID NO: 8512 - RNA, 1386 nt, synthetic construct
  misc_feature 1..1386: note = derived and/or modified sequence opt4 fromFibrinogen__Homo_sapiens__BAF85178
  source 1..1386: mol_type = other RNA
atggtgaacgacagatggaagaccatgggcggcgccgcccagctggaggacagacccagagacaagccccagagacccagctgcggctacgtgctgtgcaccgtgctgctggccctggccgtgctgctggccgtggccgtgaccggcgccgtgctgttcctgaaccacgcccacgcccccggcaccgcccccccccccgtggtgagcaccggcgccgccggcgccaacagcgccctggtgaccgtggagagagccgacagcagccacctgagcatcctgatcgaccccagatgccccgacctgaccgacagcttcgccagactggagagcgcccaggccagcgtgctgcaggccctgaccgagcaccaggcccagcccagactggtgggcgaccaggagcaggagctgctggacaccctggccgaccagctgcccagactgctggccagagccagcgagctgcagaccgagtgcatgggcctgagaaagggccacggcaccctgggccagggcctgagcgccctgcagagcgagcagggcagactgatccagctgctgagcgagagccagggccacatggcccacctggtgaacagcgtgagcgacatcctggacgccctgcagagagacagaggcctgggcagacccagaaacaaggccgacctgcagagagcccccgccagaggcaccagacccagaggctgcgccaccggcagcagacccagagactgcctggacgtgctgctgagcggccagcaggacgacggcgtgtacagcgtgttccccacccactaccccgccggcttccaggtgtactgcgacatgagaaccgacggcggcggctggaccgtgttccagagaagagaggacggcagcgtgaacttcttcagaggctgggacgcctacagagacggcttcggcagactgaccggcgagcactggctgggcctgaagagaatccacgccctgaccacccaggccgcctacgagctgcacgtggacctggaggacttcgagaacggcaccgcctacgccagatacggcagcttcggcgtgggcctgttcagcgtggaccccgaggaggacggctaccccctgaccgtggccgactacagcggcaccgccggcgacagcctgctgaagcacagcggcatgagattcaccaccaaggacagagacagcgaccacagcgagaacaactgcgccgccttctacagaggcgcctggtggtacagaaactgccacaccagcaacctgaacggccagtacctgagaggcgcccacgccagctacgccgacggcgtggagtggagcagctggaccggctggcagtacagcctgaagttcagcgagatgaagatcagacccgtgagagaggacagatga

SEQ ID NO: 8513 - RNA, 1386 nt, synthetic construct
  misc_feature 1..1386: note = derived and/or modified sequence opt5 fromFibrinogen__Homo_sapiens__BAF85178
  source 1..1386: mol_type = other RNA
atggtgaacgacagatggaagaccatgggcggggccgctcagctggaggatcggccccgcgacaaacctcaaagaccgagctgcggatacgtcctctgtacagttctgcttgccctggcggtgctcctggctgtggccgtcacgggcgccgtgcttttcctgaatcacgctcatgcccccgggaccgctcctccccctgttgtgtccacaggagccgcgggcgccaactctgctctcgtcaccgtggaacgggccgatagctcccacctgtctatcctgattgacccccgctgccctgatctcacagacagctttgctagactggagtccgcccaggcgtctgttcttcaggccctgaccgaacatcaggctcaaccgcggctcgtgggggatcaggagcaggaactgcttgacacactggccgatcagctcccccgcctgctggctagagccagcgagctccaaaccgagtgtatgggactgcggaagggccacggcacgcttgggcagggactgtccgccctccagagcgaacagggccgcctgatccaacttctgtctgagtcccaggggcatatggctcacctcgtcaatagcgtgtctgacattctggatgcgctgcagagagaccggggactcggccgccctagaaacaaagccgatctgcaacgggctcccgcccgcgggaccagacctcggggatgcgccacaggctccagaccccgcgactgtcttgacgtgctgctcagcggccagcaggatgacggggtctattctgttttcccgacccactaccctgctggatttcaggtgtattgcgatatgcggacagacggcgggggatggaccgtgttccaaagacgcgaagatggctccgtcaactttttccgggggtgggacgcctacagagatggatttggccgcctgacgggcgagcattggcttgggctgaagcggatccacgcgctcacaacccaggctgcctatgagctgcatgtggacctggaagatttcgagaatggaacagcctacgctagatatggcagctttggggttggactcttctccgtggaccccgaagaggatggctaccctctgaccgtcgccgactactctgggaccgctggcgacagccttctgaaacactccggaatgcgctttacaacgaaggatcgggacagcgatcactctgaaaataactgtgccgcgttctatagaggcgcctggtggtaccgcaattgccatacctccaacctcaatgggcagtatctgcggggagctcacgccagctacgctgacggcgtggagtggtctagctggacagggtggcagtattccctgaagttttctgagatgaaaattagacccgttcgggaagatcgctga

SEQ ID NO: 8514 - protein, 179 aa, synthetic construct [sequence omitted]

SEQ ID NO: 8515 - RNA, 540 nt, synthetic construct
  misc_feature 1..540: note = Fibrinogen__Homo_sapiens__BAG62044
  source 1..540: mol_type = other RNA
atggtcaacgaccggtggaagaccatgggcggcgctgcccaacttgaggaccggccgcgcgacaagccgcaggcgaggaaactgaggctcagagagcggccgagctgcggctacgtgctgtgcaccgtgctgctggccctggctgtgctgctggctgtagctgtcaccggtgccgtgctcttcctgaaccacgcccacgcgccgggcacggcgcccccacctgtcgtcagcactggggctgccagcgccaacagcgccctggtcactgtggaaagggcggacagctcgcacctcagcatcctcattgacccgcgctgccccgacctcaccgacagcttcgcacgcctggagagcgcccaggcctcggtgctgcaggcgctgacagagcaccaggcccagccacggctggtgggcgaccaggagcaggagctgctggacacgctggccgaccagctgccccggctgctggcccgagcctcagagctgcagacggagtgcatggggctgcggaaggggcatggcacgctggaaaggcggtaa

SEQ ID NO: 8516 - RNA, 540 nt, synthetic construct
  misc_feature 1..540: note = derived and/or modified sequence opt1 fromFibrinogen__Homo_sapiens__BAG62044
  source 1..540: mol_type = other RNA
atggtgaacgaccgctggaagaccatgggcggggccgcccagctggaggaccggccccgcgacaagccgcaggcgcggaagctccgcctgcgggagcgccccagctgcggctacgtcctgtgcaccgtgctcctggccctggccgtgctcctggccgtcgccgtgacgggggcggtgctgttcctcaaccacgcccacgcccccggcaccgcgcccccgcccgtcgtgtccaccggggccgccagcgccaactccgccctggtgaccgtcgagcgggccgacagctcccacctgagcatcctcatcgacccccgctgccccgacctgacggactccttcgcgcggctggagagcgcccaggcctccgtgctccaggccctgaccgagcaccaggcccagccgcgcctggtgggcgaccaggagcaggagctcctggacaccctggcggaccagctcccccggctgctggcccgcgccagcgagctccagaccgagtgcatgggcctgcggaaggggcacggcacgctggagcgccggtga

SEQ ID NO: 8517 - RNA, 540 nt, synthetic construct
  misc_feature 1..540: note = derived and/or modified sequence opt2 fromFibrinogen__Homo_sapiens__BAG62044
  source 1..540: mol_type = other RNA
atggtcaacgaccgctggaagaccatgggcggcgccgcccagctcgaggaccgcccccgcgacaagccccaggcccgcaagctccgcctccgcgagcgcccctcctgcggctacgtcctctgcaccgtcctcctcgccctcgccgtcctcctcgccgtcgccgtcaccggcgccgtcctcttcctcaaccacgcccacgcccccggcaccgcccccccccccgtcgtctccaccggcgccgcctccgccaactccgccctcgtcaccgtcgagcgcgccgactcctcccacctctccatcctcatcgacccccgctgccccgacctcaccgactccttcgcccgcctcgagtccgcccaggcctccgtcctccaggccctcaccgagcaccaggcccagccccgcctcgtcggcgaccaggagcaggagctcctcgacaccctcgccgaccagctcccccgcctcctcgcccgcgcctccgagctccagaccgagtgcatgggcctccgcaagggccacggcaccctcgagcgccgctga

SEQ ID NO: 8518 - RNA, 540 nt, synthetic construct
  misc_feature 1..540: note = derived and/or modified sequence opt3 fromFibrinogen__Homo_sapiens__BAG62044
  source 1..540: mol_type = other RNA
atggtgaacgacagatggaagaccatgggcggggccgctcagctggaggataggccccgggacaaacctcaagcacgcaagctccgacttcgtgaaagaccaagctgcggatacgtcctgtgtacagttttgttagccctggcggtgctactcgctgtagccgtgactggtgcagtcctgttccttaatcacgcccatgctccgggcacggcaccccctccagtggtttccaccggggccgcttctgccaactcagcgctggtgacagtcgagagggcagatagtagccacttgtccatcctcattgacccccggtgccctgatctgactgactcttttgcccgcctggaatcggctcaggcctcagtgctccaggcattaaccgagcatcaggctcaaccaagactggtaggagatcaggaacaggagcttttggacacactggccgatcagctacccaggctcctggcgcgggccagcgagcttcaaaccgaatgtatgggcctgcgcaaaggtcacgggactttggagcgaagatga

SEQ ID NO: 8519 - RNA, 540 nt, synthetic construct
  misc_feature 1..540: note = derived and/or modified sequence opt4 fromFibrinogen__Homo_sapiens__BAG62044
  source 1..540: mol_type = other RNA
atggtgaacgacagatggaagaccatgggcggcgccgcccagctggaggacagacccagagacaagccccaggccagaaagctgagactgagagagagacccagctgcggctacgtgctgtgcaccgtgctgctggccctggccgtgctgctggccgtggccgtgaccggcgccgtgctgttcctgaaccacgcccacgcccccggcaccgcccccccccccgtggtgagcaccggcgccgccagcgccaacagcgccctggtgaccgtggagagagccgacagcagccacctgagcatcctgatcgaccccagatgccccgacctgaccgacagcttcgccagactggagagcgcccaggccagcgtgctgcaggccctgaccgagcaccaggcccagcccagactggtgggcgaccaggagcaggagctgctggacaccctggccgaccagctgcccagactgctggccagagccagcgagctgcagaccgagtgcatgggcctgagaaagggccacggcaccctggagagaagatga

SEQ ID NO: 8520 - RNA, 540 nt, synthetic construct
  misc_feature 1..540: note = derived and/or modified sequence opt5 fromFibrinogen__Homo_sapiens__BAG62044
  source 1..540: mol_type = other RNA
atggtgaacgacagatggaagaccatgggcggggccgctcagctggaggatcggccccgcgacaaacctcaagccagaaagctccggctgcgcgaaagaccgagctgcggatacgtcctttgtacagttctgctcgcgctggctgtgcttctggccgtggccgtcacgggcgctgttctcttcctgaatcacgcccatgctcccgggaccgcccctccccctgtggtgtccacaggagcggcctctgctaacagcgccctggtcaccgtggagcgggctgattcctctcacctcagcatcctgattgacccccgctgccctgatcttacagactcctttgccagactggaatctgcgcaggccagcgttctccaggctctgaccgagcatcaggcccaaccgcggcttgtgggcgatcaggaacaggagctgctcgacacactggctgatcagctgccccgcctcctggccagagcctccgagcttcaaaccgaatgtatggggctgcggaaaggacacggcacgctcgagcgcagatga

SEQ ID NO: 8521 - protein, 474 aa, synthetic construct
  REGION 1..474: note = Fibrinogen__Homo_sapiens__B4E1D3
MKRMVSWSFHKLKTMKHLLLLLLCVFLVKSQGVNDNEEGFFSARGHRPLDKKREEARPAKAAATQKKVERKAPDAGGCLHADPDLGVLCPTGCQLQEALLQQERPIRNSVDELNNNVEAVSQTSSSSFQYMYLLKDLWQKRQKQVKDNENVVNEYSSELEKHQLYIDETVNSNIPTNLRVLRSILENLRSKIQKLESDVSAQMEYCRTPCTVSCNIPVVSGKECEEIIRKGGETSEMYLIQPDSSVKPYRVYCDMNTENGGWTVIQNRQDGSVDFGRKWDPYKQGFGNVATNTDGKNYCGLPGEYWLGNDKISQLTRMGPTELLIEMEDWKGDKVKAHYGGFTVQNEANKYQISVNKYRGTAGNALMDGASQLMGENRTMTIHNGMFFSTYDRDNDGWLTSDPRKQCSKEDGGGWWYNRCHAANPNGRYYWGGQYTWDMAKHGTDDGVVWMNWKGSWYSMRKMSMKIRPFFPQQ

SEQ ID NO: 8522 - RNA, 1425 nt, synthetic construct
  misc_feature 1..1425: note = Fibrinogen__Homo_sapiens__BAG64745
  source 1..1425: mol_type = other RNA
atgaaaaggatggtttcttggagcttccacaaacttaaaaccatgaaacatctattattgctactattgtgtgtttttctagttaagtcccaaggtgtcaacgacaatgaggagggtttcttcagtgcccgtggtcatcgaccccttgacaagaagagagaagaggctcgtccagccaaagcagctgccactcaaaagaaagtagaaagaaaagcccctgatgctggaggctgtcttcacgctgacccagacctgggggtgttgtgtcctacaggatgtcagttgcaagaggctttgctacaacaggaaaggccaatcagaaatagtgttgatgagttaaataacaatgtggaagctgtttcccagacctcctcttcttcctttcagtacatgtatttgctgaaagacctgtggcaaaagaggcagaagcaagtaaaagataatgaaaatgtagtcaatgagtactcctcagaactggaaaagcaccaattatatatagatgagactgtgaatagcaatatcccaactaaccttcgtgtgcttcgttcaatcctggaaaacctgagaagcaaaatacaaaagttagaatctgatgtctcagctcaaatggaatattgtcgcaccccatgcactgtcagttgcaatattcctgtggtgtctggcaaagaatgtgaggaaattatcaggaaaggaggtgaaacatctgaaatgtatctcattcaacctgacagttctgtcaaaccgtatagagtatactgtgacatgaatacagaaaatggaggatggacagtgattcagaaccgtcaagacggtagtgttgactttggcaggaaatgggatccatataaacagggatttggaaatgttgcaaccaacacagatgggaagaattactgtggcctaccaggtgaatattggcttggaaatgataaaattagccagcttaccaggatgggacccacagaacttttgatagaaatggaggactggaaaggagacaaagtaaaggctcactatggaggattcactgtacagaatgaagccaacaaataccagatctcagtgaacaaatacagaggaacagccggtaatgccctcatggatggagcatctcagctgatgggagaaaacaggaccatgaccattcacaacggcatgttcttcagcacgtatgacagagacaatgacggctggttaacatcagatcccagaaaacagtgttctaaagaagacggtggtggatggtggtataatagatgtcatgcagccaatccaaacggcagatactactggggtggacagtacacctgggacatggcaaagcatggcacagatgatggtgtagtatggatgaattggaaggggtcatggtactcaatgaggaagatgagtatgaagatcaggcccttcttcccacagcaatag

SEQ ID NO: 8523 - RNA, 1425 nt, synthetic construct
  misc_feature 1..1425: note = derived and/or modified sequence opt1 fromFibrinogen__Homo_sapiens__BAG64745
  source 1..1425: mol_type = other RNA
atgaagcgcatggtgagctggtccttccacaagctgaagaccatgaagcacctcctgctgctcctgctgtgcgtcttcctcgtcaagagccagggcgtgaacgacaacgaggaggggttcttctccgcccggggccaccgccccctggacaagaagcgggaggaggcccgcccggcgaaggccgccgccacccagaagaaggtggagcggaaggcccccgacgccgggggctgcctgcacgcggaccccgacctcggggtgctgtgccccacgggctgccagctgcaggaggccctcctgcagcaggagcgcccgatccggaacagcgtggacgagctgaacaacaacgtcgaggccgtgtcccagaccagctccagctccttccagtacatgtacctcctgaaggacctgtggcagaagcgccagaagcaggtcaaggacaacgagaacgtggtgaacgagtacagctccgagctcgagaagcaccagctgtacatcgacgagaccgtgaacagcaacatccccaccaacctgcgggtcctccgctccatcctggagaacctgcggagcaagatccagaagctcgagtccgacgtgagcgcgcagatggagtactgccgcacgccctgcaccgtgtcctgcaacatccccgtcgtgagcggcaaggagtgcgaggagatcatccggaagggcggggagacctccgagatgtacctgatccagccggacagcagcgtgaagccctaccgcgtctactgcgacatgaacaccgagaacgggggctggacggtgatccagaaccggcaggacgggtccgtggacttcggccgcaagtgggacccctacaagcagggcttcgggaacgtcgccaccaacaccgacggcaagaactactgcgggctgcccggcgagtactggctcggcaacgacaagatcagccagctgacccggatggggccgacggagctgctcatcgagatggaggactggaagggcgacaaggtgaaggcccactacgggggcttcaccgtgcagaacgaggccaacaagtaccagatctccgtcaacaagtaccgcgggaccgccggcaacgcgctgatggacggcgccagccagctgatgggggagaaccggaccatgacgatccacaacggcatgttcttctccacctacgaccgcgacaacgacgggtggctcaccagcgacccccggaagcagtgctccaaggaggacggcgggggctggtggtacaaccgctgccacgccgccaaccccaacggccgctactactggggcgggcagtacacctgggacatggccaagcacgggacggacgacggcgtggtctggatgaactggaaggggagctggtactccatgcggaagatgagcatgaagatccgccccttcttcccgcagcagtga

SEQ ID NO: 8524 - RNA, 1425 nt, synthetic construct
  misc_feature 1..1425: note = derived and/or modified sequence opt2 fromFibrinogen__Homo_sapiens__BAG64745
  source 1..1425: mol_type = other RNA
atgaagcgcatggtctcctggtccttccacaagctcaagaccatgaagcacctcctcctcctcctcctctgcgtcttcctcgtcaagtcccagggcgtcaacgacaacgaggagggcttcttctccgcccgcggccaccgccccctcgacaagaagcgcgaggaggcccgccccgccaaggccgccgccacccagaagaaggtcgagcgcaaggcccccgacgccggcggctgcctccacgccgaccccgacctcggcgtcctctgccccaccggctgccagctccaggaggccctcctccagcaggagcgccccatccgcaactccgtcgacgagctcaacaacaacgtcgaggccgtctcccagacctcctcctcctccttccagtacatgtacctcctcaaggacctctggcagaagcgccagaagcaggtcaaggacaacgagaacgtcgtcaacgagtactcctccgagctcgagaagcaccagctctacatcgacgagaccgtcaactccaacatccccaccaacctccgcgtcctccgctccatcctcgagaacctccgctccaagatccagaagctcgagtccgacgtctccgcccagatggagtactgccgcaccccctgcaccgtctcctgcaacatccccgtcgtctccggcaaggagtgcgaggagatcatccgcaagggcggcgagacctccgagatgtacctcatccagcccgactcctccgtcaagccctaccgcgtctactgcgacatgaacaccgagaacggcggctggaccgtcatccagaaccgccaggacggctccgtcgacttcggccgcaagtgggacccctacaagcagggcttcggcaacgtcgccaccaacaccgacggcaagaactactgcggcctccccggcgagtactggctcggcaacgacaagatctcccagctcacccgcatgggccccaccgagctcctcatcgagatggaggactggaagggcgacaaggtcaaggcccactacggcggcttcaccgtccagaacgaggccaacaagtaccagatctccgtcaacaagtaccgcggcaccgccggcaacgccctcatggacggcgcctcccagctcatgggcgagaaccgcaccatgaccatccacaacggcatgttcttctccacctacgaccgcgacaacgacggctggctcacctccgacccccgcaagcagtgctccaaggaggacggcggcggctggtggtacaaccgctgccacgccgccaaccccaacggccgctactactggggcggccagtacacctgggacatggccaagcacggcaccgacgacggcgtcgtctggatgaactggaagggctcctggtactccatgcgcaagatgtccatgaagatccgccccttcttcccccagcagtga

SEQ ID NO: 8525 - RNA, 1425 nt, synthetic construct
  misc_feature 1..1425: note = derived and/or modified sequence opt3 fromFibrinogen__Homo_sapiens__BAG64745
  source 1..1425: mol_type = other RNA
atgaagagaatggtgagctggtccttccacaaactgaagaccatgaaacatctccttctgttgttactgtgcgtctttctagttaagtctcagggcgtgaacgacaatgaggaagggttcttttcagccaggggacaccggcccctcgataaaaagcgcgaggaagctcgacctgcaaaggccgcggctacacaaaagaaggtagagcgtaaagccccagacgccggtggctgtctgcatgcagatccggaccttggggtgctgtgccccactggatgtcagttgcaggaagctctcctgcagcaagagagacctatcaggaacagtgtcgatgagctgaataacaatgtggaagcagttagccagacgtcctcttcgtcattccagtacatgtatctcttaaaggacctgtggcagaaacggcaaaaacaggtgaaggataacgagaatgtcgtgaacgaatacagcagtgagcttgagaaacaccagttgtatattgacgaaaccgtaaattccaacataccaacaaatctgcgcgttctaagatctatcctcgagaacctgaggagcaagattcagaaacttgaatccgatgtgtcagcccaaatggagtactgccggactccctgtaccgtcagttgcaatatccctgtggtgagcggcaaggaatgtgaggagattatccgcaaaggtggggaaacatctgagatgtatctgatacagccagactcctcagtcaagccctaccgagtttattgcgatatgaacaccgaaaatggaggctggactgtgatccagaacagacaagacggcagcgtagattttgggaggaaatgggacccttacaagcagggattcggtaacgtggctacaaataccgacggcaagaactactgtgggttgccaggagagtattggctcggcaatgataaaattagtcagctgacgcggatgggtccgactgaattactgatcgagatggaggactggaagggggataaagtcaaggcccattacggaggctttaccgtgcagaacgaagcgaataaatatcaaatttctgttaacaagtaccgtggcacagcagggaatgccctcatggacggagcttcccagcttatgggtgagaaccgcactatgaccatccacaatggcatgttctttagcacatatgatagagacaacgatgggtggctgacctcggaccccaggaagcagtgctctaaagaagatggaggcggttggtggtacaatcggtgtcacgccgcaaaccctaatgggcgatattactggggcggacagtacacgtgggacatggctaagcatggcactgatgacggggtggtctggatgaactggaaaggatcctggtattcaatgcgcaagatgagtatgaaaataagaccattctttccccaacagtga

SEQ ID NO: 8526 - RNA, 1425 nt, synthetic construct
  misc_feature 1..1425: note = derived and/or modified sequence opt4 fromFibrinogen__Homo_sapiens__BAG64745
  source 1..1425: mol_type = other RNA
atgaagagaatggtgagctggagcttccacaagctgaagaccatgaagcacctgctgctgctgctgctgtgcgtgttcctggtgaagagccagggcgtgaacgacaacgaggagggcttcttcagcgccagaggccacagacccctggacaagaagagagaggaggccagacccgccaaggccgccgccacccagaagaaggtggagagaaaggcccccgacgccggcggctgcctgcacgccgaccccgacctgggcgtgctgtgccccaccggctgccagctgcaggaggccctgctgcagcaggagagacccatcagaaacagcgtggacgagctgaacaacaacgtggaggccgtgagccagaccagcagcagcagcttccagtacatgtacctgctgaaggacctgtggcagaagagacagaagcaggtgaaggacaacgagaacgtggtgaacgagtacagcagcgagctggagaagcaccagctgtacatcgacgagaccgtgaacagcaacatccccaccaacctgagagtgctgagaagcatcctggagaacctgagaagcaagatccagaagctggagagcgacgtgagcgcccagatggagtactgcagaaccccctgcaccgtgagctgcaacatccccgtggtgagcggcaaggagtgcgaggagatcatcagaaagggcggcgagaccagcgagatgtacctgatccagcccgacagcagcgtgaagccctacagagtgtactgcgacatgaacaccgagaacggcggctggaccgtgatccagaacagacaggacggcagcgtggacttcggcagaaagtgggacccctacaagcagggcttcggcaacgtggccaccaacaccgacggcaagaactactgcggcctgcccggcgagtactggctgggcaacgacaagatcagccagctgaccagaatgggccccaccgagctgctgatcgagatggaggactggaagggcgacaaggtgaaggcccactacggcggcttcaccgtgcagaacgaggccaacaagtaccagatcagcgtgaacaagtacagaggcaccgccggcaacgccctgatggacggcgccagccagctgatgggcgagaacagaaccatgaccatccacaacggcatgttcttcagcacctacgacagagacaacgacggctggctgaccagcgaccccagaaagcagtgcagcaaggaggacggcggcggctggtggtacaacagatgccacgccgccaaccccaacggcagatactactggggcggccagtacacctgggacatggccaagcacggcaccgacgacggcgtggtgtggatgaactggaagggcagctggtacagcatgagaaagatgagcatgaagatcagacccttcttcccccagcagtga

SEQ ID NO: 8527 - RNA, 1425 nt, synthetic construct
  misc_feature 1..1425: note = derived and/or modified sequence opt5 fromFibrinogen__Homo_sapiens__BAG64745
  source 1..1425: mol_type = other RNA
atgaagagaatggtgagctggtccttccacaaactgaagaccatgaaacatctcctgcttctgctcctgtgcgtctttcttgttaagtctcagggcgtgaacgacaatgaggaagggttctttagcgcccggggacaccgccccctggataaaaagagagaggaagctcggcctgccaaggcggctgccacacagaaaaaggtggagcgcaaagccccggacgctggcgggtgtctccatgccgatcccgacctgggagtcctgtgccctacgggctgtcaactccaggaagctctgcttcagcaagagagacccatccggaactccgtggatgagctgaataacaatgttgaagccgtgtctcagaccagctcctctagcttccagtacatgtatctcctgaaggacctttggcagaaacgccaaaagcaggtcaaggataacgagaatgtggttaacgaatactccagcgagctggagaaacaccagctctatattgacgaaacagtcaattctaacatccctaccaatctgagagtgctgcggtccattctcgagaacctgcgcagcaagatccagaaacttgaatctgatgtgtccgcgcaaatggagtactgcagaacaccctgtaccgtgagctgcaatattcctgtcgtttctgggaaggaatgtgaggagatcatccggaaaggaggcgaaacatccgagatgtatctgattcagccggacagctccgtgaagccctaccgcgtgtattgcgatatgaacaccgaaaatggcgggtggacggtcatccagaacagacaagacggatctgtggattttggccggaaatgggacccttacaagcaggggttcggaaacgttgccaccaatacagacggcaagaactactgtgggctccccggagagtattggctgggcaatgataaaattagccagcttacccgcatgggccctacagaactgctcatcgagatggaggactggaagggggataaagtgaaggctcattacggaggctttaccgtccagaacgaagccaataaatatcaaatttccgtgaacaagtacagagggacggctggaaatgccctgatggacggcgcgagccagctgatgggggagaaccggacaatgaccatccacaatggaatgttcttttctacatatgatagagacaacgatggctggctcacctccgacccccgcaagcagtgcagcaaagaagatggcgggggatggtggtacaatcggtgtcacgccgctaacccgaatggcagatattactggggagggcagtacacctgggacatggccaagcatggcacagatgacggggttgtgtggatgaactggaaaggctcttggtatagcatgcgcaagatgtccatgaaaattcggcctttctttccccaacagtga

SEQ ID NO: 8528 - protein, 344 aa, synthetic construct
  REGION 1..344: note = Fibrinogen__Homo_sapiens__D3DP13
MYLLKDLWQKRQKQVKDNENVVNEYSSELEKHQLYIDETVNSNIPTNLRVLRSILENLRSKIQKLESDVSAQMEYCRTPCTVSCNIPVVSGKECEEIIRKGGETSEMYLIQPDSSVKPYRVYCDMNTENGGWTVIQNRQDGSVDFGRKWDPYKQGFGNVATNTDGKNYCGLPGEYWLGNDKISQLTRMGPTELLIEMEDWKGDKVKAHYGGFTVQNEANKYQISVNKYRGTAGNALMDGASQLMGENRTMTIHNGMFFSTYDRDNDGWLTSDPRKQCSKEDGGGWWYNRCHAANPNGRYYWGGQYTWDMAKHGTDDGVVWMNWKGSWYSMRKMSMKIRPFFPQQ

SEQ ID NO: 8529 - RNA, 1035 nt, synthetic construct
  misc_feature 1..1035: note = Fibrinogen__Homo_sapiens__EAX04934
  source 1..1035: mol_type = other RNA
atgtatttgctgaaagacctgtggcaaaagaggcagaagcaagtaaaagataatgaaaatgtagtcaatgagtactcctcagaactggaaaagcaccaattatatatagatgagactgtgaatagcaatatcccaactaaccttcgtgtgcttcgttcaatcctggaaaacctgagaagcaaaatacaaaagttagaatctgatgtctcagctcaaatggaatattgtcgcaccccatgcactgtcagttgcaatattcctgtggtgtctggcaaagaatgtgaggaaattatcaggaaaggaggtgaaacatctgaaatgtatctcattcaacctgacagttctgtcaaaccgtatagagtatactgtgacatgaatacagaaaatggaggatggacagtgattcagaaccgtcaagacggtagtgttgactttggcaggaaatgggatccatataaacagggatttggaaatgttgcaaccaacacagatgggaagaattactgtggcctaccaggtgaatattggcttggaaatgataaaattagccagcttaccaggatgggacccacagaacttttgatagaaatggaggactggaaaggagacaaagtaaaggctcactatggaggattcactgtacagaatgaagccaacaaataccagatctcagtgaacaaatacagaggaacagccggtaatgccctcatggatggagcatctcagctgatgggagaaaacaggaccatgaccattcacaacggcatgttcttcagcacgtatgacagagacaatgacggctggttaacatcagatcccagaaaacagtgttctaaagaagacggtggtggatggtggtataatagatgtcatgcagccaatccaaacggcagatactactggggtggacagtacacctgggacatggcaaagcatggcacagatgatggtgtagtatggatgaattggaaggggtcatggtactcaatgaggaagatgagtatgaagatcaggcccttcttcccacagcaatag

SEQ ID NO: 8530 - RNA, 1035 nt, synthetic construct
  misc_feature 1..1035: note = derived and/or modified sequence opt1 fromFibrinogen__Homo_sapiens__EAX04934
  source 1..1035: mol_type = other RNA
atgtacctgctcaaggacctgtggcagaagcgccagaagcaggtcaaggacaacgagaacgtggtgaacgagtacagctccgagctggagaagcaccagctctacatcgacgagaccgtgaacagcaacatccccaccaacctgcgggtcctgcgctccatcctcgagaacctgcggagcaagatccagaagctggagtccgacgtgagcgcccagatggagtactgccgcacgccgtgcaccgtgtcctgcaacatccccgtcgtgagcggcaaggagtgcgaggagatcatccggaagggcggggagacctccgagatgtacctcatccagcccgacagctccgtgaagccctaccgcgtctactgcgacatgaacaccgagaacgggggctggacggtgatccagaaccggcaggacgggagcgtggacttcggccgcaagtgggacccgtacaagcagggcttcgggaacgtcgccaccaacaccgacggcaagaactactgcgggctgcccggcgagtactggctggggaacgacaagatctcccagctcacccggatgggccccacggagctgctgatcgagatggaggactggaagggcgacaaggtgaaggcgcactacgggggcttcaccgtgcagaacgaggccaacaagtaccagatcagcgtcaacaagtaccgcgggaccgccggcaacgccctcatggacggcgcctcccagctgatgggggagaaccggaccatgacgatccacaacggcatgttcttcagcacctacgaccgcgacaacgacgggtggctgacctccgacccccggaagcagtgcagcaaggaggacggcgggggctggtggtacaaccgctgccacgcggccaacccgaacggccggtactactggggcgggcagtacacctgggacatggccaagcacgggacggacgacggcgtggtgtggatgaactggaaggggtcctggtacagcatgcgcaagatgagcatgaagatccggcccttcttcccccagcagtga

SEQ ID NO: 8531 - RNA, 1035 nt, synthetic construct
  misc_feature 1..1035: note = derived and/or modified sequence opt2 fromFibrinogen__Homo_sapiens__EAX04934
  source 1..1035: mol_type = other RNA
atgtacctcctcaaggacctctggcagaagcgccagaagcaggtcaaggacaacgagaacgtcgtcaacgagtactcctccgagctcgagaagcaccagctctacatcgacgagaccgtcaactccaacatccccaccaacctccgcgtcctccgctccatcctcgagaacctccgctccaagatccagaagctcgagtccgacgtctccgcccagatggagtactgccgcaccccctgcaccgtctcctgcaacatccccgtcgtctccggcaaggagtgcgaggagatcatccgcaagggcggcgagacctccgagatgtacctcatccagcccgactcctccgtcaagccctaccgcgtctactgcgacatgaacaccgagaacggcggctggaccgtcatccagaaccgccaggacggctccgtcgacttcggccgcaagtgggacccctacaagcagggcttcggcaacgtcgccaccaacaccgacggcaagaactactgcggcctccccggcgagtactggctcggcaacgacaagatctcccagctcacccgcatgggccccaccgagctcctcatcgagatggaggactggaagggcgacaaggtcaaggcccactacggcggcttcaccgtccagaacgaggccaacaagtaccagatctccgtcaacaagtaccgcggcaccgccggcaacgccctcatggacggcgcctcccagctcatgggcgagaaccgcaccatgaccatccacaacggcatgttcttctccacctacgaccgcgacaacgacggctggctcacctccgacccccgcaagcagtgctccaaggaggacggcggcggctggtggtacaaccgctgccacgccgccaaccccaacggccgctactactggggcggccagtacacctgggacatggccaagcacggcaccgacgacggcgtcgtctggatgaactggaagggctcctggtactccatgcgcaagatgtccatgaagatccgccccttcttcccccagcagtga

SEQ ID NO: 8532 - RNA, 1035 nt, synthetic construct
  misc_feature 1..1035: note = derived and/or modified sequence opt3 fromFibrinogen__Homo_sapiens__EAX04934
  source 1..1035: mol_type = other RNA
atgtacctgctcaaggacctttggcagaaaagacaaaaacaggtgaaggataacgagaatgtcgttaacgaatatagctccgagctggaaaagcaccagttgtacatcgacgagaccgtaaattctaacattcccacaaatttaagggtgctgcggtcaatactagaaaacctccgcagtaaaatccagaagctggagagcgatgtgtccgcccaaatggagtattgccgaactccttgtacggtctcttgcaatattccagtggtttcgggcaaggaatgtgaggaaatcattcgtaaagggggagagacctcagagatgtaccttatccagccggacagcagtgtgaagccctatagagtctactgcgatatgaacacagaaaatggtggctggactgtgatacagaacaggcaggacgggtccgtagatttcggacggaaatgggacccttataagcaaggctttggtaatgttgctaccaacacagatgggaaaaattactgtggactgccaggcgagtactggttgggcaacgacaagatctctcagctcacccgcatggggcccactgaactgctgattgagatggaagattggaagggagacaaagtgaaggcacattatggtggcttcacagtccagaatgaggccaacaaataccagatcagcgtgaacaagtatagagggaccgcgggaaatgctctcatggatggcgcctcccaattaatgggtgagaacaggacgatgactattcacaatgggatgtttttctcaacctacgaccgggacaacgatggatggctgacaagtgaccctcgcaaacagtgcagcaaggaagatggcggcgggtggtggtataatcgatgtcatgcagccaacccaaatggaagatactattggggtggccagtacacttgggacatggctaaacacgggaccgatgacggagtggtctggatgaactggaagggctcttggtactccatgaggaagatgtcaatgaaaatccggccctttttccctcaacagtga

SEQ ID NO: 8533 - RNA, 1035 nt, synthetic construct
  misc_feature 1..1035: note = derived and/or modified sequence opt4 fromFibrinogen__Homo_sapiens__EAX04934
  source 1..1035: mol_type = other RNA
atgtacctgctgaaggacctgtggcagaagagacagaagcaggtgaaggacaacgagaacgtggtgaacgagtacagcagcgagctggagaagcaccagctgtacatcgacgagaccgtgaacagcaacatccccaccaacctgagagtgctgagaagcatcctggagaacctgagaagcaagatccagaagctggagagcgacgtgagcgcccagatggagtactgcagaaccccctgcaccgtgagctgcaacatccccgtggtgagcggcaaggagtgcgaggagatcatcagaaagggcggcgagaccagcgagatgtacctgatccagcccgacagcagcgtgaagccctacagagtgtactgcgacatgaacaccgagaacggcggctggaccgtgatccagaacagacaggacggcagcgtggacttcggcagaaagtgggacccctacaagcagggcttcggcaacgtggccaccaacaccgacggcaagaactactgcggcctgcccggcgagtactggctgggcaacgacaagatcagccagctgaccagaatgggccccaccgagctgctgatcgagatggaggactggaagggcgacaaggtgaaggcccactacggcggcttcaccgtgcagaacgaggccaacaagtaccagatcagcgtgaacaagtacagaggcaccgccggcaacgccctgatggacggcgccagccagctgatgggcgagaacagaaccatgaccatccacaacggcatgttcttcagcacctacgacagagacaacgacggctggctgaccagcgaccccagaaagcagtgcagcaaggaggacggcggcggctggtggtacaacagatgccacgccgccaaccccaacggcagatactactggggcggccagtacacctgggacatggccaagcacggcaccgacgacggcgtggtgtggatgaactggaagggcagctggtacagcatgagaaagatgagcatgaagatcagacccttcttcccccagcagtga

SEQ ID NO: 8534 - RNA, 1035 nt, synthetic construct
  misc_feature 1..1035: note = derived and/or modified sequence opt5 fromFibrinogen__Homo_sapiens__EAX04934
  source 1..1035: mol_type = other RNA
atgtacctgctcaaggacctgtggcagaaaagacaaaaacaggtgaaggataacgagaatgtcgttaacgaatatagctccgagcttgaaaagcaccagctgtacatcgacgagaccgtcaattctaacattcccacaaatctccgggtgctgcgcagcatccttgaaaacctgagatccaaaattcagaagctcgagtctgatgtgagcgcccaaatggagtattgccggacgccttgtaccgtgtcctgcaatatcccggttgtgtctggcaaggaatgtgaggaaattatccgcaaagggggagagacaagcgagatgtacctgatccagcccgactccagcgtcaagccttatagagtgtactgcgatatgaacaccgaaaatggcgggtggacagttattcagaaccggcaggacggatctgtggatttcggccgcaaatgggacccctataagcaagggtttggaaatgtcgctaccaacacagatggcaaaaattactgtggcctgcctggggagtactggctcggaaacgacaagatctcccagctgaccagaatgggccccacggaacttctgattgagatggaagattggaagggggacaaagtgaaggcccattatggaggcttcaccgtgcagaatgaggcgaacaaataccagatcagcgtcaacaagtatcgggggacagctggaaatgccctcatggatggcgcctctcaactgatgggcgagaaccgcaccatgacaattcacaatgggatgtttttctccacctacgacagagacaacgatggatggcttacgagcgaccctcggaaacagtgctctaaggaagatggcgggggatggtggtataatcgctgtcatgctgccaacccgaatggcagatactattggggagggcagtacacatgggacatggctaaacacggcaccgatgacggcgttgtgtggatgaactggaaggggtcctggtacagcatgcggaagatgtccatgaaaatccgcccctttttccctcaacagtga

SEQ ID NO: 8535 - protein, 334 aa, synthetic construct
  REGION 1..334: note = Fibrinogen__Homo_sapiens__D3DP16
MIDAATLKSRKMLEEIMKYEASILTHDSSIRYLQEIYNSNNQKIVNLKEKVAQLEAQCQEPCKDTVQIHDITGKDCQDIANKGAKQSGLYFIKPLKANQQFLVYCEIDGSGNGWTVFQKRLDGSVDFKKNWIQYKEGFGHLSPTGTTEFWLGNEKIHLISTQSAIPYALRVELEDWNGRTSTADYAMFKVGPEADKYRLTYAYFAGGDAGDAFDGFDFGDDPSDKFFTSHNGMQFSTWDNDNDKFEGNCAEQDGSGWWMNKCHAGHLNGVYYQGGTYSKASTPNGYDNGIIWATWKTRWYSMKKTTMKIIPFNRLTIGEGQQHHLGGAKQAGDV

SEQ ID NO: 8536 - RNA, 1005 nt, synthetic construct
  misc_feature 1..1005: note = Fibrinogen__Homo_sapiens__EAX04905
  source 1..1005: mol_type = other RNA
atgatagacgctgctactttgaagtccaggaaaatgttagaagaaattatgaaatatgaagcatcgattttaacacatgactcaagtattcgatatttgcaggaaatatataattcaaataatcaaaagattgttaacctgaaagagaaggtagcccagcttgaagcacagtgccaggaaccttgcaaagacacggtgcaaatccatgatatcactgggaaagattgtcaagacattgccaataagggagctaaacagagcgggctttactttattaaacctctgaaagctaaccagcaattcttagtctactgtgaaatcgatgggtctggaaatggatggactgtgtttcagaagagacttgatggcagtgtagatttcaagaaaaactggattcaatataaagaaggatttggacatctgtctcctactggcacaacagaattttggctgggaaatgagaagattcatttgataagcacacagtctgccatcccatatgcattaagagtggaactggaagactggaatggcagaaccagtactgcagactatgccatgttcaaggtgggacctgaagctgacaagtaccgcctaacatatgcctacttcgctggtggggatgctggagatgcctttgatggctttgattttggcgatgatcctagtgacaagtttttcacatcccataatggcatgcagttcagtacctgggacaatgacaatgataagtttgaaggcaactgtgctgaacaggatggatctggttggtggatgaacaagtgtcacgctggccatctcaatggagtttattaccaaggtggcacttactcaaaagcatctactcctaatggttatgataatggcattatttgggccacttggaaaacccggtggtattccatgaagaaaaccactatgaagataatcccattcaacagactcacaattggagaaggacagcaacaccacctggggggagccaaacaggctggagacgtttaa

SEQ ID NO: 8537 - RNA, 1005 nt, synthetic construct
  misc_feature 1..1005: note = derived and/or modified sequence opt1 fromFibrinogen__Homo_sapiens__EAX04905
  source 1..1005: mol_type = other RNA
atgatcgacgccgccaccctcaagagccgcaagatgctggaggagatcatgaagtacgaggcgtccatcctgacccacgacagctccatccggtacctgcaggagatctacaacagcaacaaccagaagatcgtgaacctcaaggagaaggtcgcccagctggaggcccagtgccaggagccctgcaaggacacggtgcagatccacgacatcaccggcaaggactgccaggacatcgccaacaagggggccaagcagtccggcctgtacttcatcaagccgctcaaggcgaaccagcagttcctggtgtactgcgagatcgacgggagcggcaacgggtggaccgtcttccagaagcgcctggacggctccgtggacttcaagaagaactggatccagtacaaggagggcttcgggcacctcagccccaccggcacgaccgagttctggctggggaacgagaagatccacctgatctccacccagagcgccatcccctacgccctccgggtggagctggaggactggaacggccgcacctccacggccgactacgcgatgttcaaggtcgggcccgaggccgacaagtaccggctgacctacgcctacttcgccggcggcgacgccggggacgcgttcgacggcttcgacttcggggacgacccgagcgacaagttcttcacctcccacaacggcatgcagttcagcacctgggacaacgacaacgacaagttcgagggcaactgcgccgagcaggacgggtccggctggtggatgaacaagtgccacgccgggcacctcaacggcgtgtactaccagggcgggacgtacagcaaggcctccacccccaacggctacgacaacgggatcatctgggccacctggaagacccgctggtacagcatgaagaagacgaccatgaagatcatccccttcaaccggctgaccatcggcgaggggcagcagcaccacctgggcggggcgaagcaggccggcgacgtgtga

SEQ ID NO: 8538 - RNA, 1005 nt, synthetic construct
  misc_feature 1..1005: note = derived and/or modified sequence opt2 fromFibrinogen__Homo_sapiens__EAX04905
  source 1..1005: mol_type = other RNA
atgatcgacgccgccaccctcaagtcccgcaagatgctcgaggagatcatgaagtacgaggcctccatcctcacccacgactcctccatccgctacctccaggagatctacaactccaacaaccagaagatcgtcaacctcaaggagaaggtcgcccagctcgaggcccagtgccaggagccctgcaaggacaccgtccagatccacgacatcaccggcaaggactgccaggacatcgccaacaagggcgccaagcagtccggcctctacttcatcaagcccctcaaggccaaccagcagttcctcgtctactgcgagatcgacggctccggcaacggctggaccgtcttccagaagcgcctcgacggctccgtcgacttcaagaagaactggatccagtacaaggagggcttcggccacctctcccccaccggcaccaccgagttctggctcggcaacgagaagatccacctcatctccacccagtccgccatcccctacgccctccgcgtcgagctcgaggactggaacggccgcacctccaccgccgactacgccatgttcaaggtcggccccgaggccgacaagtaccgcctcacctacgcctacttcgccggcggcgacgccggcgacgccttcgacggcttcgacttcggcgacgacccctccgacaagttcttcacctcccacaacggcatgcagttctccacctgggacaacgacaacgacaagttcgagggcaactgcgccgagcaggacggctccggctggtggatgaacaagtgccacgccggccacctcaacggcgtctactaccagggcggcacctactccaaggcctccacccccaacggctacgacaacggcatcatctgggccacctggaagacccgctggtactccatgaagaagaccaccatgaagatcatccccttcaaccgcctcaccatcggcgagggccagcagcaccacctcggcggcgccaagcaggccggcgacgtctga

SEQ ID NO: 8539 - RNA, 1005 nt, synthetic construct
  misc_feature 1..1005: note = derived and/or modified sequence opt3 fromFibrinogen__Homo_sapiens__EAX04905
  source 1..1005: mol_type = other RNA
atgatcgacgccgctaccctgaaaagcagaaaaatgctcgaggaaattatgaagtacgaggcatccatacttacacacgattcttcaatcaggtatctgcaggaaatttacaacagtaataaccaaaagatcgtgaatttgaaggagaaagtcgcccagttagaagcgcagtgccaggagccctgtaaggacactgttcaaattcatgatatcacgggcaaggactgccaggatatagctaacaaaggggccaagcagagcggactgtatttcatcaaacctctaaaggcaaatcagcaatttctcgtgtactgtgagattgacggttccggcaacgggtggaccgtattccagaaacggctggatggatctgtggactttaagaagaattggatccagtataaagaaggcttcggtcacctttcgccaacagggactaccgagttttggctgggaaacgaaaagattcatttgatctcaacacagagcgccataccgtacgctctccgcgtcgagctggaggattggaatggccgaaccagtactgcagactatgccatgttcaaagtgggccccgaagctgataagtaccgtctgacatacgcctattttgcagggggagacgcgggtgatgccttcgacggctttgacttcggggatgacccttccgataaatttttcacctctcacaacggaatgcaatttagcacgtgggacaatgataacgacaagttcgagggcaattgcgctgaacaggatggttccgggtggtggatgaacaaatgtcatgccggacacctcaatggcgtttactatcagggcgggacttactcaaaggcaagtaccccaaacggatatgacaacggtattatctgggctacatggaagactagatggtacagcatgaaaaagaccacaatgaaaattatccccttcaataggttaaccatcggcgaggggcaacagcaccatctgggaggcgccaagcaggcgggtgatgtgtga

SEQ ID NO: 8540 - RNA, 1005 nt, synthetic construct
  misc_feature 1..1005: note = derived and/or modified sequence opt4 fromFibrinogen__Homo_sapiens__EAX04905
  source 1..1005: mol_type = other RNA
atgatcgacgccgccaccctgaagagcagaaagatgctggaggagatcatgaagtacgaggccagcatcctgacccacgacagcagcatcagatacctgcaggagatctacaacagcaacaaccagaagatcgtgaacctgaaggagaaggtggcccagctggaggcccagtgccaggagccctgcaaggacaccgtgcagatccacgacatcaccggcaaggactgccaggacatcgccaacaagggcgccaagcagagcggcctgtacttcatcaagcccctgaaggccaaccagcagttcctggtgtactgcgagatcgacggcagcggcaacggctggaccgtgttccagaagagactggacggcagcgtggacttcaagaagaactggatccagtacaaggagggcttcggccacctgagccccaccggcaccaccgagttctggctgggcaacgagaagatccacctgatcagcacccagagcgccatcccctacgccctgagagtggagctggaggactggaacggcagaaccagcaccgccgactacgccatgttcaaggtgggccccgaggccgacaagtacagactgacctacgcctacttcgccggcggcgacgccggcgacgccttcgacggcttcgacttcggcgacgaccccagcgacaagttcttcaccagccacaacggcatgcagttcagcacctgggacaacgacaacgacaagttcgagggcaactgcgccgagcaggacggcagcggctggtggatgaacaagtgccacgccggccacctgaacggcgtgtactaccagggcggcacctacagcaaggccagcacccccaacggctacgacaacggcatcatctgggccacctggaagaccagatggtacagcatgaagaagaccaccatgaagatcatccccttcaacagactgaccatcggcgagggccagcagcaccacctgggcggcgccaagcaggccggcgacgtgtga

SEQ ID NO: 8541 - RNA, 1005 nt, synthetic construct
  misc_feature 1..1005: note = derived and/or modified sequence opt5 fromFibrinogen__Homo_sapiens__EAX04905
  source 1..1005: mol_type = other RNA
atgatcgacgccgctaccctcaagagcagaaaaatgctggaggaaattatgaagtacgaggcctccatcctgacacacgattctagcattcggtatcttcaggaaatctacaactccaataaccagaaaattgtgaatctgaaggagaaagtcgcgcagctcgaagctcagtgccaggagccctgtaaggacacggttcaaatccatgatatcaccggcaaggactgccaggatattgccaacaaaggggccaagcagtctggactgtatttcatcaaacctcttaaggctaatcagcaatttctggtgtactgtgagattgacggcagcgggaacggatggacagtgttccagaaacgcctcgatggctccgtcgactttaagaagaattggatccagtataaagaagggttcggacacctgtctccgaccggcacaaccgagttttggctgggcaacgaaaagattcatctcatcagcacacagtccgccattccctacgctctgagagtggagcttgaggattggaatgggcggaccagcacggccgactatgcgatgttcaaagttggacctgaagccgataagtaccgcctgacctacgcttattttgccggcggggacgctggagatgccttcgacggctttgacttcggggatgacccctctgataaatttttcacatcccacaacggaatgcaatttagcacctgggacaatgataacgacaagttcgagggcaattgcgcggaacaggatggctctgggtggtggatgaacaaatgtcatgccggacacctcaatggcgtgtactatcaagggggaacatactccaaggctagcacccctaacggctatgacaacgggatcatctgggccacgtggaagacaagatggtactctatgaaaaagaccacaatgaaaattatccccttcaatcggctgaccattggagagggccaacagcaccatcttggcggggctaagcaggccggagatgtctga

SEQ ID NO: 8542 - protein, 253 aa, synthetic construct
  REGION 1..253: note = Fibrinogen__Homo_sapiens__D3DSP9
MAKVFSFILVTTALIMGREISADCSEIFNDGYKLSGFYKIKPLQSPAEFSVYCDMSDGGGWTVIQRRSDGSENFNRGWKDYENGFGNFVQKHGEYWLGNKNLHFLTTQEDYTLKIDLADFEKNSRYAQYKNFKVGDEKNFYELNIGEYSGTAGDSLAGNFHPEVQWWASHQRMKFSTWDRDHDNYEGNCAEEDQSGWWFNRCHSANLNGVYYSGPYTAKTDNGIVWYTWHGWWYSLKSVVMKIRPNDFIPNVI

SEQ ID NO: 8543 - RNA, 762 nt, synthetic construct
  misc_feature 1..762: note = Fibrinogen__Homo_sapiens__EAW63802
  source 1..762: mol_type = other RNA
atggcaaaggtgttcagtttcatccttgttaccaccgctctgataatgggcagggaaatttcggcagattgttcagagattttcaatgatgggtataagctcagtggattttacaaaatcaaacctctccagagcccagcagaattttctgtttattgtgacatgtccgatggaggaggatggactgtaattcagagacgatctgatggcagtgaaaactttaacagaggatggaaagactatgaaaatggctttggaaattttgtccaaaaacatggtgaatattggctgggcaataaaaatcttcacttcttgaccactcaagaagactacactttaaaaatcgaccttgcagattttgaaaaaaatagccgttatgcacaatataagaatttcaaagttggagatgaaaagaatttctacgagttgaatattggggaatattctggaacagctggagattcccttgcggggaattttcatcctgaggtgcagtggtgggctagtcaccaaagaatgaaattcagcacgtgggacagagatcatgacaactatgaagggaactgcgcagaagaagatcagtctggctggtggtttaacaggtgtcactctgcaaacctgaatggtgtatactacagcggcccctacacggctaaaacagacaatgggattgtctggtacacctggcatgggtggtggtattctctgaaatctgtggttatgaaaattaggccaaatgattttattccaaatgtaatttaa

SEQ ID NO: 8544 - RNA, 762 nt, synthetic construct
  misc_feature 1..762: note = derived and/or modified sequence opt1 fromFibrinogen__Homo_sapiens__EAW63802
  source 1..762: mol_type = other RNA
atggccaaggtgttcagcttcatcctggtcaccaccgccctgatcatgggccgcgagatctccgcggactgcagcgagatcttcaacgacgggtacaagctgtccggcttctacaagatcaagcccctgcagagcccggccgagttctccgtgtactgcgacatgagcgacgggggcgggtggacggtgatccagcggcgctccgacggcagcgagaacttcaaccggggctggaaggactacgagaacgggttcggcaacttcgtccagaagcacggggagtactggctcggcaacaagaacctgcacttcctgaccacccaggaggactacaccctcaagatcgacctggccgacttcgagaagaactcccgctacgcccagtacaagaacttcaaggtgggggacgagaagaacttctacgagctgaacatcggcgagtacagcggcacggccggggactccctcgcgggcaacttccaccccgaggtgcagtggtgggccagccaccagcggatgaagttctccacctgggaccgcgaccacgacaactacgaggggaactgcgccgaggaggaccagagcggctggtggttcaaccggtgccactccgccaacctgaacggcgtctactacagcgggccctacaccgcgaagaccgacaacggcatcgtgtggtacacgtggcacgggtggtggtactccctcaagagcgtggtcatgaagatccgccccaacgacttcatcccgaacgtgatctga

SEQ ID NO: 8545 - RNA, 762 nt, synthetic construct
  misc_feature 1..762: note = derived and/or modified sequence opt2 fromFibrinogen__Homo_sapiens__EAW63802
  source 1..762: mol_type = other RNA
atggccaaggtcttctccttcatcctcgtcaccaccgccctcatcatgggccgcgagatctccgccgactgctccgagatcttcaacgacggctacaagctctccggcttctacaagatcaagcccctccagtcccccgccgagttctccgtctactgcgacatgtccgacggcggcggctggaccgtcatccagcgccgctccgacggctccgagaacttcaaccgcggctggaaggactacgagaacggcttcggcaacttcgtccagaagcacggcgagtactggctcggcaacaagaacctccacttcctcaccacccaggaggactacaccctcaagatcgacctcgccgacttcgagaagaactcccgctacgcccagtacaagaacttcaaggtcggcgacgagaagaacttctacgagctcaacatcggcgagtactccggcaccgccggcgactccctcgccggcaacttccaccccgaggtccagtggtgggcctcccaccagcgcatgaagttctccacctgggaccgcgaccacgacaactacgagggcaactgcgccgaggaggaccagtccggctggtggttcaaccgctgccactccgccaacctcaacggcgtctactactccggcccctacaccgccaagaccgacaacggcatcgtctggtacacctggcacggctggtggtactccctcaagtccgtcgtcatgaagatccgccccaacgacttcatccccaacgtcatctga

SEQ ID NO: 8546 - RNA, 762 nt, synthetic construct
  misc_feature 1..762: note = derived and/or modified sequence opt3 fromFibrinogen__Homo_sapiens__EAW63802
  source 1..762: mol_type = other RNA
atggccaaggtgttcagctttatcctggtcaccacagctctcattatgggcagagagatatccgcagactgctctgaaatcttcaacgatgggtacaaactttcaggattttataagattaaacccctgcagagtcctgccgagttcagcgtttactgtgacatgtccgatggtggcgggtggactgtgatccaaaggcggtctgacggatcggaaaattttaaccgcggctggaaggattatgagaatggtttcgggaactttgtacagaaacacggagaatactggttgggcaataagaacttacatttcctgacgacccaggaggactatacactaaagattgatctcgcggactttgagaaaaattcacgatacgctcagtataagaacttcaaagtgggcgatgaaaagaatttttacgagctgaacatcggggaatacagcggaactgccggtgacagtcttgcaggcaatttccacccagaggtccaatggtgggcctcccatcagcgtatgaaattttctacctgggatagagaccacgataactatgaggggaattgcgctgaagaggaccagagcggatggtggttcaacaggtgtcattccgcaaatctgaacggcgtgtactattcaggtccgtacacagccaagaccgacaacgggatagtttggtatacttggcacggatggtggtacagtttgaaaagcgtggtcatgaagatccggcccaatgatttcattcctaacgtgatctga

SEQ ID NO: 8547 - RNA, 762 nt, synthetic construct
  misc_feature 1..762: note = derived and/or modified sequence opt4 fromFibrinogen__Homo_sapiens__EAW63802
  source 1..762: mol_type = other RNA
atggccaaggtgttcagcttcatcctggtgaccaccgccctgatcatgggcagagagatcagcgccgactgcagcgagatcttcaacgacggctacaagctgagcggcttctacaagatcaagcccctgcagagccccgccgagttcagcgtgtactgcgacatgagcgacggcggcggctggaccgtgatccagagaagaagcgacggcagcgagaacttcaacagaggctggaaggactacgagaacggcttcggcaacttcgtgcagaagcacggcgagtactggctgggcaacaagaacctgcacttcctgaccacccaggaggactacaccctgaagatcgacctggccgacttcgagaagaacagcagatacgcccagtacaagaacttcaaggtgggcgacgagaagaacttctacgagctgaacatcggcgagtacagcggcaccgccggcgacagcctggccggcaacttccaccccgaggtgcagtggtgggccagccaccagagaatgaagttcagcacctgggacagagaccacgacaactacgagggcaactgcgccgaggaggaccagagcggctggtggttcaacagatgccacagcgccaacctgaacggcgtgtactacagcggcccctacaccgccaagaccgacaacggcatcgtgtggtacacctggcacggctggtggtacagcctgaagagcgtggtgatgaagatcagacccaacgacttcatccccaacgtgatctga

SEQ ID NO: 8548 - RNA, 762 nt, synthetic construct
  misc_feature 1..762: note = derived and/or modified sequence opt5 fromFibrinogen__Homo_sapiens__EAW63802
  source 1..762: mol_type = other RNA
atggccaaggtgttcagctttatcctggtcaccacagctctcattatgggcagagagatctccgccgactgctctgaaattttcaacgatgggtacaaactgagcggattttataagatcaaaccccttcagtcccctgcggagttctctgtttactgtgacatgagcgatggcgggggatggacggtgattcaacggcgctccgacggctctgaaaattttaacagagggtggaaggattatgagaatggattcggcaactttgtgcagaaacacggcgaatactggctggggaataagaacctccatttcctgaccacacaggaggactatacccttaagatcgatctggctgactttgagaaaaatagccggtacgcccagtataagaacttcaaagtcggagatgaaaagaatttttacgagctcaacatcggcgaatactccgggacagccggagacagcctggctggcaatttccacccggaggtgcaatggtgggcctctcatcagcgcatgaaattttccacctgggatagagaccacgataactatgaggggaattgcgctgaagaggaccagagcggatggtggttcaaccggtgtcattctgccaatctgaacggcgtttactattccggcccctacacagcgaagaccgacaacgggattgtgtggtatacgtggcacggatggtggtacagcctcaagtctgtcgtgatgaaaatccgccctaatgatttcattcccaacgttatctga

SEQ ID NO: 8549 - protein, 866 aa, synthetic construct
  REGION 1..866: note = Fibrinogen__Homo_sapiens__P02671
MFSMRIVCLVLSVVGTAWTADSGEGDFLAEGGGVRGPRVVERHQSACKDSDWPFCSDEDWNYKCPSGCRMKGLIDEVNQDFTNRINKLKNSLFEYQKNNKDSHSLTTNIMEILRGDFSSANNRDNTYNRVSEDLRSRIEVLKRKVIEKVQHIQLLQKNVRAQLVDMKRLEVDIDIKIRSCRGSCSRALAREVDLKDYEDQQKQLEQVIAKDLLPSRDRQHLPLIKMKPVPDLVPGNFKSQLQKVPPEWKALTDMPQMRMELERPGGNEITRGGSTSYGTGSETESPRNPSSAGSWNSGSSGPGSTGNRNPGSSGTGGTATWKPGSSGPGSTGSWNSGSSGTGSTGNQNPGSPRPGSTGTWNPGSSERGSAGHWTSESSVSGSTGQWHSESGSFRPDSPGSGNARPNNPDWGTFEEVSGNVSPGTRREYHTEKLVTSKGDKELRTGKEKVTSGSTTTTRRSCSKTVTKTVIGPDGHKEVTKEVVTSEDGSDCPEAMDLGTLSGIGTLDGFRHRHPDEAAFFDTASTGKTFPGFFSPMLGEFVSETESRGSESGIFTNTKESSSHHPGIAEFPSRGKSSSYSKQFTSSTSYNRGDSTFESKSYKMADEAGSEADHEGTHSTKRGHAKSRPVRDCDDVLQTHPSGTQSGIFNIKLPGSSKIFSVYCDQETSLGGWLLIQQRMDGSLNFNRTWQDYKRGFGSLNDEGEGEFWLGNDYLHLLTQRGSVLRVELEDWAGNEAYAEYHFRVGSEAEGYALQVSSYEGTAGDALIEGSVEEGAEYTSHNNMQFSTFDRDADQWEENCAEVYGGGWWYNNCQAANLNGIYYPGGSYDPRNNSPYEIENGVVWVSFRGADYSLRAVRMKIRPLVTQ

SEQ ID NO: 8550 - RNA, 2601 nt, synthetic construct
  misc_feature 1..2601: note = Fibrinogen__Homo_sapiens__AAA17056
  source 1..2601: mol_type = other RNA
atgttttccatgaggatcgtctgcctagttctaagtgtggtgggcacagcatggactgcagatagtggtgaaggtgactttctagctgaaggaggaggcgtgcgtggcccaagggttgtggaaagacatcaatctgcctgcaaagattcagactggcccttctgctctgatgaagactggaactacaaatgcccttctggctgcaggatgaaagggttgattgatgaagtcaatcaagattttacaaacagaataaataagctcaaaaattcactatttgaatatcagaagaacaataaggattctcattcgttgaccactaatataatggaaattttgagaggcgatttttcctcagccaataaccgtgataatacctacaaccgagtgtcagaggatctgagaagcagaattgaagtcctgaagcgcaaagtcatagaaaaagtacagcatatccagcttctgcagaaaaatgttagagctcagttggttgatatgaaacgactggaggtggacattgatattaagatccgatcttgtcgagggtcatgcagtagggctttagctcgtgaagtagatctgaaggactatgaagatcagcagaagcaacttgaacaggtcattgccaaagacttacttccctctagagataggcaacacttaccactgataaaaatgaaaccagttccagacttggttcccggaaattttaagagccagcttcagaaggtacccccagagtggaaggcattaacagacatgccgcagatgagaatggagttagagagacctggtggaaatgagattactcgaggaggctccacctcttatggaaccggatcagagacggaaagccccaggaaccctagcagtgctggaagctggaactctgggagctctggacctggaagtactggaaaccgaaaccctgggagctctgggactggagggactgcaacctggaaacctgggagctctggacctggaagtactggaagctggaactctgggagctctggaactggaagtactggaaaccaaaaccctgggagccctagacctggtagtaccggaacctggaatcctggcagctctgaacgcggaagtgctgggcactggacctctgagagctctgtatctggtagtactggacaatggcactctgaatctggaagttttaggccagatagcccaggctctgggaacgcgaggcctaacaacccagactggggcacatttgaagaggtgtcaggaaatgtaagtccagggacaaggagagagtaccacacagaaaaactggtcacttctaaaggagataaagagctcaggactggtaaagagaaggtcacctctggtagcacaaccaccacgcgtcgttcatgctctaaaaccgttactaagactgttattggtcctgatggtcacaaagaagttaccaaagaagtggtgacctccgaagatggttctgactgtcccgaggcaatggatttaggcacattgtctggcataggtactctggatgggttccgccataggcaccctgatgaagctgccttcttcgacactgcctcaactggaaaaacattcccaggtttcttctcacctatgttaggagagtttgtcagtgagactgagtctaggggctcagaatctggcatcttcacaaatacaaaggaatccagttctcatcaccctgggatagctgaattcccttcccgtggtaaatcttcaagttacagcaaacaatttactagtagcacgagttacaacagaggagactccacatttgaaagcaagagctataaaatggcagatgaggccggaagtgaagccgatcatgaaggaacacatagcaccaagagaggccatgctaaatctcgccctgtcagagactgtgatgatgtcctccaaacacatccttcaggtacccaaagtggcattttcaatatcaagctaccgggatccagtaagattttttctgtttattgcgatcaagagaccagtttgggaggatggcttttgatccagcaaagaatggatggatcactgaattttaaccggacctggcaagactacaagagaggtttcggcagcctgaatgacgagggggaaggagaattctggctaggcaatgactacctccacttactaacccaaaggggctctgttcttagggttgaattagaggactgggctgggaatgaagcttatgcagaatatcacttccgggtaggctctgaggctgaaggctatgccctccaagtctcctcctatgaaggcactgcgggtgatgctctgattgagggttccgtagaggaaggggcagagtacacctctcacaacaacatgcagttcagcacctttgacagggatgcagaccagtgggaagagaactgtgcagaagtctatgggggaggctggtggtataataactgccaagcagccaatctcaatggaatctactaccctgggggctcctatgacccaaggaataacagtccttatgagattgagaatggagtggtctgggtttcctttagaggggcagattattccctcagggctgttcgcatgaaaattaggccccttgtgacccaatag

SEQ ID NO: 8551 - RNA, 2601 nt, synthetic construct
  misc_feature 1..2601: note = derived and/or modified sequence opt1 fromFibrinogen__Homo_sapiens__AAA17056
  source 1..2601: mol_type = other RNA
atgttcagcatgcgcatcgtgtgcctggtcctctccgtggtgggcaccgcctggaccgccgacagcggggagggcgacttcctggcggagggcggcggggtccgggggccccgcgtggtggagcggcaccagtccgcctgcaaggacagcgactggccgttctgctccgacgaggactggaactacaagtgccccagcggctgccgcatgaaggggctgatcgacgaggtcaaccaggacttcacgaaccggatcaacaagctcaagaactccctgttcgagtaccagaagaacaacaaggacagccactccctgaccaccaacatcatggagatcctccgcggcgacttcagctccgccaacaaccgggacaacacctacaaccgcgtgagcgaggacctgcggtcccgcatcgaggtgctgaagcggaaggtcatcgagaaggtgcagcacatccagctcctgcagaagaacgtgcgcgcccagctggtcgacatgaagcggctcgaggtggacatcgacatcaagatccgcagctgccgggggtcctgcagccgcgccctggcgcgggaggtggacctgaaggactacgaggaccagcagaagcagctcgagcaggtcatcgccaaggacctgctgccctcccgcgaccggcagcacctccccctgatcaagatgaagccggtgcccgacctggtgcccggcaacttcaagagccagctccagaaggtgcccccggagtggaaggccctgacggacatgccccagatgcgcatggagctggagcggcccgggggcaacgagatcacccgcggcgggtccaccagctacggcaccgggagcgagacggagagcccccgcaacccgtcctccgccggcagctggaactccggcagctccgggcccggcagcaccgggaaccggaaccccggctccagcgggaccggcggcaccgcgacgtggaagcccgggtccagcggcccggggtccaccggcagctggaactccgggagctccggcaccggcagcaccgggaaccagaaccccggcagcccccgccccgggtccacgggcacctggaacccggggagctccgagcggggcagcgccggccactggacctccgagagctccgtcagcgggtccaccggccagtggcacagcgagtccgggagcttccgccccgactcccccggcagcggcaacgcccggcccaacaacccggactgggggacgttcgaggaggtgtccggcaacgtcagccccgggacccgccgggagtaccacaccgagaagctcgtgacctccaagggcgacaaggagctgcgcacggggaaggagaaggtgaccagcggctccaccaccacgacccggcgcagctgcagcaagaccgtcaccaagacggtgatcggccccgacgggcacaaggaggtcaccaaggaggtggtgacctccgaggacggcagcgactgccccgaggccatggacctggggaccctctccggcatcgggacgctggacggcttccggcaccgccacccggacgaggccgcgttcttcgacaccgccagcaccggcaagaccttccccgggttcttctcccccatgctgggcgagttcgtcagcgagaccgagtcccgggggagcgagtccggcatcttcacgaacaccaaggagagctccagccaccacccggggatcgccgagttcccctcccgcggcaagagctccagctactccaagcagttcaccagctccaccagctacaaccggggcgacagcacgttcgagtccaagagctacaagatggccgacgaggccgggtccgaggcggaccacgagggcacccacagcaccaagcgcgggcacgccaagtcccggcccgtgcgcgactgcgacgacgtgctccagacccaccccagcggcacgcagtccgggatcttcaacatcaagctgccgggcagctccaagatcttcagcgtctactgcgaccaggagacctccctgggcgggtggctcctgatccagcagcggatggacggcagcctgaacttcaaccgcacctggcaggactacaagcgcgggttcggctccctcaacgacgagggcgagggggagttctggctgggcaacgactacctgcacctcctgacccagcgggggagcgtgctgcgcgtggagctcgaggactgggccggcaacgaggcctacgccgagtaccacttccgggtcgggtccgaggcggagggctacgccctccaggtgagctcctacgagggcacggccggggacgccctgatcgagggcagcgtggaggagggggccgagtacacctcccacaacaacatgcagttcagcaccttcgaccgcgacgcggaccagtgggaggagaactgcgccgaggtctacggcgggggctggtggtacaacaactgccaggccgccaacctgaacggcatctactaccccgggggcagctacgacccccggaacaactccccctacgagatcgagaacggggtggtgtgggtcagcttccgcggcgcggactactccctgcgggccgtgcgcatgaagatccggccgctggtgacccagtga

SEQ ID NO: 8552 - RNA, 2601 nt, synthetic construct
  misc_feature 1..2601: note = derived and/or modified sequence opt2 fromFibrinogen__Homo_sapiens__AAA17056
  source 1..2601: mol_type = other RNA
atgttctccatgcgcatcgtctgcctcgtcctctccgtcgtcggcaccgcctggaccgccgactccggcgagggcgacttcctcgccgagggcggcggcgtccgcggcccccgcgtcgtcgagcgccaccagtccgcctgcaaggactccgactggcccttctgctccgacgaggactggaactacaagtgcccctccggctgccgcatgaagggcctcatcgacgaggtcaaccaggacttcaccaaccgcatcaacaagctcaagaactccctcttcgagtaccagaagaacaacaaggactcccactccctcaccaccaacatcatggagatcctccgcggcgacttctcctccgccaacaaccgcgacaacacctacaaccgcgtctccgaggacctccgctcccgcatcgaggtcctcaagcgcaaggtcatcgagaaggtccagcacatccagctcctccagaagaacgtccgcgcccagctcgtcgacatgaagcgcctcgaggtcgacatcgacatcaagatccgctcctgccgcggctcctgctcccgcgccctcgcccgcgaggtcgacctcaaggactacgaggaccagcagaagcagctcgagcaggtcatcgccaaggacctcctcccctcccgcgaccgccagcacctccccctcatcaagatgaagcccgtccccgacctcgtccccggcaacttcaagtcccagctccagaaggtcccccccgagtggaaggccctcaccgacatgccccagatgcgcatggagctcgagcgccccggcggcaacgagatcacccgcggcggctccacctcctacggcaccggctccgagaccgagtccccccgcaacccctcctccgccggctcctggaactccggctcctccggccccggctccaccggcaaccgcaaccccggctcctccggcaccggcggcaccgccacctggaagcccggctcctccggccccggctccaccggctcctggaactccggctcctccggcaccggctccaccggcaaccagaaccccggctccccccgccccggctccaccggcacctggaaccccggctcctccgagcgcggctccgccggccactggacctccgagtcctccgtctccggctccaccggccagtggcactccgagtccggctccttccgccccgactcccccggctccggcaacgcccgccccaacaaccccgactggggcaccttcgaggaggtctccggcaacgtctcccccggcacccgccgcgagtaccacaccgagaagctcgtcacctccaagggcgacaaggagctccgcaccggcaaggagaaggtcacctccggctccaccaccaccacccgccgctcctgctccaagaccgtcaccaagaccgtcatcggccccgacggccacaaggaggtcaccaaggaggtcgtcacctccgaggacggctccgactgccccgaggccatggacctcggcaccctctccggcatcggcaccctcgacggcttccgccaccgccaccccgacgaggccgccttcttcgacaccgcctccaccggcaagaccttccccggcttcttctcccccatgctcggcgagttcgtctccgagaccgagtcccgcggctccgagtccggcatcttcaccaacaccaaggagtcctcctcccaccaccccggcatcgccgagttcccctcccgcggcaagtcctcctcctactccaagcagttcacctcctccacctcctacaaccgcggcgactccaccttcgagtccaagtcctacaagatggccgacgaggccggctccgaggccgaccacgagggcacccactccaccaagcgcggccacgccaagtcccgccccgtccgcgactgcgacgacgtcctccagacccacccctccggcacccagtccggcatcttcaacatcaagctccccggctcctccaagatcttctccgtctactgcgaccaggagacctccctcggcggctggctcctcatccagcagcgcatggacggctccctcaacttcaaccgcacctggcaggactacaagcgcggcttcggctccctcaacgacgagggcgagggcgagttctggctcggcaacgactacctccacctcctcacccagcgcggctccgtcctccgcgtcgagctcgaggactgggccggcaacgaggcctacgccgagtaccacttccgcgtcggctccgaggccgagggctacgccctccaggtctcctcctacgagggcaccgccggcgacgccctcatcgagggctccgtcgaggagggcgccgagtacacctcccacaacaacatgcagttctccaccttcgaccgcgacgccgaccagtgggaggagaactgcgccgaggtctacggcggcggctggtggtacaacaactgccaggccgccaacctcaacggcatctactaccccggcggctcctacgacccccgcaacaactccccctacgagatcgagaacggcgtcgtctgggtctccttccgcggcgccgactactccctccgcgccgtccgcatgaagatccgccccctcgtcacccagtga

SEQ ID NO: 8553 - RNA, 2601 nt, synthetic construct
  misc_feature 1..2601: note = derived and/or modified sequence opt3 fromFibrinogen__Homo_sapiens__AAA17056
  source 1..2601: mol_type = other RNA
atgttcagcatgagaatcgtgtgcctggtcctctccgttgtgggcaccgcctggacagctgactctggggagggagattttcttgcagaaggtggcggggtaaggggaccccgggtggtcgagcgccaccagtcagcctgtaaggacagtgattggcctttctgcagcgacgaagattggaactacaaatgtccatccggctgccgaatgaagggtctgattgacgaggtgaatcaagattttactaaccgtataaataaattgaagaactctttattcgaatatcagaaaaataacaaggactcgcattcactgacgaccaatatcatggagattctaagaggggattttagcagtgcgaacaatagggacaacacatacaatcgggtttccgaggatctccgctctagaatcgaagtgctgaagaggaaagtcattgagaaggtgcagcacatccagcttctgcaaaagaacgtacgggctcagttggttgacatgaagcgcctcgaagtggatatagacatcaaaattcgaagctgtagaggatcctgctcaagggccctggcacgggaggtcgacctgaaggattatgaggaccagcagaagcaactcgaacaggtgatcgccaaagatttactgccgagtcgtgaccgccagcatcttcccttgattaagatgaaacctgtgccagatctggtccccggcaatttcaagagccagctacaaaaagttcctccagagtggaaggctctcactgacatgccccagatgagaatggaactggagaggcctggcgggaacgaaatcacccggggaggttctacatcctacggcaccgggtcagagactgagagcccacgaaatccgagttctgcaggatcctggaacagcggctcgtctggtcccgggtccacaggaaaccgcaatcctggctcaagtggcaccgggggaacggccacttggaaaccaggtagctccggccccgggtctaccggaagctggaactcaggcagttccggtacagggagcactggcaatcagaaccctggatctccaagacccggctcaaccgggacatggaatccgggaagtagcgaaaggggttccgctggccactggacctctgagtcgagcgtgtccgggtcaacgggacaatggcatagtgaatctggcagctttcggcctgattcccccggttcagggaacgcccgcccaaataaccctgactggggcactttcgaggaagtaagcggaaatgtgtctcccggcacaagaagggagtatcacaccgagaaacttgtcacttccaagggggataaagaactgcgtacaggaaaggagaaagtgaccagtggtagcacgaccacaactcggcgatcttgttccaagaccgttacaaaaactgtgataggcccagacgggcacaaggaagtcaccaaggaggtggtaacatcagaagatggaagtgactgccccgaggcgatggacttgggcaccctcagcggtattgggactctggatggctttagacataggcaccctgacgaggcagccttctttgatacggcttcgacaggaaaaaccttcccaggctttttctccccgatgttaggggagttcgtttctgaaactgaaagccgcggatcagagagtggcatctttaccaacacaaaggagtcctctagccatcaccccggtattgccgagttcccttcccgggggaaatcaagcagttactctaagcagtttacctccagcacttcgtataatagaggagactcaacattcgaatctaaaagttacaagatggcagatgaagctggctccgaggccgaccacgaaggtacgcatagcaccaagaggggccacgcgaaatctcgcccagtgcgagattgtgacgatgtcctgcagactcatcccagcgggacacagtccggaatctttaacatcaagctccctggctcaagtaaaattttcagcgtgtactgcgaccaagagacctctcttgggggatggctgttgatacagcagcggatggatggctccctaaattttaaccgtacatggcaggactataagagaggtttcgggtcactgaatgatgagggagaaggcgagttttggctcggtaacgactacctgcaccttctgactcaaaggggcagtgtcttgcgcgtggaactcgaggactgggccgggaacgaagcatatgctgagtaccatttccgggttggaagcgaggccgaaggctatgctttacaggtgtcctcttacgaggggaccgccggagatgcactgatcgaaggctcggtagaggaaggtgccgagtatacgagccacaataacatgcagttttcaaccttcgacagagatgctgaccagtgggaggaaaattgtgcggaggtctacgggggaggctggtggtacaacaattgccaagcagccaacctgaatggtatttattacccaggcgggtcctatgatcccaggaacaatagtccgtacgaaatcgagaacggagtggtttgggtgtcttttcgaggcgctgactatagcctacgcgccgtccggatgaaaataagacctctcgtgacacagtga

SEQ ID NO: 8554 - RNA, 2601 nt, synthetic construct
  misc_feature 1..2601: note = derived and/or modified sequence opt4 fromFibrinogen__Homo_sapiens__AAA17056
  source 1..2601: mol_type = other RNA
atgttcagcatgagaatcgtgtgcctggtgctgagcgtggtgggcaccgcctggaccgccgacagcggcgagggcgacttcctggccgagggcggcggcgtgagaggccccagagtggtggagagacaccagagcgcctgcaaggacagcgactggcccttctgcagcgacgaggactggaactacaagtgccccagcggctgcagaatgaagggcctgatcgacgaggtgaaccaggacttcaccaacagaatcaacaagctgaagaacagcctgttcgagtaccagaagaacaacaaggacagccacagcctgaccaccaacatcatggagatcctgagaggcgacttcagcagcgccaacaacagagacaacacctacaacagagtgagcgaggacctgagaagcagaatcgaggtgctgaagagaaaggtgatcgagaaggtgcagcacatccagctgctgcagaagaacgtgagagcccagctggtggacatgaagagactggaggtggacatcgacatcaagatcagaagctgcagaggcagctgcagcagagccctggccagagaggtggacctgaaggactacgaggaccagcagaagcagctggagcaggtgatcgccaaggacctgctgcccagcagagacagacagcacctgcccctgatcaagatgaagcccgtgcccgacctggtgcccggcaacttcaagagccagctgcagaaggtgccccccgagtggaaggccctgaccgacatgccccagatgagaatggagctggagagacccggcggcaacgagatcaccagaggcggcagcaccagctacggcaccggcagcgagaccgagagccccagaaaccccagcagcgccggcagctggaacagcggcagcagcggccccggcagcaccggcaacagaaaccccggcagcagcggcaccggcggcaccgccacctggaagcccggcagcagcggccccggcagcaccggcagctggaacagcggcagcagcggcaccggcagcaccggcaaccagaaccccggcagccccagacccggcagcaccggcacctggaaccccggcagcagcgagagaggcagcgccggccactggaccagcgagagcagcgtgagcggcagcaccggccagtggcacagcgagagcggcagcttcagacccgacagccccggcagcggcaacgccagacccaacaaccccgactggggcaccttcgaggaggtgagcggcaacgtgagccccggcaccagaagagagtaccacaccgagaagctggtgaccagcaagggcgacaaggagctgagaaccggcaaggagaaggtgaccagcggcagcaccaccaccaccagaagaagctgcagcaagaccgtgaccaagaccgtgatcggccccgacggccacaaggaggtgaccaaggaggtggtgaccagcgaggacggcagcgactgccccgaggccatggacctgggcaccctgagcggcatcggcaccctggacggcttcagacacagacaccccgacgaggccgccttcttcgacaccgccagcaccggcaagaccttccccggcttcttcagccccatgctgggcgagttcgtgagcgagaccgagagcagaggcagcgagagcggcatcttcaccaacaccaaggagagcagcagccaccaccccggcatcgccgagttccccagcagaggcaagagcagcagctacagcaagcagttcaccagcagcaccagctacaacagaggcgacagcaccttcgagagcaagagctacaagatggccgacgaggccggcagcgaggccgaccacgagggcacccacagcaccaagagaggccacgccaagagcagacccgtgagagactgcgacgacgtgctgcagacccaccccagcggcacccagagcggcatcttcaacatcaagctgcccggcagcagcaagatcttcagcgtgtactgcgaccaggagaccagcctgggcggctggctgctgatccagcagagaatggacggcagcctgaacttcaacagaacctggcaggactacaagagaggcttcggcagcctgaacgacgagggcgagggcgagttctggctgggcaacgactacctgcacctgctgacccagagaggcagcgtgctgagagtggagctggaggactgggccggcaacgaggcctacgccgagtaccacttcagagtgggcagcgaggccgagggctacgccctgcaggtgagcagctacgagggcaccgccggcgacgccctgatcgagggcagcgtggaggagggcgccgagtacaccagccacaacaacatgcagttcagcaccttcgacagagacgccgaccagtgggaggagaactgcgccgaggtgtacggcggcggctggtggtacaacaactgccaggccgccaacctgaacggcatctactaccccggcggcagctacgaccccagaaacaacagcccctacgagatcgagaacggcgtggtgtgggtgagcttcagaggcgccgactacagcctgagagccgtgagaatgaagatcagacccctggtgacccagtga

SEQ ID NO: 8555 - RNA, 2601 nt, synthetic construct
  misc_feature 1..2601: note = derived and/or modified sequence opt5 fromFibrinogen__Homo_sapiens__AAA17056
  source 1..2601: mol_type = other RNA
atgttcagcatgagaatcgtgtgcctggtcctctccgttgtgggcaccgcctggacagctgactctggggagggagattttctggccgaaggcgggggagtgcggggcccccgcgtcgtggagagacaccagagcgcgtgtaaggactccgattggcctttctgctctgacgaagattggaactacaaatgtccgagcgggtgccggatgaagggacttattgacgaggttaatcaagattttacgaaccgcatcaataaactgaagaactccctcttcgaatatcagaaaaataacaaggactctcatagcctgaccacaaatattatggagatccttagaggcgatttttccagcgctaacaatcgggacaacacctacaatcgcgtgtctgaggatctgagatcccggattgaagtcctcaagcgcaaagtgatcgagaaggttcagcacatccagctgctgcaaaagaacgtgagagcccagctcgtcgacatgaagcggctggaagtggatattgacatcaaaattcgcagctgtagaggctcttgctcccgggcccttgctcgcgaggtggacctgaaggattatgaggaccagcagaagcaactcgaacaggtcatcgccaaagatctgcttcccagcagagaccggcagcatctgcctctcattaagatgaaacccgttcctgatctggtgcccgggaatttcaagtctcagctgcaaaaagtgcctccggagtggaaggctctcacagacatgccccagatgagaatggaactggagcgccctggaggcaacgaaatcaccagagggggatccacaagctacggcaccgggtccgagacggagtctccccggaatcctagctccgccggaagctggaactctggctccagcggccccgggtctaccggaaaccgcaatccgggcagctccgggacaggaggcaccgcgacatggaaacctgggtctagcggacccggctccaccggcagctggaactctgggtccagcggaacgggctctacagggaatcagaaccctggaagcccccggcccggctccaccgggacatggaatcctggctcctctgaaagaggaagcgccggccactggacctccgagtctagcgtctccgggagcaccggacaatggcattctgaatccggcagctttcgcccggattctcccgggtccggaaacgctcggcctaataaccccgactggggcacattcgaggaagtgagcgggaatgtttctcctggcacgagacgcgagtatcacaccgagaaacttgtgacaagcaagggagataaagaactgcggaccggcaaggagaaagtcacatccgggagcaccacgacaaccagacgctcttgttccaagaccgtgacaaaaaccgttattggacccgacggccacaaggaagtgacaaaggaggtcgtgacgagcgaagatgggtccgactgcccggaggccatggacctcggaaccctgtctggcatcgggacacttgatggctttcggcatagacaccctgacgaggctgccttctttgataccgcgagcacaggaaaaaccttccccggctttttctcccctatgctgggggagttcgtctctgaaacggaaagccggggatccgagtctggcatctttaccaacacaaaggagagctccagccatcaccccgggattgccgagttcccttctcgcggaaaatccagctcttactccaagcagtttaccagctctacatcctataatagaggcgacagcaccttcgaatccaaaagctacaagatggctgatgaagccgggtctgaggctgaccacgaaggcacgcatagcacaaagcggggacacgccaaatccagacccgtgcgcgattgtgacgatgttctccagacccatccgtctggcacacagagcgggatctttaacattaagctgcctggatcctctaaaatcttcagcgtgtactgcgaccaagagacctccctgggcgggtggctcctgattcagcagcggatggatggatctcttaattttaacagaacctggcaggactataagcgcggcttcggcagcctgaatgatgagggggaaggagagttttggctcggcaacgactacctgcaccttctgacacaaagagggtccgtcctccgggtggaactggaggactgggccggaaacgaggcttatgcggaataccatttccgcgttggcagcgaggccgaagggtatgctctccaggtgtcttcctacgagggaacggccggcgatgccctgatcgaaggcagcgtcgaggaaggggctgagtatacctctcacaataacatgcagttttccacattcgacagagatgccgaccagtgggaggaaaattgtgcggaggtgtacggaggcgggtggtggtacaacaattgccaagctgccaacctgaatggaatctattaccccggcgggagctatgatccccggaacaattccccttacgaaattgagaacggagtggtttgggtctcttttcgcggcgccgactatagccttagagctgtgcggatgaaaatccgcccgctggtgacccagtga

SEQ ID NO: 8556 - protein, 491 aa, synthetic construct
  REGION 1..491: note = Fibrinogen__Homo_sapiens__P02675
MKRMVSWSFHKLKTMKHLLLLLLCVFLVKSQGVNDNEEGFFSARGHRPLDKKREEAPSLRPAPPPISGGGYRARPAKAAATQKKVERKAPDAGGCLHADPDLGVLCPTGCQLQEALLQQERPIRNSVDELNNNVEAVSQTSSSSFQYMYLLKDLWQKRQKQVKDNENVVNEYSSELEKHQLYIDETVNSNIPTNLRVLRSILENLRSKIQKLESDVSAQMEYCRTPCTVSCNIPVVSGKECEEIIRKGGETSEMYLIQPDSSVKPYRVYCDMNTENGGWTVIQNRQDGSVDFGRKWDPYKQGFGNVATNTDGKNYCGLPGEYWLGNDKISQLTRMGPTELLIEMEDWKGDKVKAHYGGFTVQNEANKYQISVNKYRGTAGNALMDGASQLMGENRTMTIHNGMFFSTYDRDNDGWLTSDPRKQCSKEDGGGWWYNRCHAANPNGRYYWGGQYTWDMAKHGTDDGVVWMNWKGSWYSMRKMSMKIRPFFPQQ

SEQ ID NO: 8557 - RNA, 1476 nt, synthetic construct
  misc_feature 1..1476: note = Fibrinogen__Homo_sapiens__AAA18024
  source 1..1476: mol_type = other RNA
atgaaaaggatggtttcttggagcttccacaaacttaaaaccatgaaacatctattattgctactattgtgtgtttttctagttaagtcccaaggtgtcaacgacaatgaggagggtttcttcagtgcccgtggtcatcgaccccttgacaagaagagagaagaggctcccagcctgaggcctgccccaccgcccatcagtggaggtggctatcgggctcgtccagccaaagcagctgccactcaaaagaaagtagaaagaaaagcccctgatgctggaggctgtcttcacgctgacccagacctgggggtgttgtgtcctacaggatgtcagttgcaagaggctttgctacaacaggaaaggccaatcagaaatagtgttgatgagttaaataacaatgtggaagctgtttcccagacctcctcttcttcctttcagtacatgtatttgctgaaagacctgtggcaaaagaggcagaagcaagtaaaagataatgaaaatgtagtcaatgagtactcctcagaactggaaaagcaccaattatatatagatgagactgtgaatagcaatatcccaactaaccttcgtgtgcttcgttcaatcctggaaaacctgagaagcaaaatacaaaagttagaatctgatgtctcagctcaaatggaatattgtcgcaccccatgcactgtcagttgcaatattcctgtggtgtctggcaaagaatgtgaggaaattatcaggaaaggaggtgaaacatctgaaatgtatctcattcaacctgacagttctgtcaaaccgtatagagtatactgtgacatgaatacagaaaatggaggatggacagtgattcagaaccgtcaagacggtagtgttgactttggcaggaaatgggatccatataaacagggatttggaaatgttgcaaccaacacagatgggaagaattactgtggcctaccaggtgaatattggcttggaaatgataaaattagccagcttaccaggatgggacccacagaacttttgatagaaatggaggactggaaaggagacaaagtaaaggctcactatggaggattcactgtacagaatgaagccaacaaataccagatctcagtgaacaaatacagaggaacagccggtaatgccctcatggatggagcatctcagctgatgggagaaaacaggaccatgaccattcacaacggcatgttcttcagcacgtatgacagagacaatgacggctggttaacatcagatcccagaaaacagtgttctaaagaagacggtggtggatggtggtataatagatgtcatgcagccaatccaaacggcagatactactggggtggacagtacacctgggacatggcaaagcatggcacagatgatggtgtagtatggatgaattggaaggggtcatggtactcaatgaggaagatgagtatgaagatcaggcccttcttcccacagcaatag

SEQ ID NO: 8558 - RNA, 1476 nt, synthetic construct
  misc_feature 1..1476: note = derived and/or modified sequence opt1 fromFibrinogen__Homo_sapiens__AAA18024
  source 1..1476: mol_type = other RNA
atgaagcgcatggtgagctggtccttccacaagctgaagaccatgaagcacctcctgctgctcctgctgtgcgtcttcctcgtcaagagccagggcgtgaacgacaacgaggaggggttcttctccgcccggggccaccgccccctggacaagaagcgggaggaggccccgagcctgcgccccgcgcccccgcccatctccgggggcgggtaccgggcccgccccgccaaggccgccgcgacccagaagaaggtggagcggaaggcccccgacgccggcggctgcctccacgccgaccccgacctgggggtgctgtgcccgacgggctgccagctccaggaggcgctgctgcagcaggagcgccccatccggaacagcgtggacgagctcaacaacaacgtcgaggccgtgtcccagaccagctccagctccttccagtacatgtacctgctgaaggacctctggcagaagcgccagaagcaggtcaaggacaacgagaacgtggtgaacgagtacagctccgagctggagaagcaccagctgtacatcgacgagaccgtgaacagcaacatccccaccaacctccgggtcctgcgctccatcctggagaacctccggagcaagatccagaagctggagtccgacgtgagcgcccagatggagtactgccgcacgccctgcaccgtgtcctgcaacatcccggtcgtgagcgggaaggagtgcgaggagatcatccggaagggcggggagaccagcgagatgtacctgatccagcccgactccagcgtgaagccctaccgcgtctactgcgacatgaacaccgagaacggcggctggacggtgatccagaaccggcaggacgggtccgtggacttcggccgcaagtgggacccctacaagcaggggttcggcaacgtcgccaccaacaccgacggcaagaactactgcgggctcccgggcgagtactggctggggaacgacaagatcagccagctgacccggatgggccccacggagctcctgatcgagatggaggactggaagggggacaaggtgaaggcccactacggcggcttcaccgtgcagaacgaggcgaacaagtaccagatctccgtcaacaagtaccgcgggaccgccggcaacgccctgatggacggggccagccagctcatgggcgagaaccggaccatgacgatccacaacgggatgttcttctccacctacgaccgcgacaacgacggctggctgaccagcgacccccgcaagcagtgctccaaggaggacggcgggggctggtggtacaaccggtgccacgccgcgaaccccaacgggcgctactactggggcgggcagtacacctgggacatggccaagcacggcacggacgacggcgtggtctggatgaactggaaggggagctggtactccatgcggaagatgagcatgaagatccgcccgttcttcccccagcagtga

SEQ ID NO: 8559 - RNA, 1476 nt, synthetic construct
  misc_feature 1..1476: note = derived and/or modified sequence opt2 fromFibrinogen__Homo_sapiens__AAA18024
  source 1..1476: mol_type = other RNA
atgaagcgcatggtctcctggtccttccacaagctcaagaccatgaagcacctcctcctcctcctcctctgcgtcttcctcgtcaagtcccagggcgtcaacgacaacgaggagggcttcttctccgcccgcggccaccgccccctcgacaagaagcgcgaggaggccccctccctccgccccgcccccccccccatctccggcggcggctaccgcgcccgccccgccaaggccgccgccacccagaagaaggtcgagcgcaaggcccccgacgccggcggctgcctccacgccgaccccgacctcggcgtcctctgccccaccggctgccagctccaggaggccctcctccagcaggagcgccccatccgcaactccgtcgacgagctcaacaacaacgtcgaggccgtctcccagacctcctcctcctccttccagtacatgtacctcctcaaggacctctggcagaagcgccagaagcaggtcaaggacaacgagaacgtcgtcaacgagtactcctccgagctcgagaagcaccagctctacatcgacgagaccgtcaactccaacatccccaccaacctccgcgtcctccgctccatcctcgagaacctccgctccaagatccagaagctcgagtccgacgtctccgcccagatggagtactgccgcaccccctgcaccgtctcctgcaacatccccgtcgtctccggcaaggagtgcgaggagatcatccgcaagggcggcgagacctccgagatgtacctcatccagcccgactcctccgtcaagccctaccgcgtctactgcgacatgaacaccgagaacggcggctggaccgtcatccagaaccgccaggacggctccgtcgacttcggccgcaagtgggacccctacaagcagggcttcggcaacgtcgccaccaacaccgacggcaagaactactgcggcctccccggcgagtactggctcggcaacgacaagatctcccagctcacccgcatgggccccaccgagctcctcatcgagatggaggactggaagggcgacaaggtcaaggcccactacggcggcttcaccgtccagaacgaggccaacaagtaccagatctccgtcaacaagtaccgcggcaccgccggcaacgccctcatggacggcgcctcccagctcatgggcgagaaccgcaccatgaccatccacaacggcatgttcttctccacctacgaccgcgacaacgacggctggctcacctccgacccccgcaagcagtgctccaaggaggacggcggcggctggtggtacaaccgctgccacgccgccaaccccaacggccgctactactggggcggccagtacacctgggacatggccaagcacggcaccgacgacggcgtcgtctggatgaactggaagggctcctggtactccatgcgcaagatgtccatgaagatccgccccttcttcccccagcagtga

SEQ ID NO: 8560 - RNA, 1476 nt, synthetic construct
  misc_feature 1..1476: note = derived and/or modified sequence opt3 fromFibrinogen__Homo_sapiens__AAA18024
  source 1..1476: mol_type = other RNA
atgaagagaatggtgagctggtccttccacaaactgaagaccatgaaacatctccttctgttgttactgtgcgtctttctagttaagtctcagggcgtgaacgacaatgaggaagggttcttttcagccaggggacaccggcccctcgataaaaagcgcgaggaagctcctagtctgcgaccagcaccgccccctatcagcggtggcgggtaccgtgccagaccagcgaaggctgccgcaacacaaaagaaggtagagaggaaagcccccgacgctggaggctgtcttcatgcagatcctgacctgggtgtgttgtgcccaactgggtgtcagctccaggaagccctgctgcagcaagagcggcccattcgcaactccgtcgatgagctcaataacaatgtggaagctgtttctcagacgtcgtcaagcagtttccagtatatgtacttactgaaggacctttggcagaaaagacaaaaacaggtgaaggataacgagaatgtcgtgaacgaatattcctctgagttggagaaacaccagctgtacatagacgaaaccgtaaatagcaacatccctacaaatctaagggttctccggtccattctggagaaccttcgctcaaagatccagaaactggaaagtgatgtgagcgcccaaatggagtattgccgaactccatgtaccgtctcttgcaatattccggtggtgtccggaaaggaatgtgaggagatcataagaaaaggcggcgaaacatcagagatgtacttgatccagcccgacagcagtgtcaagccttatagggtttactgcgatatgaacaccgaaaatgggggatggactgtgattcagaaccggcaagacggttctgtagattttggccgtaaatgggacccatacaagcaggggttcggaaacgtggcgacaaataccgacggcaagaactattgtggtctccccggggagtactggctgggaaatgataaaatctcccagttaacgcgcatgggccctactgaactgctcattgagatggaggactggaagggcgataaagtcaaggcacattatgggggatttaccgtgcagaacgaagccaataaataccaaatcagcgttaacaagtatagaggtacagctggcaatgcccttatggacggggcatcgcagctgatgggagagaacaggactatgaccatacacaatggcatgttcttttctacatacgatcgggacaacgatggttggttgacctccgacccacgaaagcagtgctcaaaagaagatgggggcggatggtggtataatcgctgtcacgctgccaaccccaatggcagatactactggggagggcagtatacgtgggacatggcgaagcatggtactgatgacggcgtggtctggatgaactggaaagggagttggtacagcatgaggaagatgtccatgaaaattcggccgttctttcctcaacagtga

SEQ ID NO: 8561 - RNA, 1476 nt, synthetic construct
  misc_feature 1..1476: note = derived and/or modified sequence opt4 fromFibrinogen__Homo_sapiens__AAA18024
  source 1..1476: mol_type = other RNA
atgaagagaatggtgagctggagcttccacaagctgaagaccatgaagcacctgctgctgctgctgctgtgcgtgttcctggtgaagagccagggcgtgaacgacaacgaggagggcttcttcagcgccagaggccacagacccctggacaagaagagagaggaggcccccagcctgagacccgcccccccccccatcagcggcggcggctacagagccagacccgccaaggccgccgccacccagaagaaggtggagagaaaggcccccgacgccggcggctgcctgcacgccgaccccgacctgggcgtgctgtgccccaccggctgccagctgcaggaggccctgctgcagcaggagagacccatcagaaacagcgtggacgagctgaacaacaacgtggaggccgtgagccagaccagcagcagcagcttccagtacatgtacctgctgaaggacctgtggcagaagagacagaagcaggtgaaggacaacgagaacgtggtgaacgagtacagcagcgagctggagaagcaccagctgtacatcgacgagaccgtgaacagcaacatccccaccaacctgagagtgctgagaagcatcctggagaacctgagaagcaagatccagaagctggagagcgacgtgagcgcccagatggagtactgcagaaccccctgcaccgtgagctgcaacatccccgtggtgagcggcaaggagtgcgaggagatcatcagaaagggcggcgagaccagcgagatgtacctgatccagcccgacagcagcgtgaagccctacagagtgtactgcgacatgaacaccgagaacggcggctggaccgtgatccagaacagacaggacggcagcgtggacttcggcagaaagtgggacccctacaagcagggcttcggcaacgtggccaccaacaccgacggcaagaactactgcggcctgcccggcgagtactggctgggcaacgacaagatcagccagctgaccagaatgggccccaccgagctgctgatcgagatggaggactggaagggcgacaaggtgaaggcccactacggcggcttcaccgtgcagaacgaggccaacaagtaccagatcagcgtgaacaagtacagaggcaccgccggcaacgccctgatggacggcgccagccagctgatgggcgagaacagaaccatgaccatccacaacggcatgttcttcagcacctacgacagagacaacgacggctggctgaccagcgaccccagaaagcagtgcagcaaggaggacggcggcggctggtggtacaacagatgccacgccgccaaccccaacggcagatactactggggcggccagtacacctgggacatggccaagcacggcaccgacgacggcgtggtgtggatgaactggaagggcagctggtacagcatgagaaagatgagcatgaagatcagacccttcttcccccagcagtga

SEQ ID NO: 8562 - RNA, 1476 nt, synthetic construct
  misc_feature 1..1476: note = derived and/or modified sequence opt5 fromFibrinogen__Homo_sapiens__AAA18024
  source 1..1476: mol_type = other RNA
atgaagagaatggtgagctggtccttccacaaactgaagaccatgaaacatctcctgcttctgctcctgtgcgtctttcttgttaagtctcagggcgtgaacgacaatgaggaagggttctttagcgcccggggacaccgccccctggataaaaagagagaggaagctccttccctccggccggcgccccctcccatctctggcgggggataccgcgccagacctgctaaggccgccgctacacagaaaaaggtggagcggaaagcccccgacgctggcgggtgtctgcatgccgatcctgacctgggagtcctctgcccgacgggctgtcaactgcaggaagcgcttctgcagcaagagcgccccattagaaacagcgtggatgagctcaataacaatgttgaagccgtgtcccagacctctagctccagcttccagtatatgtacctgcttaaggacctgtggcagaaacggcaaaagcaggtcaaggataacgagaatgtggttaacgaatattcttccgagctcgagaaacaccagctgtacatcgacgaaacagtgaatagcaacattcctaccaatctgcgcgtcctcagatctatcctggagaaccttcggtccaagattcagaaactggaaagcgatgtgtctgctcaaatggagtattgccgcacaccctgtaccgtgtcctgcaatatccctgtcgttagcggcaaggaatgtgaggagatcattagaaaagggggagaaacatccgagatgtacctcatccagcccgactctagcgtgaagccgtatcgggtgtactgcgatatgaacaccgaaaatggcgggtggacggtcattcagaaccgccaagacggatccgtggattttggcagaaaatgggacccttacaagcaggggttcggaaacgttgccaccaatacagacggcaagaactattgtggcctgcccggggagtactggcttggaaatgataaaatcagccagctgacccggatgggccctacagaactcctgattgagatggaggactggaagggggataaagtgaaggctcattatggaggctttaccgtccagaacgaagccaataaataccaaatctctgtgaacaagtatagagggacggcgggaaatgccctgatggacggcgcttcccagctcatgggcgagaaccgcacaatgaccattcacaatgggatgttctttagcacatacgatcgggacaacgatggatggctgacctctgaccccagaaagcagtgcagcaaagaagatggcgggggatggtggtataatcgctgtcacgccgctaaccccaatggccggtactactggggcgggcagtatacctgggacatggccaagcatggaacagatgacggcgttgtgtggatgaactggaaagggtcctggtactctatgagaaagatgagcatgaaaatccgccctttctttccgcaacagtga

SEQ ID NO: 8563 - protein, 453 aa, synthetic construct
  REGION 1..453: note = Fibrinogen__Homo_sapiens__P02679
MSWSLHPRNLILYFYALLFLSSTCVAYVATRDNCCILDERFGSYCPTTCGIADFLSTYQTKVDKDLQSLEDILHQVENKTSEVKQLIKAIQLTYNPDESSKPNMIDAATLKSRKMLEEIMKYEASILTHDSSIRYLQEIYNSNNQKIVNLKEKVAQLEAQCQEPCKDTVQIHDITGKDCQDIANKGAKQSGLYFIKPLKANQQFLVYCEIDGSGNGWTVFQKRLDGSVDFKKNWIQYKEGFGHLSPTGTTEFWLGNEKIHLISTQSAIPYALRVELEDWNGRTSTADYAMFKVGPEADKYRLTYAYFAGGDAGDAFDGFDFGDDPSDKFFTSHNGMQFSTWDNDNDKFEGNCAEQDGSGWWMNKCHAGHLNGVYYQGGTYSKASTPNGYDNGIIWATWKTRWYSMKKTTMKIIPFNRLTIGEGQQHHLGGAKQVRPEHPAETEYDSLYPEDDL

SEQ ID NO: 8564 - RNA, 1362 nt, synthetic construct
  misc_feature 1..1362: note = Fibrinogen__Homo_sapiens__AAK19752
  source 1..1362: mol_type = other RNA
atgagttggtccttgcacccccggaatttaattctctacttctatgctcttttatttctctcttcaacatgtgtagcatatgttgctaccagagacaactgctgcatcttagatgaaagattcggtagttattgtccaactacctgtggcattgcagatttcctgtctacttatcaaaccaaagtagacaaggatctacagtctttggaagacatcttacatcaagttgaaaacaaaacatcagaagtcaaacagctgataaaagcaatccaactcacttataatcctgatgaatcatcaaaaccaaatatgatagacgctgctactttgaagtccaggaaaatgttagaagaaattatgaaatatgaagcatcgattttaacacatgactcaagtattcgatatttgcaggaaatatataattcaaataatcaaaagattgttaacctgaaagagaaggtagcccagcttgaagcacagtgccaggaaccttgcaaagacacggtgcaaatccatgatatcactgggaaagattgtcaagacattgccaataagggagctaaacagagcgggctttactttattaaacctctgaaagctaaccagcaattcttagtctactgtgaaatcgatgggtctggaaatggatggactgtgtttcagaagagacttgatggcagtgtagatttcaagaaaaactggattcaatataaagaaggatttggacatctgtctcctactggcacaacagaattttggctgggaaatgagaagattcatttgataagcacacagtctgccatcccatatgcattaagagtggaactggaagactggaatggcagaaccagtactgcagactatgccatgttcaaggtgggacctgaagctgacaagtaccgcctaacatatgcctacttcgctggtggggatgctggagatgcctttgatggctttgattttggcgatgatcctagtgacaagtttttcacatcccataatggcatgcagttcagtacctgggacaatgacaatgataagtttgaaggcaactgtgctgaacaggatggatctggttggtggatgaacaagtgtcacgctggccatctcaatggagtttattaccaaggtggcacttactcaaaagcatctactcctaatggttatgataatggcattatttgggccacttggaaaacccggtggtattccatgaagaaaaccactatgaagataatcccattcaacagactcacaattggagaaggacagcaacaccacctggggggagccaaacaggtcagaccagagcaccctgcggaaacagaatatgactcactttaccctgaggatgatttgtag

SEQ ID NO: 8565 - RNA, 1362 nt, synthetic construct
  misc_feature 1..1362: note = derived and/or modified sequence opt1 fromFibrinogen__Homo_sapiens__AAK19752
  source 1..1362: mol_type = other RNA
atgagctggtccctgcacccccgcaacctcatcctgtacttctacgccctgctcttcctgagctccacctgcgtggcctacgtcgcgacccgggacaactgctgcatcctggacgagcgcttcggcagctactgcccgacgacctgcgggatcgccgacttcctctccacctaccagaccaaggtggacaaggacctgcagagcctggaggacatcctccaccaggtggagaacaagacgtccgaggtcaagcagctgatcaaggccatccagctgacctacaaccccgacgagagctccaagcccaacatgatcgacgccgccaccctcaagagccggaagatgctggaggagatcatgaagtacgaggcgtccatcctgacccacgacagctccatccgctacctccaggagatctacaacagcaacaaccagaagatcgtgaacctgaaggagaaggtggcccagctggaggcccagtgccaggagccctgcaaggacacggtccagatccacgacatcaccggcaaggactgccaggacatcgccaacaagggggcgaagcagtccggcctctacttcatcaagccgctgaaggccaaccagcagttcctggtgtactgcgagatcgacgggagcggcaacggctggaccgtgttccagaagcggctcgacgggtccgtcgacttcaagaagaactggatccagtacaaggagggcttcgggcacctgagccccaccggcacgaccgagttctggctggggaacgagaagatccacctcatctccacccagagcgccatcccctacgccctgcgcgtggagctggaggactggaacggccggaccagcacggccgactacgcgatgttcaaggtgggccccgaggccgacaagtaccgcctcacctacgcctacttcgccgggggcgacgccggggacgcgttcgacggcttcgacttcggcgacgacccgtccgacaagttcttcaccagccacaacgggatgcagttctccacctgggacaacgacaacgacaagttcgagggcaactgcgccgagcaggacgggagcggctggtggatgaacaagtgccacgccgggcacctgaacggcgtctactaccagggcgggacgtactccaaggccagcacccccaacggctacgacaacgggatcatctgggccacctggaagacccggtggtactccatgaagaagacgaccatgaagatcatccccttcaaccgcctgaccatcggcgaggggcagcagcaccacctcggcggcgcgaagcaggtgcggcccgagcacccggccgagaccgagtacgacagcctgtaccccgaggacgacctgtga

SEQ ID NO: 8566 - RNA, 1362 nt, synthetic construct
  misc_feature 1..1362: note = derived and/or modified sequence opt2 fromFibrinogen__Homo_sapiens__AAK19752
  source 1..1362: mol_type = other RNA
atgtcctggtccctccacccccgcaacctcatcctctacttctacgccctcctcttcctctcctccacctgcgtcgcctacgtcgccacccgcgacaactgctgcatcctcgacgagcgcttcggctcctactgccccaccacctgcggcatcgccgacttcctctccacctaccagaccaaggtcgacaaggacctccagtccctcgaggacatcctccaccaggtcgagaacaagacctccgaggtcaagcagctcatcaaggccatccagctcacctacaaccccgacgagtcctccaagcccaacatgatcgacgccgccaccctcaagtcccgcaagatgctcgaggagatcatgaagtacgaggcctccatcctcacccacgactcctccatccgctacctccaggagatctacaactccaacaaccagaagatcgtcaacctcaaggagaaggtcgcccagctcgaggcccagtgccaggagccctgcaaggacaccgtccagatccacgacatcaccggcaaggactgccaggacatcgccaacaagggcgccaagcagtccggcctctacttcatcaagcccctcaaggccaaccagcagttcctcgtctactgcgagatcgacggctccggcaacggctggaccgtcttccagaagcgcctcgacggctccgtcgacttcaagaagaactggatccagtacaaggagggcttcggccacctctcccccaccggcaccaccgagttctggctcggcaacgagaagatccacctcatctccacccagtccgccatcccctacgccctccgcgtcgagctcgaggactggaacggccgcacctccaccgccgactacgccatgttcaaggtcggccccgaggccgacaagtaccgcctcacctacgcctacttcgccggcggcgacgccggcgacgccttcgacggcttcgacttcggcgacgacccctccgacaagttcttcacctcccacaacggcatgcagttctccacctgggacaacgacaacgacaagttcgagggcaactgcgccgagcaggacggctccggctggtggatgaacaagtgccacgccggccacctcaacggcgtctactaccagggcggcacctactccaaggcctccacccccaacggctacgacaacggcatcatctgggccacctggaagacccgctggtactccatgaagaagaccaccatgaagatcatccccttcaaccgcctcaccatcggcgagggccagcagcaccacctcggcggcgccaagcaggtccgccccgagcaccccgccgagaccgagtacgactccctctaccccgaggacgacctctga

SEQ ID NO: 8567 - RNA, 1362 nt, synthetic construct
  misc_feature 1..1362: note = derived and/or modified sequence opt3 fromFibrinogen__Homo_sapiens__AAK19752
  source 1..1362: mol_type = other RNA
atgagctggtccctgcaccccagaaacctcatcctttacttctatgccctgttgtttttatcttcaacctgcgtggcttacgtcgcaacaagggacaattgttgcattctggatgagcggttcggcagttattgtcctactacgtgcgggatagccgactttctaagcacctaccagacaaaggttgataaagacctccaatccctggaagatatccttcatcaggtggagaacaagacttctgaagtaaaacagctgattaaggcgatccagttgacctataatccagacgagtcgtcaaaaccgaacatgattgatgctgccacactcaagagccgcaagatgctggaagagatcatgaaatacgaggcaagtatactgacccacgactcctctatccgatatctccaagaaatttacaatagcaacaatcagaagatcgtgaacttaaaagagaaggtcgcccagctggaagctcagtgtcaagagccctgcaaagatactgtgcagattcatgacatcacaggaaaggattgtcaggacatagcaaataagggtgccaaacagtccggcctttacttcattaagcctttgaaagctaaccaacagtttctggtttattgcgagatcgatgggtcaggaaatggctggaccgtgttccagaagcgtctagacggtagtgtcgactttaaaaagaactggattcaatacaaagaagggttcggacacctcagcccaacgggcactaccgagttttggctgggcaatgaaaagatccatcttatctctacacagtccgccattccctatgcgctgagagtggagttggaagattggaacgggaggacttcaaccgcagactacgccatgttcaaggtaggacctgaggctgataaatatcggctcacatacgcctattttgctggtggcgacgcaggggatgccttcgacggatttgatttcggcgacgatccaagcgacaagttctttaccagtcacaatggtatgcagttctctacgtgggataacgacaacgacaaatttgaggggaattgtgcggaacaggatggatccggctggtggatgaacaagtgccacgccggccatctgaatggggtttactaccaaggaggtacttatagcaaagcatcgacacccaacggctacgacaatgggataatctgggctacctggaagactcgctggtattctatgaagaaaacaaccatgaagattatccctttcaacagattaacgataggagagggccagcagcaccatctgggtggggccaaacaggtgaggccagaacacccggctgagaccgaatacgattccctctatcccgaggacgatctttga

SEQ ID NO: 8568 - RNA, 1362 nt, synthetic construct
  misc_feature 1..1362: note = derived and/or modified sequence opt4 fromFibrinogen__Homo_sapiens__AAK19752
  source 1..1362: mol_type = other RNA
atgagctggagcctgcaccccagaaacctgatcctgtacttctacgccctgctgttcctgagcagcacctgcgtggcctacgtggccaccagagacaactgctgcatcctggacgagagattcggcagctactgccccaccacctgcggcatcgccgacttcctgagcacctaccagaccaaggtggacaaggacctgcagagcctggaggacatcctgcaccaggtggagaacaagaccagcgaggtgaagcagctgatcaaggccatccagctgacctacaaccccgacgagagcagcaagcccaacatgatcgacgccgccaccctgaagagcagaaagatgctggaggagatcatgaagtacgaggccagcatcctgacccacgacagcagcatcagatacctgcaggagatctacaacagcaacaaccagaagatcgtgaacctgaaggagaaggtggcccagctggaggcccagtgccaggagccctgcaaggacaccgtgcagatccacgacatcaccggcaaggactgccaggacatcgccaacaagggcgccaagcagagcggcctgtacttcatcaagcccctgaaggccaaccagcagttcctggtgtactgcgagatcgacggcagcggcaacggctggaccgtgttccagaagagactggacggcagcgtggacttcaagaagaactggatccagtacaaggagggcttcggccacctgagccccaccggcaccaccgagttctggctgggcaacgagaagatccacctgatcagcacccagagcgccatcccctacgccctgagagtggagctggaggactggaacggcagaaccagcaccgccgactacgccatgttcaaggtgggccccgaggccgacaagtacagactgacctacgcctacttcgccggcggcgacgccggcgacgccttcgacggcttcgacttcggcgacgaccccagcgacaagttcttcaccagccacaacggcatgcagttcagcacctgggacaacgacaacgacaagttcgagggcaactgcgccgagcaggacggcagcggctggtggatgaacaagtgccacgccggccacctgaacggcgtgtactaccagggcggcacctacagcaaggccagcacccccaacggctacgacaacggcatcatctgggccacctggaagaccagatggtacagcatgaagaagaccaccatgaagatcatccccttcaacagactgaccatcggcgagggccagcagcaccacctgggcggcgccaagcaggtgagacccgagcaccccgccgagaccgagtacgacagcctgtaccccgaggacgacctgtga

SEQ ID NO: 8569 - RNA, 1362 nt, synthetic construct
  misc_feature 1..1362: note = derived and/or modified sequence opt5 fromFibrinogen__Homo_sapiens__AAK19752
  source 1..1362: mol_type = other RNA
atgagctggtccctgcaccccagaaacctcatcctgtacttctatgcccttctgtttctctctagcacatgcgtggcttacgtcgccacccgggacaattgttgcattctggatgagcgcttcggctcctattgtcctacgacctgcgggatcgcggactttctttctacataccagaccaaggttgataaagacctgcaaagcctcgaagatattctgcatcaggtggagaacaagacatccgaagtgaaacagctgatcaaggctattcagctcacctataatccggacgagtctagcaaacccaacatgatcgatgccgccacactgaagtccagaaagatgcttgaagagatcatgaaatacgaggctagcattctgacccacgactcttccatccggtatctccaagaaatttacaatagcaacaatcagaagatcgtcaacctgaaagagaaggtggcccagcttgaagctcagtgtcaagagccttgcaaagatacggttcagattcatgacatcaccggaaaggattgtcaggacattgccaataagggcgcgaaacagtctgggctgtacttcatcaagcccctcaaagccaaccaacagtttctggtgtattgcgagatcgatggatccggcaatgggtggacagtcttccagaagcgcctggacggaagcgtggactttaaaaagaactggattcaatacaaagaaggcttcggccacctctctcctaccgggacaaccgagttttggctgggaaatgaaaagatccatcttatttccacgcagagcgctatcccctatgccctgagagttgagctcgaagattggaacggccggacatccaccgctgactacgccatgttcaaggtggggcctgaggcggataaatatcgcctgacatacgcctattttgctggaggcgacgccggggatgctttcgacggatttgatttcggcgacgatccgtctgacaagttctttaccagccacaatggcatgcagttctccacctgggataacgacaacgacaaatttgaggggaattgtgccgaacaggatggaagcggctggtggatgaacaagtgccacgccgggcatcttaatggagtctactaccaaggcgggacatattctaaggcttccacgcccaacggatacgacaatggcattatctgggcgacctggaaaacaagatggtatagcatgaagaaaaccacaatgaagatcattcctttcaaccggctgaccatcggcgaggggcagcagcaccatctcggaggcgccaaacaggtgcgccccgaacaccctgctgagacggaatacgattctctgtatcccgaggacgatctgtga

SEQ ID NO: 8570 - protein, 312 aa, synthetic construct
  REGION 1..312: note = Fibrinogen__Homo_sapiens__Q08830
MAKVFSFILVTTALTMGREISALEDCAQEQMRLRAQVRLLETRVKQQQVKIKQLLQENEVQFLDKGDENTVIDLGSKRQYADCSEIFNDGYKLSGFYKIKPLQSPAEFSVYCDMSDGGGWTVIQRRSDGSENFNRGWKDYENGFGNFVQKHGEYWLGNKNLHFLTTQEDYTLKIDLADFEKNSRYAQYKNFKVGDEKNFYELNIGEYSGTAGDSLAGNFHPEVQWWASHQRMKFSTWDRDHDNYEGNCAEEDQSGWWFNRCHSANLNGVYYSGPYTAKTDNGIVWYTWHGWWYSLKSVVMKIRPNDFIPNVI

SEQ ID NO: 8571 - RNA, 939 nt, synthetic construct
  misc_feature 1..939: note = Fibrinogen__Homo_sapiens__AAH07047
  source 1..939: mol_type = other RNA
atggcaaaggtgttcagtttcatccttgttaccaccgctcttacaatgggcagggaaatttcggcgctcgaggactgtgcccaggagcagatgcggctcagagcccaggtgcgcctgcttgagacccgggtcaaacagcaacaggtcaagatcaagcagcttttgcaggagaatgaagtccagttccttgataaaggagatgagaatactgtcattgatcttggaagcaagaggcagtatgcagattgttcagagattttcaatgatgggtataagctcagtggattttacaaaatcaaacctctccagagcccagcagaattttctgtttattgtgacatgtccgatggaggaggatggactgtaattcagagacgatctgatggcagtgaaaactttaacagaggatggaaagactatgaaaatggctttggaaattttgtccaaaaacatggtgaatattggctgggcaataaaaatcttcacttcttgaccactcaagaagactacactttaaaaatcgaccttgcagattttgaaaaaaatagccgttatgcacaatataagaatttcaaagttggagatgaaaagaatttctacgagttgaatattggggaatattctggaacagctggagattcccttgcggggaattttcatcctgaggtgcagtggtgggctagtcaccaaagaatgaaattcagcacgtgggacagagatcatgacaactatgaagggaactgcgcagaagaagatcagtctggctggtggtttaacaggtgtcactctgcaaacctgaatggtgtatactacagcggcccctacacggctaaaacagacaatgggattgtctggtacacctggcatgggtggtggtattctctgaaatctgtggttatgaaaattaggccaaatgattttattccaaatgtaatttaa

SEQ ID NO: 8572 - RNA, 939 nt, synthetic construct
  misc_feature 1..939: note = derived and/or modified sequence opt1 fromFibrinogen__Homo_sapiens__AAH07047
  source 1..939: mol_type = other RNA
atggccaaggtgttcagcttcatcctggtcaccaccgccctcacgatgggccgcgagatctccgcgctggaggactgcgcccaggagcagatgcggctgcgcgcccaggtgcggctcctggagacccgcgtgaagcagcagcaggtcaagatcaagcagctgctccaggagaacgaggtgcagttcctggacaagggggacgagaacaccgtgatcgacctgggcagcaagcggcagtacgccgactgctccgagatcttcaacgacgggtacaagctcagcggcttctacaagatcaagcccctgcagtccccggccgagttcagcgtctactgcgacatgtccgacgggggcggctggaccgtgatccagcgccggagcgacgggtccgagaacttcaaccgcggctggaaggactacgagaacgggttcggcaacttcgtgcagaagcacggggagtactggctgggcaacaagaacctccacttcctgacgacccaggaggactacaccctgaagatcgacctcgcggacttcgagaagaacagccggtacgcccagtacaagaacttcaaggtcggcgacgagaagaacttctacgagctgaacatcggggagtactccggcaccgccggggacagcctggccggcaacttccaccccgaggtgcagtggtgggcgtcccaccagcgcatgaagttcagcacgtgggaccgggaccacgacaactacgagggcaactgcgccgaggaggaccagtccgggtggtggttcaaccgctgccacagcgccaacctcaacggcgtgtactactccgggccctacaccgccaagaccgacaacggcatcgtctggtacacctggcacgggtggtggtacagcctgaagtccgtggtgatgaagatccggcccaacgacttcatcccgaacgtcatctga

SEQ ID NO: 8573 - RNA, 939 nt, synthetic construct
  misc_feature 1..939: note = derived and/or modified sequence opt2 fromFibrinogen__Homo_sapiens__AAH07047
  source 1..939: mol_type = other RNA
atggccaaggtcttctccttcatcctcgtcaccaccgccctcaccatgggccgcgagatctccgccctcgaggactgcgcccaggagcagatgcgcctccgcgcccaggtccgcctcctcgagacccgcgtcaagcagcagcaggtcaagatcaagcagctcctccaggagaacgaggtccagttcctcgacaagggcgacgagaacaccgtcatcgacctcggctccaagcgccagtacgccgactgctccgagatcttcaacgacggctacaagctctccggcttctacaagatcaagcccctccagtcccccgccgagttctccgtctactgcgacatgtccgacggcggcggctggaccgtcatccagcgccgctccgacggctccgagaacttcaaccgcggctggaaggactacgagaacggcttcggcaacttcgtccagaagcacggcgagtactggctcggcaacaagaacctccacttcctcaccacccaggaggactacaccctcaagatcgacctcgccgacttcgagaagaactcccgctacgcccagtacaagaacttcaaggtcggcgacgagaagaacttctacgagctcaacatcggcgagtactccggcaccgccggcgactccctcgccggcaacttccaccccgaggtccagtggtgggcctcccaccagcgcatgaagttctccacctgggaccgcgaccacgacaactacgagggcaactgcgccgaggaggaccagtccggctggtggttcaaccgctgccactccgccaacctcaacggcgtctactactccggcccctacaccgccaagaccgacaacggcatcgtctggtacacctggcacggctggtggtactccctcaagtccgtcgtcatgaagatccgccccaacgacttcatccccaacgtcatctga

SEQ ID NO: 8574 - RNA, 939 nt, synthetic construct
  misc_feature 1..939: note = derived and/or modified sequence opt3 fromFibrinogen__Homo_sapiens__AAH07047
  source 1..939: mol_type = other RNA
atggccaaggtgttcagctttatcctggtcaccacagctctcactatgggcagagagatttccgcacttgaagactgcgcccaggagcaaatgaggctgcgggcgcaggttcgcttgttagaaacgcgagtgaaacagcagcaagtaaagataaaacagctgctacaggagaacgaagtgcagttcctcgataagggggacgagaataccgtcatcgatctgggatctaaacgtcaatacgctgactgttcagagatttttaacgatggttataaacttagtggcttctacaagatcaagcccctgcagagccctgccgaattttccgtgtattgcgacatgtctgatgggggaggctggacagttattcagagaaggtcggacggttcagagaatttcaaccgggggtggaaggattacgaaaatggatttggcaacttcgtgcagaaacacggcgagtattggttggggaataagaacctccattttctgactacccaagaggactacacactgaaaatcgatctcgcagacttcgaaaagaatagccgctatgcccagtacaagaactttaaagtcggagatgagaagaatttctacgaattaaacataggtgagtatagtggcaccgctggggactccctggcaggaaattttcacccagaagtgcagtggtgggcctctcatcaaagaatgaaattcagcacttgggacagggatcacgacaactacgagggcaattgtgctgaggaagatcagtccggttggtggttcaaccggtgccattcagccaaccttaatggggtatattacagtggaccgtatacagcgaagaccgacaacggcatcgtttggtacacgtggcacggctggtggtatagcttgaaatctgtggtcatgaagattcgccccaatgattttatccctaacgtgatttga

SEQ ID NO: 8575 - RNA, 939 nt, synthetic construct
  misc_feature 1..939: note = derived and/or modified sequence opt4 fromFibrinogen__Homo_sapiens__AAH07047
  source 1..939: mol_type = other RNA
atggccaaggtgttcagcttcatcctggtgaccaccgccctgaccatgggcagagagatcagcgccctggaggactgcgcccaggagcagatgagactgagagcccaggtgagactgctggagaccagagtgaagcagcagcaggtgaagatcaagcagctgctgcaggagaacgaggtgcagttcctggacaagggcgacgagaacaccgtgatcgacctgggcagcaagagacagtacgccgactgcagcgagatcttcaacgacggctacaagctgagcggcttctacaagatcaagcccctgcagagccccgccgagttcagcgtgtactgcgacatgagcgacggcggcggctggaccgtgatccagagaagaagcgacggcagcgagaacttcaacagaggctggaaggactacgagaacggcttcggcaacttcgtgcagaagcacggcgagtactggctgggcaacaagaacctgcacttcctgaccacccaggaggactacaccctgaagatcgacctggccgacttcgagaagaacagcagatacgcccagtacaagaacttcaaggtgggcgacgagaagaacttctacgagctgaacatcggcgagtacagcggcaccgccggcgacagcctggccggcaacttccaccccgaggtgcagtggtgggccagccaccagagaatgaagttcagcacctgggacagagaccacgacaactacgagggcaactgcgccgaggaggaccagagcggctggtggttcaacagatgccacagcgccaacctgaacggcgtgtactacagcggcccctacaccgccaagaccgacaacggcatcgtgtggtacacctggcacggctggtggtacagcctgaagagcgtggtgatgaagatcagacccaacgacttcatccccaacgtgatctga

SEQ ID NO: 8576 - RNA, 939 nt, synthetic construct
  misc_feature 1..939: note = derived and/or modified sequence opt5 fromFibrinogen__Homo_sapiens__AAH07047
  source 1..939: mol_type = other RNA
atggccaaggtgttcagctttatcctggtcaccacagctctcacgatgggcagagagatttccgccctggaagactgcgcgcaggagcaaatgcggcttcgcgctcaggttagactgctcgaaacccgggtgaaacagcagcaagtgaagatcaaacagctgcttcaggagaacgaagtccagttcctggataagggggacgagaatacagtgattgatctcggatctaaacgccaatacgccgactgtagcgagatctttaacgatggctataagctgtccgggttctacaagattaaacccctgcagtctcctgccgaatttagcgtttattgcgacatgtccgatggaggcgggtggaccgtgatccagagacggtctgacggaagcgagaatttcaaccgcggctggaaggattacgaaaatggctttgggaacttcgtccagaaacacggagagtattggctcggcaataagaacctgcattttcttacaacccaagaggactacacactgaaaatcgatctcgctgacttcgaaaagaactccagatatgcccagtacaagaattttaaagtgggggatgagaagaatttctacgaactgaacattggagagtatagcggcaccgctggggactctcttgccggaaattttcacccggaagttcagtggtgggcgtcccatcaacggatgaaattcagcacgtgggaccgcgatcacgacaactacgagggcaattgtgccgaggaagatcagtctggctggtggttcaacagatgccattccgctaacctgaatggggtgtattacagcggaccctataccgccaagacagacaacggcatcgtctggtacacctggcacgggtggtggtattctctcaaatccgtggtgatgaagattcggcctaatgattttatccccaacgtcatttga

SEQ ID NO: 8577 - protein, 439 aa, synthetic construct; identical to SEQ ID NO: 8500
  REGION 1..439: note = Fibrinogen__Homo_sapiens__Q14314

SEQ ID NO: 8578 - RNA, 1320 nt, synthetic construct
  misc_feature 1..1320: note = Fibrinogen__Homo_sapiens__AAD10825
  source 1..1320: mol_type = other RNA
atgaagctggctaactggtactggctgagctcagctgttcttgccacttacggttttttggttgtggcaaacaatgaaacagaggaaattaaagatgaaagagcaaaggatgtctgcccagtgagactagaaagcagagggaaatgcgaagaggcaggggagtgcccctaccaggtaagcctgccccccttgactattcagctcccgaagcaattcagcaggatcgaggaggtgttcaaagaagtccaaaacctcaaggaaatcgtaaatagtctaaagaaatcttgccaagactgcaagctgcaggctgatgacaacggagacccaggcagaaacggactgttgttacccagtacaggagccccgggagaggttggtgataacagagttagagaattagagagtgaggttaacaagctgtcctctgagctaaagaatgccaaagaggagatcaatgtacttcatggtcgcctggagaagctgaatcttgtaaatatgaacaacatagaaaattatgttgacagcaaagtggcaaatctaacatttgttgtcaatagtttggatggcaaatgttcaaagtgtcccagccaagaacaaatacagtcacgtccagttcaacatctaatatataaagattgctctgactactacgcaataggcaaaagaagcagtgagacctacagagttacacctgatcccaaaaatagtagctttgaagtttactgtgacatggagaccatggggggaggctggacagtgctgcaggcacgtctcgatgggagcaccaacttcaccagaacatggcaagactacaaagcaggctttggaaacctcagaagggaattttggctggggaacgataaaattcatcttctgaccaagagtaaggaaatgattctgagaatagatcttgaagactttaatggtgtcgaactatatgccttgtatgatcagttttatgtggctaatgagtttctcaaatatcgtttacacgttggtaactataatggcacagctggagatgcattacgtttcaacaaacattacaaccacgatctgaagtttttcaccactccagataaagacaatgatcgatatccttctgggaactgtgggctgtactacagttcaggctggtggtttgatgcatgtctttctgcaaacttaaatggcaaatattatcaccaaaaatacagaggtgtccgtaatgggattttctggggtacctggcctggtgtaagtgaggcacaccctggtggctacaagtcctccttcaaagaggctaagatgatgatcagacccaagcactttaagccataa

SEQ ID NO: 8579 - RNA, 1320 nt, synthetic construct; identical to SEQ ID NO: 8502
  misc_feature 1..1320: note = derived and/or modified sequence opt1 fromFibrinogen__Homo_sapiens__AAD10825
  source 1..1320: mol_type = other RNA

SEQ ID NO: 8580 - RNA, 1320 nt, synthetic construct; identical to SEQ ID NO: 8503
  misc_feature 1..1320: note = derived and/or modified sequence opt2 fromFibrinogen__Homo_sapiens__AAD10825
  source 1..1320: mol_type = other RNA

SEQ ID NO: 8581 - RNA, 1320 nt, synthetic construct; identical to SEQ ID NO: 8504
  misc_feature 1..1320: note = derived and/or modified sequence opt3 fromFibrinogen__Homo_sapiens__AAD10825
  source 1..1320: mol_type = other RNA

SEQ ID NO: 8582 - RNA, 1320 nt, synthetic construct; identical to SEQ ID NO: 8505
  misc_feature 1..1320: note = derived and/or modified sequence opt4 fromFibrinogen__Homo_sapiens__AAD10825
  source 1..1320: mol_type = other RNA

SEQ ID NO: 8583 - RNA, 1320 nt, synthetic construct; identical to SEQ ID NO: 8506
  misc_feature 1..1320: note = derived and/or modified sequence opt5 fromFibrinogen__Homo_sapiens__AAD10825
  source 1..1320: mol_type = other RNA

SEQ ID NO: 8584 - protein, 288 aa, synthetic construct
  REGION 1..288: note = Fibrinogen__Homo_sapiens__Q6UXM4
MDLLWILPSLWLLLLGGPACLKTQEHPSCPGPRELEASKVVLLPSCPGAPGSPGEKGAPGPQGPPGPPGKMGPKGEPGPRNCRELLSQGATLSGWYHLCLPEGRALPVFCDMDTEGGGWLVFQRRQDGSVDFFRSWSSYRAGFGNQESEFWLGNENLHQLTLQGNWELRVELEDFNGNRTFAHYATFRLLGEVDHYQLALGKFSEGTAGDSLSLHSGRPFTTYDADHDSSNSNCAVIVHGAWWYASCYRSNLNGRYAVSEAAAHKYGIDWASGRGVGHPYRRVRMMLR

SEQ ID NO: 8585 - RNA, 867 nt, synthetic construct
  misc_feature 1..867: note = Fibrinogen__Homo_sapiens__AAQ88650
  source 1..867: mol_type = other RNA
atggatctactgtggatcctgccctccctgtggcttctcctgcttggggggcctgcctgcctgaagacccaggaacaccccagctgcccaggacccagggaactggaagccagcaaagttgtcctcctgcccagttgtcccggagctccaggaagtcctggggagaagggagccccaggtcctcaagggccacctggaccaccaggcaagatgggccccaagggtgagccaggccccagaaactgccgggagctgttgagccagggcgccaccttgagcggctggtaccatctgtgcctacctgagggcagggccctcccagtcttttgtgacatggacaccgaggggggcggctggctggtgtttcagaggcgccaggatggttctgtggatttcttccgctcttggtcctcctacagagcaggttttgggaaccaagagtctgaattctggctgggaaatgagaatttgcaccagcttactctccagggtaactgggagctgcgggtagagctggaagactttaatggtaaccgtactttcgcccactatgcgaccttccgcctcctcggtgaggtagaccactaccagctggcactgggcaagttctcagagggcactgcaggggattccctgagcctccacagtgggaggccctttaccacctatgacgctgaccacgattcaagcaacagcaactgtgcagtgattgtccacggtgcctggtggtatgcatcctgttaccgatcaaatctcaatggtcgctatgcagtgtctgaggctgccgcccacaaatatggcattgactgggcctcaggccgtggtgtgggccacccctaccgcagggttcggatgatgcttcgatag

SEQ ID NO: 8586 - RNA, 867 nt, synthetic construct
  misc_feature 1..867: note = derived and/or modified sequence opt1 fromFibrinogen__Homo_sapiens__AAQ88650
  source 1..867: mol_type = other RNA
atggacctgctctggatcctgcccagcctgtggctcctgctgctcggcgggccggcctgcctgaagacccaggagcacccctcctgccccggcccccgcgagctggaggccagcaaggtggtcctcctgccgtcctgccccggggcgcccggcagccccggggagaagggcgccccgggcccccaggggccgcccggcccgcccgggaagatgggccccaagggggagcccggcccccggaactgccgcgagctgctctcccagggcgccaccctgagcgggtggtaccacctgtgcctccccgagggccgggccctgcccgtgttctgcgacatggacacggagggcgggggctggctggtgttccagcgccggcaggacgggtccgtcgacttcttccgcagctggtccagctaccgggccggcttcgggaaccaggagtccgagttctggctcggcaacgagaacctgcaccagctgaccctccaggggaactgggagctgcgcgtggagctggaggacttcaacggcaaccggaccttcgcgcactacgccaccttccgcctcctgggcgaggtggaccactaccagctggccctcgggaagttcagcgagggcacggccggggactccctgagcctgcactccggccggcccttcaccacctacgacgcggaccacgacagctccaacagcaactgcgccgtcatcgtgcacggggcctggtggtacgcctcctgctaccgcagcaacctcaacggccggtacgccgtgagcgaggcggccgcccacaagtacggcatcgactgggcctccgggcgcggcgtcgggcacccgtaccggcgcgtgcggatgatgctgcgctga

SEQ ID NO: 8587 - RNA, 867 nt, synthetic construct
  misc_feature 1..867: note = derived and/or modified sequence opt2 fromFibrinogen__Homo_sapiens__AAQ88650
  source 1..867: mol_type = other RNA
atggacctcctctggatcctcccctccctctggctcctcctcctcggcggccccgcctgcctcaagacccaggagcacccctcctgccccggcccccgcgagctcgaggcctccaaggtcgtcctcctcccctcctgccccggcgcccccggctcccccggcgagaagggcgcccccggcccccagggcccccccggcccccccggcaagatgggccccaagggcgagcccggcccccgcaactgccgcgagctcctctcccagggcgccaccctctccggctggtaccacctctgcctccccgagggccgcgccctccccgtcttctgcgacatggacaccgagggcggcggctggctcgtcttccagcgccgccaggacggctccgtcgacttcttccgctcctggtcctcctaccgcgccggcttcggcaaccaggagtccgagttctggctcggcaacgagaacctccaccagctcaccctccagggcaactgggagctccgcgtcgagctcgaggacttcaacggcaaccgcaccttcgcccactacgccaccttccgcctcctcggcgaggtcgaccactaccagctcgccctcggcaagttctccgagggcaccgccggcgactccctctccctccactccggccgccccttcaccacctacgacgccgaccacgactcctccaactccaactgcgccgtcatcgtccacggcgcctggtggtacgcctcctgctaccgctccaacctcaacggccgctacgccgtctccgaggccgccgcccacaagtacggcatcgactgggcctccggccgcggcgtcggccacccctaccgccgcgtccgcatgatgctccgctga

SEQ ID NO: 8588 - RNA, 867 nt, synthetic construct
  misc_feature 1..867: note = derived and/or modified sequence opt3 fromFibrinogen__Homo_sapiens__AAQ88650
  source 1..867: mol_type = other RNA
atggacctgctctggatccttcccagcctgtggttgttactgctaggcgggcctgcctgcctcaagacccaggagcacccatcctgtccgggacccagagaactggaggcttctaaagtggtccttctgccttcatgcccaggtgcacccggcagtcctggggaaaagggagccccaggcccccaaggtcctccagggccgcccggaaaaatgggccctaagggcgagccagggcccaggaactgtcgggaattgctcagccagggagcgacactgtccggttggtaccatctgtgcctccctgagggccgcgctttaccagttttctgtgatatggacactgaagggggaggctggctggtgtttcagcgacgtcaggatggttctgtagacttctttagatcgtggtcaagctatagggccgggttcggaaatcaagagagtgagttttggcttggcaacgaaaatttgcaccagctgacgctacagggcaactgggagctccgggtggagctggaagatttcaatgggaaccgcacctttgcacattacgccacattcagacttctgggagaggtcgaccactatcagttggctctcggtaaattttccgaaggcactgcaggggattctctgagcttacattccggaaggcccttcaccacatacgacgccgatcacgactcaagtaatagcaactgcgctgtgattgttcacggcgcctggtggtatgcgtcttgttaccggtccaatctgaacggtcgctatgcagtgtcagaggccgctgcccataagtacgggatagattgggcaagcggccgaggagtcggccacccgtacagaagggtgcggatgatgctccgttga

SEQ ID NO: 8589 - RNA, 867 nt, synthetic construct
  misc_feature 1..867: note = derived and/or modified sequence opt4 fromFibrinogen__Homo_sapiens__AAQ88650
  source 1..867: mol_type = other RNA
atggacctgctgtggatcctgcccagcctgtggctgctgctgctgggcggccccgcctgcctgaagacccaggagcaccccagctgccccggccccagagagctggaggccagcaaggtggtgctgctgcccagctgccccggcgcccccggcagccccggcgagaagggcgcccccggcccccagggcccccccggcccccccggcaagatgggccccaagggcgagcccggccccagaaactgcagagagctgctgagccagggcgccaccctgagcggctggtaccacctgtgcctgcccgagggcagagccctgcccgtgttctgcgacatggacaccgagggcggcggctggctggtgttccagagaagacaggacggcagcgtggacttcttcagaagctggagcagctacagagccggcttcggcaaccaggagagcgagttctggctgggcaacgagaacctgcaccagctgaccctgcagggcaactgggagctgagagtggagctggaggacttcaacggcaacagaaccttcgcccactacgccaccttcagactgctgggcgaggtggaccactaccagctggccctgggcaagttcagcgagggcaccgccggcgacagcctgagcctgcacagcggcagacccttcaccacctacgacgccgaccacgacagcagcaacagcaactgcgccgtgatcgtgcacggcgcctggtggtacgccagctgctacagaagcaacctgaacggcagatacgccgtgagcgaggccgccgcccacaagtacggcatcgactgggccagcggcagaggcgtgggccacccctacagaagagtgagaatgatgctgagatga

SEQ ID NO: 8590 - RNA, 867 nt, synthetic construct
  misc_feature 1..867: note = derived and/or modified sequence opt5 fromFibrinogen__Homo_sapiens__AAQ88650
  source 1..867: mol_type = other RNA
atggacctgctctggatcctgcccagcctttggctgctcctgcttggcgggcctgcctgcctgaagacccaggagcacccgtcctgtcccggacctagagaactcgaggcttctaaagtggtcctgctgcccagctgccctggcgcccccgggtcccctggagaaaagggcgcgccggggccccaaggacctcccggccctcccggcaaaatggggccgaagggagagcctggcccccggaactgtcgcgaactcctgtctcagggggctacacttagcggatggtaccatctgtgcctccctgagggcagagccctgcccgttttctgtgatatggacacggaagggggaggctggcttgtgtttcagcggcgccaggatggctccgtggacttctttagatcttggagctcctatcgggccgggttcggaaatcaagagagcgagttttggctgggcaacgaaaatctccaccagctgaccctgcaggggaactgggagctccgcgtcgagctggaagatttcaatggaaacagaacatttgctcattacgccaccttccggcttctgggcgaggtggaccactatcagctcgctctggggaaattttctgaaggaacagccggcgattcccttagcctgcattctggccgccccttcaccacatacgacgcggatcacgactccagcaattctaactgcgccgttattgtgcacggggcttggtggtatgcctcctgttacagaagcaatctcaacggacggtatgctgtctccgaggccgcggcccataagtacggcatcgattgggcttctgggcgcggagtgggccacccttacagacgggttcgcatgatgctgagatga

SEQ ID NO: 8591 - protein, 211 aa, synthetic construct [sequence omitted]

SEQ ID NO: 8592 - RNA, 636 nt, synthetic construct
  misc_feature 1..636: note = Fibrinogen__Homo_sapiens__CAA50740
  source 1..636: mol_type = other RNA
atgcagaacggagccggtgcctccaggaccagcaccatcttcctcaacggcaaccgcgagcggcccctgaacgtgttttgcgacatggagactgatgggggcggctggctggtgttccagcgccgcatggatggacagacagacttctggagggactgggaggactatgcccatggttttgggaacatctctggagagttctggctgggcaatgaggccctgcacagcctgacacaggcaggtgactactccatccgcgtggacctgcgggctggggacgaggctgtgttcgcccagtacgactccttccacgtagactcggctgcggagtactaccgcctccacttggagggctaccacggcaccgcaggggactccatgagctaccacagcggcagtgtcttctctgcccgtgatcgggaccccaacagcttgctcatctcctgcgctgtctcctaccgaggggcctggtggtacaggaactgccactacgccaacctcaacgggctctacgggagcacagtggaccatcagggagtgagctggtaccactggaagggcttcgagttctcggtgcccttcacggaaatgaagctgagaccaagaaactttcgctccccagcggggggaggctga

SEQ ID NO: 8593 - RNA, 636 nt, synthetic construct
  misc_feature 1..636: note = derived and/or modified sequence opt1 fromFibrinogen__Homo_sapiens__CAA50740
  source 1..636: mol_type = other RNA
atgcagaacggcgccggggccagccgcacctccaccatcttcctgaacggcaaccgggagcgccccctcaacgtgttctgcgacatggagacggacgggggcgggtggctggtcttccagcggcgcatggacggccagaccgacttctggcgggactgggaggactacgcgcacggcttcgggaacatcagcggcgagttctggctggggaacgaggccctccactccctgacccaggccggcgactacagcatccgcgtggacctgcgggccggggacgaggccgtgttcgcgcagtacgactccttccacgtcgacagcgccgccgagtactaccgcctccacctggagggctaccacggcaccgccggggactccatgagctaccactccggcagcgtgttctccgcgcgggaccgcgacccgaacagcctgctcatctcctgcgccgtgagctaccgcggggcctggtggtaccggaactgccactacgccaacctgaacggcctgtacggctccacggtcgaccaccagggggtgagctggtaccactggaagggcttcgagttctccgtgcccttcaccgagatgaagctccggccccgcaacttccggagccccgccgggggcgggtga

SEQ ID NO: 8594 - RNA, 636 nt, synthetic construct
  misc_feature 1..636: note = derived and/or modified sequence opt2 fromFibrinogen__Homo_sapiens__CAA50740
  source 1..636: mol_type = other RNA
atgcagaacggcgccggcgcctcccgcacctccaccatcttcctcaacggcaaccgcgagcgccccctcaacgtcttctgcgacatggagaccgacggcggcggctggctcgtcttccagcgccgcatggacggccagaccgacttctggcgcgactgggaggactacgcccacggcttcggcaacatctccggcgagttctggctcggcaacgaggccctccactccctcacccaggccggcgactactccatccgcgtcgacctccgcgccggcgacgaggccgtcttcgcccagtacgactccttccacgtcgactccgccgccgagtactaccgcctccacctcgagggctaccacggcaccgccggcgactccatgtcctaccactccggctccgtcttctccgcccgcgaccgcgaccccaactccctcctcatctcctgcgccgtctcctaccgcggcgcctggtggtaccgcaactgccactacgccaacctcaacggcctctacggctccaccgtcgaccaccagggcgtctcctggtaccactggaagggcttcgagttctccgtccccttcaccgagatgaagctccgcccccgcaacttccgctcccccgccggcggcggctga

SEQ ID NO: 8595 - RNA, 636 nt, synthetic construct
  misc_feature 1..636: note = derived and/or modified sequence opt3 fromFibrinogen__Homo_sapiens__CAA50740
  source 1..636: mol_type = other RNA
atgcagaacggcgccggggctagcagaacctccacaatcttcctgaatggaaacagggagcggcccctcaatgtgttttgcgacatggaaactgatggtggcgggtggcttgtcttccaacgccgaatggacggacagacggatttttggcgtgactgggaggattacgcacacggcttcggtaacatttctggggaattttggctgggaaatgaggccttgcattcattaacccaggcgggcgactatagtataagagttgatctgagggctggcgacgaagccgtgttcgcacagtacgatagctttcacgtagactccgccgctgagtattaccggctacatctcgaggggtatcacggaacagcaggggattctatgtcgtaccattcaggcagcgtgttcagtgcccgcgacagagatcctaactccctgcttatctcttgtgctgtcagctataggggtgcctggtggtaccggaattgccactacgcgaacctgaatggattgtatggctccactgtggaccaccaaggtgtttcatggtaccattggaaggggtttgagttcagtgtgccatttaccgaaatgaaactccgcccgcgaaacttcagaagccccgcaggaggcggctga

SEQ ID NO: 8596 - RNA, 636 nt, synthetic construct
  misc_feature 1..636: note = derived and/or modified sequence opt4 fromFibrinogen__Homo_sapiens__CAA50740
  source 1..636: mol_type = other RNA
atgcagaacggcgccggcgccagcagaaccagcaccatcttcctgaacggcaacagagagagacccctgaacgtgttctgcgacatggagaccgacggcggcggctggctggtgttccagagaagaatggacggccagaccgacttctggagagactgggaggactacgcccacggcttcggcaacatcagcggcgagttctggctgggcaacgaggccctgcacagcctgacccaggccggcgactacagcatcagagtggacctgagagccggcgacgaggccgtgttcgcccagtacgacagcttccacgtggacagcgccgccgagtactacagactgcacctggagggctaccacggcaccgccggcgacagcatgagctaccacagcggcagcgtgttcagcgccagagacagagaccccaacagcctgctgatcagctgcgccgtgagctacagaggcgcctggtggtacagaaactgccactacgccaacctgaacggcctgtacggcagcaccgtggaccaccagggcgtgagctggtaccactggaagggcttcgagttcagcgtgcccttcaccgagatgaagctgagacccagaaacttcagaagccccgccggcggcggctga

SEQ ID NO: 8597 - RNA, 636 nt, synthetic construct
  misc_feature 1..636: note = derived and/or modified sequence opt5 fromFibrinogen__Homo_sapiens__CAA50740
  source 1..636: mol_type = other RNA
atgcagaacggcgccggggctagcagaacctccacaatcttcctgaatggaaaccgggagcgccccctcaatgtgttttgcgacatggaaacggatggcgggggatggctggtcttccaaagacggatggacggccagaccgatttttggcgcgactgggaggattacgcccacgggttcggaaacatttctggcgaattttggcttggcaatgaggcgctgcatagcctcacacaggctggggactattccatcagagttgatctgcgggccggagacgaagccgtgttcgctcagtacgattcttttcacgtggacagcgccgctgagtattaccgccttcatctggagggctatcacgggaccgccggagattccatgtcttaccatagcggctccgtcttcagcgcgagagaccgggatcctaactctctcctgatttcctgtgccgtgagctatcgcggggcttggtggtacagaaattgccactacgccaacctgaatggactctatggctctacagttgaccaccaaggcgtgtcctggtaccattggaaggggtttgagttcagcgtcccgtttaccgaaatgaaactgcggccccgcaacttcagatctcctgctggaggcgggtga

SEQ ID NO: 8598 - protein, 508 aa, synthetic construct
  REGION 1..508: note = FOS__Homo_sapiens__A0A024RD16
MLPTQAGAAAALGRGSALGGSLNRTPTGRPGGGGGTRGANGGRVPGNGAGLGPGRLEREAAAAAATTPAPTAGALYSGSEGDSESGEEEELGAERRGLKRSLSEMEIGMVVGGPEASAAATGGYGPVSGAVSGAKPGKKTRGRVKIKMEFIDNKLRRYTTFSKRKTGIMKKAYELSTLTGTQVLLLVASETGHVYTFATRKLQPMITSETGKALIQTCLNSPDSPPRSDPTTDQRMSATGFEETDLTYQVSESDSSGETKDTLKPAFTVTNLPGTTSTIQTAPSTSTTMQVSSGPSFPITNYLAPVSASVSPSAVSSANGTVLKSTGSGPVSSGGLMQLPTSFTLMPGGAVAQQVPVQAIQVHQAPQQASPSRDSSTDLTQTSSSGTVTLPATIMTSSVPTTVGGHMMYPSPHAVMYAPTSGLGDGSLTVLNAFSQAPSTMQVSHSQVQEPGGVPQVFLTASSGTVQIPVSAVQLHQMAVIGQQAGSSSNLTELQVVNLDTAHSTKSE

SEQ ID NO: 8599 - RNA, 1527 nt, synthetic construct
  misc_feature 1..1527: note = FOS__Homo_sapiens__EAX04162
  source 1..1527: mol_type = other RNA
atgttaccgacccaagctggggccgcggcggctctgggccggggctcggccctggggggcagcctgaaccggaccccgacggggcggccgggcggcggcggcgggacacgcggggctaacgggggccgggtccccgggaatggcgcggggctcgggcccggccgcctggagcgggaggctgcggcagcggcggcaaccaccccggcgcccaccgcgggggccctctacagcggcagcgagggcgactcggagtcgggcgaggaggaggagctgggcgccgagcggcgcggcctgaagcggagcctgagcgagatggagatcggtatggtggtcggtgggcccgaggcgtcggcagcggccaccgggggctacgggccggtgagcggcgcggtgagcggggccaagccgggtaagaagacccggggccgcgtgaagatcaagatggagttcatcgacaacaagctgcggcgctacacgaccttcagcaagaggaagacgggcatcatgaagaaggcctatgagctgtccacgctgacagggacacaggtgctgttgctggtggccagtgagacaggccatgtgtatacctttgccacccgaaaactgcagcccatgatcaccagtgagaccggcaaggcactgattcagacctgcctcaactcgccagactctccaccccgttcagaccccacaacagaccagagaatgagtgccactggctttgaagagacagatctcacctaccaggtgtcggagtctgacagcagtggggagaccaaggacacactgaagccggcgttcacagtcaccaacctgccgggtacaacctccaccatccaaacagcacctagcacctctaccaccatgcaagtcagcagcggcccctcctttcccatcaccaactacctggcaccagtgtctgctagtgtcagccccagtgctgtcagcagtgccaatgggactgtgctgaagagtacaggcagcggccctgtctcctctgggggccttatgcagctgcctaccagcttcaccctcatgcctggtggggcagtggcccagcaggtcccagtgcaggccattcaagtgcaccaggccccacagcaagcgtctccctcccgtgacagcagcacagacctcacgcagacctcctccagcgggacagtgacgctgcccgccaccatcatgacgtcatccgtgcccacaactgtgggtggccacatgatgtaccctagcccgcatgcggtgatgtatgcccccacctcgggcctgggtgatggcagcctcaccgtgctgaatgccttctcccaggcaccatccaccatgcaggtgtcacacagccaggtccaggagccaggtggcgtcccccaggtgttcctgacagcatcatctgggacagtgcagatccctgtttcagcagttcagctccaccagatggctgtgatagggcagcaggccgggagcagcagcaacctcaccgagctacaggtggtgaacctggacaccgcccacagcaccaagagtgaatga

SEQ ID NO: 8600 - RNA, 1527 nt, synthetic construct
  misc_feature 1..1527: note = derived and/or modified sequence opt1 fromFOS__Homo_sapiens__EAX04162
  source 1..1527: mol_type = other RNA
atgctgcccacccaggccggcgccgcggccgccctggggcgcggcagcgccctcgggggctccctgaaccggaccccgacggggcgccccggcggcgggggcgggacccggggcgccaacgggggccgcgtgcccggcaacggggcgggcctggggcccggccggctggagcgcgaggccgccgccgcggccgccaccaccccggcccccacggccggcgcgctgtacagcgggtccgagggcgacagcgagtccggggaggaggaggagctcggcgccgagcggcgcgggctgaagcggagcctgtccgagatggagatcggcatggtcgtgggcgggcccgaggccagcgccgccgcgaccggcgggtacggccccgtgtccggggccgtcagcggcgccaagccgggcaagaagacccgcgggcgggtgaagatcaagatggagttcatcgacaacaagctccgccggtacaccacgttctccaagcgcaagaccggcatcatgaagaaggcctacgagctgagcaccctgaccgggacccaggtgctcctgctggtcgcctccgagacgggccacgtgtacaccttcgcgacccggaagctccagcccatgatcacgagcgagaccgggaaggccctgatccagacctgcctgaactcccccgacagcccgccccgctccgaccccaccacggaccagcggatgagcgccaccggcttcgaggagaccgacctcacctaccaggtgtccgagagcgacagctccggcgagacgaaggacaccctgaagcccgccttcaccgtcaccaacctgcccgggacgaccagcaccatccagaccgccccgtccacgagcaccaccatgcaggtctccagcggcccctccttccccatcaccaactacctcgcgcccgtgagcgcctccgtgagcccgtccgccgtgagctccgccaacgggacggtgctgaagtccaccggctccggccccgtcagctccgggggcctgatgcagctccccaccagcttcaccctgatgcccgggggcgcggtggcccagcaggtcccggtgcaggccatccaggtgcaccaggcgccccagcaggcctcccccagccgcgacagctccaccgacctgacgcagaccagctccagcgggaccgtgaccctccccgccacgatcatgacctccagcgtcccgaccaccgtgggcggccacatgatgtaccccagcccccacgccgtgatgtacgccccgacgagcgggctgggcgacgggtccctgaccgtcctcaacgccttcagccaggccccctccaccatgcaggtcagccactcccaggtgcaggagcccggcggggtgccccaggtgttcctgaccgcgagctccggcacggtccagatcccggtgagcgccgtgcagctgcaccagatggccgtcatcggccagcaggccgggtccagcagcaacctcaccgagctccaggtggtgaacctggacaccgcccactccaccaagagcgagtga

SEQ ID NO: 8601 - RNA, 1527 nt, synthetic construct
  misc_feature 1..1527: note = derived and/or modified sequence opt2 fromFOS__Homo_sapiens__EAX04162
  source 1..1527: mol_type = other RNA
atgctccccacccaggccggcgccgccgccgccctcggccgcggctccgccctcggcggctccctcaaccgcacccccaccggccgccccggcggcggcggcggcacccgcggcgccaacggcggccgcgtccccggcaacggcgccggcctcggccccggccgcctcgagcgcgaggccgccgccgccgccgccaccacccccgcccccaccgccggcgccctctactccggctccgagggcgactccgagtccggcgaggaggaggagctcggcgccgagcgccgcggcctcaagcgctccctctccgagatggagatcggcatggtcgtcggcggccccgaggcctccgccgccgccaccggcggctacggccccgtctccggcgccgtctccggcgccaagcccggcaagaagacccgcggccgcgtcaagatcaagatggagttcatcgacaacaagctccgccgctacaccaccttctccaagcgcaagaccggcatcatgaagaaggcctacgagctctccaccctcaccggcacccaggtcctcctcctcgtcgcctccgagaccggccacgtctacaccttcgccacccgcaagctccagcccatgatcacctccgagaccggcaaggccctcatccagacctgcctcaactcccccgactcccccccccgctccgaccccaccaccgaccagcgcatgtccgccaccggcttcgaggagaccgacctcacctaccaggtctccgagtccgactcctccggcgagaccaaggacaccctcaagcccgccttcaccgtcaccaacctccccggcaccacctccaccatccagaccgccccctccacctccaccaccatgcaggtctcctccggcccctccttccccatcaccaactacctcgcccccgtctccgcctccgtctccccctccgccgtctcctccgccaacggcaccgtcctcaagtccaccggctccggccccgtctcctccggcggcctcatgcagctccccacctccttcaccctcatgcccggcggcgccgtcgcccagcaggtccccgtccaggccatccaggtccaccaggccccccagcaggcctccccctcccgcgactcctccaccgacctcacccagacctcctcctccggcaccgtcaccctccccgccaccatcatgacctcctccgtccccaccaccgtcggcggccacatgatgtacccctccccccacgccgtcatgtacgcccccacctccggcctcggcgacggctccctcaccgtcctcaacgccttctcccaggccccctccaccatgcaggtctcccactcccaggtccaggagcccggcggcgtcccccaggtcttcctcaccgcctcctccggcaccgtccagatccccgtctccgccgtccagctccaccagatggccgtcatcggccagcaggccggctcctcctccaacctcaccgagctccaggtcgtcaacctcgacaccgcccactccaccaagtccgagtga

SEQ ID NO: 8602 - RNA, 1527 nt, synthetic construct
  misc_feature 1..1527: note = derived and/or modified sequence opt3 fromFOS__Homo_sapiens__EAX04162
  source 1..1527: mol_type = other RNA
atgctgcccacccaggccggcgctgcagccgcgctcgggagaggaagcgctcttggtggctccctgaacaggacacctactgggcggccaggaggcggtgggggaacgcgcggcgccaatggcgggcgagtgccgggaaacggtgcaggcttggggcccggacgtttagagagagaagccgctgcagccgctgccaccactcctgcgccaactgcaggcgccctgtactctggttcagagggggacagtgaaagcggagaggaagaggagctaggcgctgaaaggcggggcctcaagcgctccctgtctgagatggaaatcgggatggtcgttggaggtcccgaggcctcggcagctgccaccggcgggtatggacctgtgtcaggcgcggtaagcggtgccaaaccagggaagaaaacaagaggcagggtgaagattaaaatggagttcatagataataaacttcggcgctacaccacttttagtaagcgaaaaacaggaatcatgaagaaagcatatgaactgtccaccttgacgggcactcaagtcctcctgctggtggcttctgagaccgggcacgtttacacattcgccactagaaagctccagcccatgattaccagcgaaacaggaaaggctttaatccagacctgcctgaactcccctgactcaccaccgaggagtgatcccacgactgaccagcggatgagcgccacaggttttgaggaaaccgatcttacttatcaagtgtctgagtccgactcaagcggcgagacaaaggataccttgaagcctgcattcacggtcaccaatctgccagggacaacaagtaccattcagacagccccctctacttccaccacaatgcaagtgagctcgggaccttcttttccaatcaccaactacctagctcccgtatccgcgtcagttagtccgagcgcagtgtcctctgccaatggcactgtcctcaaaagcacgggttcagggcctgtgagttccggcggactgatgcagcttcccacatctttcaccctgatgccaggcggggctgtggcccagcaggtccctgttcaggcaatacaggtgcatcaagctccccagcaggcctctccatcacgtgacagtagcactgatttgacccaaacatcctcttcgggaaccgtaactctccccgccacaatcatgacgagctccgtgcctaccactgtcggtggccacatgatgtatccatcaccgcatgcagtgatgtacgcgcccacaagtgggctgggagacggctctttaaccgttctgaacgcttttagccaggccccttccacaatgcaagtgtcacacagccaggtccaggaaccaggtggggtgccccaggtattcctcactgcatcttccggcaccgttcagattcctgtgagtgccgtccagcttcatcaaatggctgtgatcggacagcaggccggcagcagctccaatctgacggagttgcaggtcgtgaacctagataccgcacactcaacaaagagtgaatga

SEQ ID NO: 8603 - RNA, 1527 nt, synthetic construct
  misc_feature 1..1527: note = derived and/or modified sequence opt4 fromFOS__Homo_sapiens__EAX04162
  source 1..1527: mol_type = other RNA
atgctgcccacccaggccggcgccgccgccgccctgggcagaggcagcgccctgggcggcagcctgaacagaacccccaccggcagacccggcggcggcggcggcaccagaggcgccaacggcggcagagtgcccggcaacggcgccggcctgggccccggcagactggagagagaggccgccgccgccgccgccaccacccccgcccccaccgccggcgccctgtacagcggcagcgagggcgacagcgagagcggcgaggaggaggagctgggcgccgagagaagaggcctgaagagaagcctgagcgagatggagatcggcatggtggtgggcggccccgaggccagcgccgccgccaccggcggctacggccccgtgagcggcgccgtgagcggcgccaagcccggcaagaagaccagaggcagagtgaagatcaagatggagttcatcgacaacaagctgagaagatacaccaccttcagcaagagaaagaccggcatcatgaagaaggcctacgagctgagcaccctgaccggcacccaggtgctgctgctggtggccagcgagaccggccacgtgtacaccttcgccaccagaaagctgcagcccatgatcaccagcgagaccggcaaggccctgatccagacctgcctgaacagccccgacagcccccccagaagcgaccccaccaccgaccagagaatgagcgccaccggcttcgaggagaccgacctgacctaccaggtgagcgagagcgacagcagcggcgagaccaaggacaccctgaagcccgccttcaccgtgaccaacctgcccggcaccaccagcaccatccagaccgcccccagcaccagcaccaccatgcaggtgagcagcggccccagcttccccatcaccaactacctggcccccgtgagcgccagcgtgagccccagcgccgtgagcagcgccaacggcaccgtgctgaagagcaccggcagcggccccgtgagcagcggcggcctgatgcagctgcccaccagcttcaccctgatgcccggcggcgccgtggcccagcaggtgcccgtgcaggccatccaggtgcaccaggccccccagcaggccagccccagcagagacagcagcaccgacctgacccagaccagcagcagcggcaccgtgaccctgcccgccaccatcatgaccagcagcgtgcccaccaccgtgggcggccacatgatgtaccccagcccccacgccgtgatgtacgcccccaccagcggcctgggcgacggcagcctgaccgtgctgaacgccttcagccaggcccccagcaccatgcaggtgagccacagccaggtgcaggagcccggcggcgtgccccaggtgttcctgaccgccagcagcggcaccgtgcagatccccgtgagcgccgtgcagctgcaccagatggccgtgatcggccagcaggccggcagcagcagcaacctgaccgagctgcaggtggtgaacctggacaccgcccacagcaccaagagcgagtga

SEQ ID NO: 8604 - RNA, 1527 nt, synthetic construct
  misc_feature 1..1527: note = derived and/or modified sequence opt5 fromFOS__Homo_sapiens__EAX04162
  source 1..1527: mol_type = other RNA
atgctgcccacccaggccggcgctgccgcggctctcgggagaggaagcgccctgggcgggtcccttaaccggacacctacgggacgcccgggcgggggaggcggcaccagaggggccaatggaggccgggtgcccgggaacggagctggcctggggcctggacgcctcgagagagaagccgctgccgcggccgctacaacccccgcccctacagctggcgccctgtactctggcagcgagggggactccgaatctggagaggaagaggagcttggcgcggaacggcgcgggctgaagagaagcctctccgagatggaaatcggaatggtcgttggcgggcccgaggcctctgctgccgctaccggaggctatggccctgtgagcggggccgtgtccggagccaaaccgggcaagaaaacacgggggcgcgtcaagattaaaatggagttcatcgataataagctgagacggtacaccacgtttagcaagcgcaaaaccggaattatgaagaaggcttatgaactgtctacactcaccggcacacaagtgctgcttctggttgcgtccgagaccgggcacgtgtacacgttcgccacaagaaaactccagcccatgatcaccagcgaaacaggcaaagctctgattcagacctgccttaactctcctgacagcccgcctcggagcgatcccaccacagaccagcgcatgtctgccacgggatttgaggaaaccgatctgacatatcaagtctccgagagcgactcctctggcgagaccaaggatacactcaagccggccttcaccgtgacgaatctgcctgggacaaccagcaccatccagacagctccctccaccagcacaacgatgcaggtttcttccggacctagctttcccatcaccaactacctggcccccgtgtctgcgagcgtctccccttctgctgtgagctccgccaatggcacagtgctcaaaagcaccgggtctggaccggtctccagcggcgggctgatgcagcttcccacatctttcaccctgatgcctggcggagccgttgctcaacaggtgcccgtgcaggccattcaggtccatcaagctcctcagcaggcctcccccagcagagactcctctacggatctcacccaaacaagctcctctggcaccgtgacactgccggcgaccatcatgacgagctccgttcctacaaccgtcgggggacacatgatgtatcccagccctcatgccgtgatgtacgctcccacatctggccttggggacggatccctgaccgtgctcaacgcctttagccaggctccttctaccatgcaggtttcccacagccaggtgcaagaacccggcggggtcccccaggtgttcctgacagcctctagcggcacggtccagattcctgtgtccgcggttcagctgcatcaaatggccgtgatcggacagcaggctggctcctcttccaatctcaccgagctgcaggtcgtgaaccttgatacagcccacagcaccaagtccgaatga

SEQ ID NO: 8605 - protein, 483 aa, synthetic construct
  REGION 1..483: note = GSK3A__Homo_sapiens__P49840
MSGGGPSGGGPGGSGRARTSSFAEPGGGGGGGGGGPGGSASGPGGTGGGKASVGAMGGGVGASSSGGGPGGSGGGGSGGPGAGTSFPPPGVKLGRDSGKVTTVVATLGQGPERSQEVAYTDIKVIGNGSFGVVYQARLAETRELVAIKKVLQDKRFKNRELQIMRKLDHCNIVRLRYFFYSSGEKKDELYLNLVLEYVPETVYRVARHFTKAKLTIPILYVKVYMYQLFRSLAYIHSQGVCHRDIKPQNLLVDPDTAVLKLCDFGSAKQLVRGEPNVSYICSRYYRAPELIFGATDYTSSIDVWSAGCVLAELLLGQPIFPGDSGVDQLVEIIKVLGTPTREQIREMNPNYTEFKFPQIKAHPWTKVFKSRTPPEAIALCSSLLEYTPSSRLSPLEACAHSFFDELRCLGTQLPNNRPLPPLFNFSAGELSIQPSLNAILIPPHLRSPAGTTTLTPSSQALTETPTSSDWQSTDATPTLTNSS

SEQ ID NO: 8606 - RNA, 1452 nt, synthetic construct
  misc_feature 1..1452: note = GSK3A__Homo_sapiens__CCDS12599.1
  source 1..1452: mol_type = other RNA
atgagcggcggcgggccttcgggaggcggccctgggggctcgggcagggcgcggactagctcgttcgcggagcccggcggcggaggcggaggaggcggcggcggccccggaggctcggcctccggcccaggcggcaccggcggcggaaaggcatctgtcggggccatgggtgggggcgtcggggcctcgagctccgggggtggacccggcggcagcggcggaggaggcagcggaggccccggcgcaggcactagcttcccgccgcccggggtgaagctgggccgtgacagcgggaaggtgaccacagtcgtagccactctaggccaaggcccagagcgctcccaagaagtggcttacacggacatcaaagtgattggcaatggctcatttggggtcgtgtaccaggcacggctggcagagaccagggaactagtcgccatcaagaaggttctccaggacaagaggttcaagaaccgagagctgcagatcatgcgtaagctggaccactgcaatattgtgaggctgagatactttttctactccagtggcgagaagaaagacgagctttacctaaatctggtgctggaatatgtgcccgagacagtgtaccgggtggcccgccacttcaccaaggccaagttgaccatccctatcctctatgtcaaggtgtacatgtaccagctcttccgcagcttggcctacatccactcccagggcgtgtgtcaccgcgacatcaagccccagaacctgctggtggaccctgacactgctgtcctcaagctctgcgattttggcagtgcaaagcagttggtccgaggggagcccaatgtctcctacatctgttctcgctactaccgggccccagagctcatctttggagccactgattacacctcatccatcgatgtttggtcagctggctgtgtactggcagagctcctcttgggccagcccatcttccctggggacagtggggtggaccagctggtggagatcatcaaggtgctgggaacaccaacccgggaacaaatccgagagatgaaccccaactacacggagttcaagttccctcagattaaagctcacccctggacaaaggtgttcaaatctcgaacgccgccagaggccatcgcgctctgctctagcctgctggagtacaccccatcctcaaggctctccccactagaggcctgtgcgcacagcttctttgatgaactgcgatgtctgggaacccagctgcctaacaaccgcccacttccccctctcttcaacttcagtgctggtgaactctccatccaaccgtctctcaacgccattctcatccctcctcacttgaggtccccagcgggcactaccaccctcaccccgtcctcacaagctttaactgagactccgaccagctcagactggcagtcgaccgatgccacacctaccctcactaactcctcctga

SEQ ID NO: 8607 - RNA, 1452 nt, synthetic construct
  misc_feature 1..1452: note = derived and/or modified sequence opt1 fromGSK3A__Homo_sapiens__CCDS12599.1
  source 1..1452: mol_type = other RNA
atgagcggcgggggcccctccgggggcgggccgggcggcagcgggcgcgcccggacctccagcttcgccgagcccggcgggggcgggggcggcgggggcgggggccccggcgggtccgcgagcggccccgggggcaccgggggcggcaaggcctccgtgggggccatgggcgggggcgtcggggccagctccagcggcggcgggccgggcgggtccggcgggggcggcagcgggggccccggggccggcacgtccttcccgccgcccggcgtgaagctggggcgcgacagcggcaaggtgaccaccgtcgtggcgaccctcgggcagggccccgagcggtcccaggaggtggcctacacggacatcaaggtcatcgggaacggcagcttcggcgtggtgtaccaggcccgcctggccgagacccgggagctggtcgcgatcaagaaggtgctccaggacaagcgcttcaagaaccgggagctgcagatcatgcgcaagctggaccactgcaacatcgtgcggctccgctacttcttctactccagcggggagaagaaggacgagctgtacctgaacctcgtcctggagtacgtgcccgagaccgtgtaccgggtcgcccgccacttcaccaaggccaagctgacgatccccatcctctacgtgaaggtgtacatgtaccagctgttccggtccctggcctacatccacagccagggcgtctgccaccgcgacatcaagccccagaacctcctggtggaccccgacaccgccgtgctgaagctctgcgacttcgggagcgcgaagcagctggtccggggcgagcccaacgtgtcctacatctgcagccgctactaccgggcccccgagctgatcttcggggccaccgactacacctccagcatcgacgtgtggtccgccggctgcgtcctcgccgagctgctgctcggccagccgatcttccccggggacagcggcgtggaccagctggtcgagatcatcaaggtgctggggacgcccacccgcgagcagatccgggagatgaaccccaactacaccgagttcaagttcccgcagatcaaggcgcacccctggaccaaggtgttcaagtcccgcacgccgcccgaggccatcgccctctgcagctccctgctggagtacacccccagctcccggctcagccccctggaggcctgcgcccactccttcttcgacgagctgcgctgcctcggcacccagctgcccaacaaccgccccctgccgcccctcttcaacttcagcgcgggggagctgtccatccagcccagcctgaacgccatcctcatcccgccccacctccggtcccccgccggcaccacgaccctgacccccagctcccaggccctgaccgagacgccgaccagcagcgactggcagtccaccgacgccacccccacgctgaccaacagctcctga

SEQ ID NO: 8608 - RNA, 1452 nt, synthetic construct
  misc_feature 1..1452: note = derived and/or modified sequence opt2 fromGSK3A__Homo_sapiens__CCDS12599.1
  source 1..1452: mol_type = other RNA
atgtccggcggcggcccctccggcggcggccccggcggctccggccgcgcccgcacctcctccttcgccgagcccggcggcggcggcggcggcggcggcggcggccccggcggctccgcctccggccccggcggcaccggcggcggcaaggcctccgtcggcgccatgggcggcggcgtcggcgcctcctcctccggcggcggccccggcggctccggcggcggcggctccggcggccccggcgccggcacctccttccccccccccggcgtcaagctcggccgcgactccggcaaggtcaccaccgtcgtcgccaccctcggccagggccccgagcgctcccaggaggtcgcctacaccgacatcaaggtcatcggcaacggctccttcggcgtcgtctaccaggcccgcctcgccgagacccgcgagctcgtcgccatcaagaaggtcctccaggacaagcgcttcaagaaccgcgagctccagatcatgcgcaagctcgaccactgcaacatcgtccgcctccgctacttcttctactcctccggcgagaagaaggacgagctctacctcaacctcgtcctcgagtacgtccccgagaccgtctaccgcgtcgcccgccacttcaccaaggccaagctcaccatccccatcctctacgtcaaggtctacatgtaccagctcttccgctccctcgcctacatccactcccagggcgtctgccaccgcgacatcaagccccagaacctcctcgtcgaccccgacaccgccgtcctcaagctctgcgacttcggctccgccaagcagctcgtccgcggcgagcccaacgtctcctacatctgctcccgctactaccgcgcccccgagctcatcttcggcgccaccgactacacctcctccatcgacgtctggtccgccggctgcgtcctcgccgagctcctcctcggccagcccatcttccccggcgactccggcgtcgaccagctcgtcgagatcatcaaggtcctcggcacccccacccgcgagcagatccgcgagatgaaccccaactacaccgagttcaagttcccccagatcaaggcccacccctggaccaaggtcttcaagtcccgcaccccccccgaggccatcgccctctgctcctccctcctcgagtacaccccctcctcccgcctctcccccctcgaggcctgcgcccactccttcttcgacgagctccgctgcctcggcacccagctccccaacaaccgccccctcccccccctcttcaacttctccgccggcgagctctccatccagccctccctcaacgccatcctcatccccccccacctccgctcccccgccggcaccaccaccctcaccccctcctcccaggccctcaccgagacccccacctcctccgactggcagtccaccgacgccacccccaccctcaccaactcctcctga

SEQ ID NO: 8609 - RNA, 1452 nt, synthetic construct
  misc_feature 1..1452: note = derived and/or modified sequence opt3 fromGSK3A__Homo_sapiens__CCDS12599.1
  source 1..1452: mol_type = other RNA
atgagcggcgggggaccctccggtggcgggcctggaggctctggtagagccaggacctcaagtttcgctgagccagggggaggcggcgggggaggtggcgggggaccgggcggtagcgcatccgggcccggaggcacaggcgggggaaaggcctctgtgggtgcgatgggcgggggagtcggcgcttcgtcaagcggtgggggccctggaggcagtgggggaggtggctccgggggaccaggcgccggtacttcttttccccctccaggggttaaactgggccgggacagcggaaaggtgacgaccgtagtggcaacactcggccaggggcccgaacgctcccaagaggtcgcctacactgatatcaaagtgattggaaacggttcattcggcgttgtgtatcaggctcgacttgcagaaacccgtgagctggtcgccataaagaaagtgttgcaggacaagagatttaagaatagggaattacagatcatgcggaaactggatcactgcaacattgtacgcctaagatacttcttttatagtagcggggagaagaaagacgagctctacctgaatcttgttctggaatatgtgcctgagacagtctacagggtggctcggcacttcaccaaggccaaattgactatcccaattctctatgtgaaggtctacatgtaccaactgtttcgctctctggcgtatatccactcccagggagtttgtcatcgagatataaagccgcagaacctcttagtggaccccgatacagcagtactgaaactttgcgacttcggctcagccaagcagttggtgagaggtgaacctaatgtcagctacatctgtagtaggtattaccgggctccagagctgatttttggggccaccgattatacgtcttccatcgacgtgtggagcgcaggctgcgttctagctgagctcctgcttggacaacccattttccctggcgattcgggggtggaccagctggtcgaaatcataaaagtgttgggaactccaacccgtgagcagattcgcgaaatgaaccccaattacacagagtttaagttcccgcagatcaaagcccacccttggactaaggtatttaaatctagaacacccccagaagcgattgccctctgttcctcactgttagagtatacccctagtagcaggctgtctcccctcgaggcatgcgctcattccttcttcgatgaacttcggtgtctgggcacccaattgccaaacaatcgacccctacctccactgtttaacttcagcgccggtgagctctcaatccagccgagtctgaatgctatccttattccccctcatctgcgctccccagccgggacgactacattgacccccagctctcaggcactcactgaaacacctacctcaagtgactggcaaagcacggacgccaccccaacactgactaactcctcttga

SEQ ID NO: 8610 - RNA, 1452 nt, synthetic construct
  misc_feature 1..1452: note = derived and/or modified sequence opt4 fromGSK3A__Homo_sapiens__CCDS12599.1
  source 1..1452: mol_type = other RNA
atgagcggcggcggccccagcggcggcggccccggcggcagcggcagagccagaaccagcagcttcgccgagcccggcggcggcggcggcggcggcggcggcggccccggcggcagcgccagcggccccggcggcaccggcggcggcaaggccagcgtgggcgccatgggcggcggcgtgggcgccagcagcagcggcggcggccccggcggcagcggcggcggcggcagcggcggccccggcgccggcaccagcttccccccccccggcgtgaagctgggcagagacagcggcaaggtgaccaccgtggtggccaccctgggccagggccccgagagaagccaggaggtggcctacaccgacatcaaggtgatcggcaacggcagcttcggcgtggtgtaccaggccagactggccgagaccagagagctggtggccatcaagaaggtgctgcaggacaagagattcaagaacagagagctgcagatcatgagaaagctggaccactgcaacatcgtgagactgagatacttcttctacagcagcggcgagaagaaggacgagctgtacctgaacctggtgctggagtacgtgcccgagaccgtgtacagagtggccagacacttcaccaaggccaagctgaccatccccatcctgtacgtgaaggtgtacatgtaccagctgttcagaagcctggcctacatccacagccagggcgtgtgccacagagacatcaagccccagaacctgctggtggaccccgacaccgccgtgctgaagctgtgcgacttcggcagcgccaagcagctggtgagaggcgagcccaacgtgagctacatctgcagcagatactacagagcccccgagctgatcttcggcgccaccgactacaccagcagcatcgacgtgtggagcgccggctgcgtgctggccgagctgctgctgggccagcccatcttccccggcgacagcggcgtggaccagctggtggagatcatcaaggtgctgggcacccccaccagagagcagatcagagagatgaaccccaactacaccgagttcaagttcccccagatcaaggcccacccctggaccaaggtgttcaagagcagaaccccccccgaggccatcgccctgtgcagcagcctgctggagtacacccccagcagcagactgagccccctggaggcctgcgcccacagcttcttcgacgagctgagatgcctgggcacccagctgcccaacaacagacccctgccccccctgttcaacttcagcgccggcgagctgagcatccagcccagcctgaacgccatcctgatccccccccacctgagaagccccgccggcaccaccaccctgacccccagcagccaggccctgaccgagacccccaccagcagcgactggcagagcaccgacgccacccccaccctgaccaacagcagctga

SEQ ID NO: 8611 - RNA, 1452 nt, synthetic construct
  misc_feature 1..1452: note = derived and/or modified sequence opt5 fromGSK3A__Homo_sapiens__CCDS12599.1
  source 1..1452: mol_type = other RNA
atgagcggcgggggaccctccggcgggggacctggcgggtctggacgcgcccggaccagctccttcgctgagccgggcggcgggggaggcgggggaggcgggggacccggcggctctgccagcgggcctggaggcacagggggaggcaaggcgtccgtgggggctatgggaggcggcgtcggggcctctagctccggaggcgggcccggaggcagcgggggcggaggctctgggggacctggcgccgggacgtcctttccccctccgggagttaaactgggccgcgacagcgggaaggtgaccacagtggtcgctaccctcggccagggacccgaaagatctcaagaggtggcctacacagatatcaaagttatcggcaacgggtccttcggagtggtctatcaggctcggctggccgaaacccgcgagcttgtggcgatcaagaaagttctgcaggacaagagatttaagaatcgggaactccagattatgcgcaaactggatcactgcaacatcgtgagacttcggtacttcttttatagctctggcgagaagaaagacgagctgtacctcaatctggtcctggaatatgtgcctgagacagtgtaccgcgtcgccagacatttcaccaaggctaaactcacgattcccatcctgtatgttaaggtgtacatgtaccaactttttcggtccctggcctatatccacagccagggggtgtgtcatcgcgatattaagcctcagaacctcctggtcgaccccgataccgctgtgcttaaactgtgcgacttcggatccgccaagcagctcgttagaggcgaaccgaatgtgtcttacatctgtagccggtattaccgcgcgcctgagctgatttttggggccacagattatacctccagcatcgacgtctggtctgctggctgcgtgctggccgagctcctgcttggacaacccattttccctggcgattccggggttgaccagctggtggaaatcattaaagtcctcggaacacccaccagagagcagatccgggaaatgaaccccaattacacggagtttaagttccctcagatcaaagctcacccgtggacaaaggtgtttaaaagcagaacaccccctgaagccattgccctgtgttctagccttctggagtataccccctcctctcgcctcagccctctggaggcttgcgcgcattccttcttcgatgaactgcggtgtctcggcacccaactgcccaacaatagaccgcttcctcccctgtttaacttcagcgccggggagctctctatccagccttccctgaatgctattcttattccccctcacctgagaagccccgccggaaccacaacgctcaccccgtcttcccaggccctgacagaaacccctacaagctccgactggcaatctaccgacgctacgcccacactgaccaacagctcctga

SEQ ID NO: 8612 - protein, 420 aa, synthetic construct; identical to SEQ ID NO: 393
  REGION 1..420: note = GSK3B__Homo_sapiens__P49841

SEQ ID NO: 8613 - RNA, 1263 nt, synthetic construct
  misc_feature 1..1263: note = GSK3B__Homo_sapiens__AAH12760
  source 1..1263: mol_type = other RNA
atgtcagggcggcccagaaccacctcctttgcggagagctgcaagccggtgcagcagccttcagcttttggcagcatgaaagttagcagagacaaggacggcagcaaggtgacaacagtggtggcaactcctgggcagggtccagacaggccacaagaagtcagctatacagacactaaagtgattggaaatggatcatttggtgtggtatatcaagccaaactttgtgattcaggagaactggtcgccatcaagaaagtattgcaggacaagagatttaagaatcgagagctccagatcatgagaaagctagatcactgtaacatagtccgattgcgttatttcttctactccagtggtgagaagaaagatgaggtctatcttaatctggtgctggactatgttccggaaacagtatacagagttgccagacactatagtcgagccaaacagacgctccctgtgatttatgtcaagttgtatatgtatcagctgttccgaagtttagcctatatccattcctttggaatctgccatcgggatattaaaccgcagaacctcttgttggatcctgatactgctgtattaaaactctgtgactttggaagtgcaaagcagctggtccgaggagaacccaatgtttcgtatatctgttctcggtactatagggcaccagagttgatctttggagccactgattatacctctagtatagatgtatggtctgctggctgtgtgttggctgagctgttactaggacaaccaatatttccaggggatagtggtgtggatcagttggtagaaataatcaaggtcctgggaactccaacaagggagcaaatcagagaaatgaacccaaactacacagaatttaaattccctcaaattaaggcacatccttggactaaggtcttccgaccccgaactccaccggaggcaattgcactgtgtagccgtctgctggagtatacaccaactgcccgactaacaccactggaagcttgtgcacattcattttttgatgaattacgggacccaaatgtcaaactaccaaatgggcgagacacacctgcactcttcaacttcaccactcaagaactgtcaagtaatccacctctggctaccatccttattcctcctcatgctcggattcaagcagctgcttcaacccccacaaatgccacagcagcgtcagatgctaatactggagaccgtggacagaccaataatgctgcttctgcatcagcttccaactccacctga

SEQ ID NO: 8614 - RNA, 1263 nt, synthetic construct
  misc_feature 1..1263: note = derived and/or modified sequence opt1 fromGSK3B__Homo_sapiens__AAH12760
  source 1..1263: mol_type = other RNA
atgagcggccgcccccggaccacctccttcgccgagagctgcaagcccgtgcagcagccctccgccttcgggagcatgaaggtctcccgcgacaaggacggcagcaaggtgacgaccgtggtcgcgacccccgggcagggccccgaccggccgcaggaggtgtcctacaccgacacgaaggtgatcgggaacggcagcttcggcgtcgtgtaccaggccaagctgtgcgactccggggagctcgtggccatcaagaaggtcctgcaggacaagcgcttcaagaaccgggagctgcagatcatgcgcaagctcgaccactgcaacatcgtgcggctgcgctacttcttctacagctccggcgagaagaaggacgaggtgtacctgaacctcgtcctggactacgtgcccgagaccgtgtaccgggtcgcccgccactacagccgggccaagcagaccctgcccgtgatctacgtgaagctctacatgtaccagctgttccgctccctggcgtacatccacagcttcgggatctgccaccgggacatcaagccccagaacctcctgctggacccggacaccgccgtcctcaagctgtgcgacttcggctccgccaagcagctggtgcgcggggagcccaacgtgagctacatctgctcccggtactaccgcgcccccgagctcatcttcggcgcgacggactacaccagctccatcgacgtctggagcgccggctgcgtgctggccgagctgctcctggggcagcccatcttcccgggcgacagcggggtggaccagctggtcgagatcatcaaggtgctcggcacccccacccgggagcagatccgcgagatgaaccccaactacacggagttcaagttcccccagatcaaggcccacccgtggaccaaggtcttccggccccgcaccccgcccgaggccatcgcgctgtgctcccggctgctcgagtacacccccacggcccgcctgacgcccctggaggcctgcgcccacagcttcttcgacgagctccgcgaccccaacgtgaagctgcccaacggccgggacaccccggccctgttcaacttcaccacccaggagctctccagcaacccgcccctggcgaccatcctgatcccgccccacgcccgcatccaggccgccgcctccacccccaccaacgcgacggccgccagcgacgccaacaccggggaccggggccagaccaacaacgccgcgtccgccagcgcctccaacagcacctga

SEQ ID NO: 8615 - RNA, 1263 nt, synthetic construct
  misc_feature 1..1263: note = derived and/or modified sequence opt2 fromGSK3B__Homo_sapiens__AAH12760
  source 1..1263: mol_type = other RNA
atgtccggccgcccccgcaccacctccttcgccgagtcctgcaagcccgtccagcagccctccgccttcggctccatgaaggtctcccgcgacaaggacggctccaaggtcaccaccgtcgtcgccacccccggccagggccccgaccgcccccaggaggtctcctacaccgacaccaaggtcatcggcaacggctccttcggcgtcgtctaccaggccaagctctgcgactccggcgagctcgtcgccatcaagaaggtcctccaggacaagcgcttcaagaaccgcgagctccagatcatgcgcaagctcgaccactgcaacatcgtccgcctccgctacttcttctactcctccggcgagaagaaggacgaggtctacctcaacctcgtcctcgactacgtccccgagaccgtctaccgcgtcgcccgccactactcccgcgccaagcagaccctccccgtcatctacgtcaagctctacatgtaccagctcttccgctccctcgcctacatccactccttcggcatctgccaccgcgacatcaagccccagaacctcctcctcgaccccgacaccgccgtcctcaagctctgcgacttcggctccgccaagcagctcgtccgcggcgagcccaacgtctcctacatctgctcccgctactaccgcgcccccgagctcatcttcggcgccaccgactacacctcctccatcgacgtctggtccgccggctgcgtcctcgccgagctcctcctcggccagcccatcttccccggcgactccggcgtcgaccagctcgtcgagatcatcaaggtcctcggcacccccacccgcgagcagatccgcgagatgaaccccaactacaccgagttcaagttcccccagatcaaggcccacccctggaccaaggtcttccgcccccgcaccccccccgaggccatcgccctctgctcccgcctcctcgagtacacccccaccgcccgcctcacccccctcgaggcctgcgcccactccttcttcgacgagctccgcgaccccaacgtcaagctccccaacggccgcgacacccccgccctcttcaacttcaccacccaggagctctcctccaacccccccctcgccaccatcctcatccccccccacgcccgcatccaggccgccgcctccacccccaccaacgccaccgccgcctccgacgccaacaccggcgaccgcggccagaccaacaacgccgcctccgcctccgcctccaactccacctga

SEQ ID NO: 8616 - RNA, 1263 nt, synthetic construct
  misc_feature 1..1263: note = derived and/or modified sequence opt3 fromGSK3B__Homo_sapiens__AAH12760
  source 1..1263: mol_type = other RNA
atgagcggcagacccaggaccacatccttcgccgagtcttgcaagcctgtgcagcaaccatcagcttttgggagtatgaaagtcagccgggacaaggatggatccaaagttactacggtggtagcaaccccgggtcagggccccgaccgccctcaggaagtgtcttacacagatactaaggtcatcgggaacggatcgttcggcgtggtttatcaggccaaactgtgtgactcaggtgagctcgtggcgatcaagaaggtccttcaagataaacgatttaagaatcgtgaactgcagataatgagaaaattggaccactgcaacatcgtgaggttacggtacttcttttatagcagtggggagaagaaagatgaagtatacctgaatctagttctcgactatgtgccagagaccgtctaccgcgtggctagacattattccagggccaagcagacactgcccgtgatttacgtcaaactttacatgtatcagctgttccggtctttggcatacatccacagctttggaatttgtcatcgcgatatcaagcctcaaaacctcctgctggacccagataccgccgttctcaagttatgcgacttcggctccgctaaacagctggtgcgaggcgagcccaatgtatcatatatatgtagtagatactatagggcacctgaacttatctttggggccactgattacacaagctctattgacgtgtggtccgctggatgcgtcttggccgagctgctactcggtcagccaatcttcccgggcgactcaggggtggatcagctggttgaaattatcaaggtgcttggaacccccacgcgggagcaaatacgtgagatgaaccctaattatactgaatttaaattcccacagattaaggcgcacccctggaccaaagtctttcgccctagaacaccacccgaggcaatcgccctgtgtagcaggttgctcgaatacactccgaccgctcggctgacacctttagaggcctgcgcacatagtttcttcgacgaactgcgagatcccaacgtgaagctcccaaatggccgcgacacccctgctctttttaacttcacgactcaggagctgtcttccaatcccccattggccacaattctaattccccctcacgcgagaatccaagccgcagctagcaccccaactaacgccacagctgcctcggatgcaaataccggtgacagggggcagacgaacaatgccgcttctgcgtccgcatcaaacagtacctga

SEQ ID NO: 8617 - RNA, 1263 nt, synthetic construct
  misc_feature 1..1263: note = derived and/or modified sequence opt4 fromGSK3B__Homo_sapiens__AAH12760
  source 1..1263: mol_type = other RNA
atgagcggcagacccagaaccaccagcttcgccgagagctgcaagcccgtgcagcagcccagcgccttcggcagcatgaaggtgagcagagacaaggacggcagcaaggtgaccaccgtggtggccacccccggccagggccccgacagaccccaggaggtgagctacaccgacaccaaggtgatcggcaacggcagcttcggcgtggtgtaccaggccaagctgtgcgacagcggcgagctggtggccatcaagaaggtgctgcaggacaagagattcaagaacagagagctgcagatcatgagaaagctggaccactgcaacatcgtgagactgagatacttcttctacagcagcggcgagaagaaggacgaggtgtacctgaacctggtgctggactacgtgcccgagaccgtgtacagagtggccagacactacagcagagccaagcagaccctgcccgtgatctacgtgaagctgtacatgtaccagctgttcagaagcctggcctacatccacagcttcggcatctgccacagagacatcaagccccagaacctgctgctggaccccgacaccgccgtgctgaagctgtgcgacttcggcagcgccaagcagctggtgagaggcgagcccaacgtgagctacatctgcagcagatactacagagcccccgagctgatcttcggcgccaccgactacaccagcagcatcgacgtgtggagcgccggctgcgtgctggccgagctgctgctgggccagcccatcttccccggcgacagcggcgtggaccagctggtggagatcatcaaggtgctgggcacccccaccagagagcagatcagagagatgaaccccaactacaccgagttcaagttcccccagatcaaggcccacccctggaccaaggtgttcagacccagaaccccccccgaggccatcgccctgtgcagcagactgctggagtacacccccaccgccagactgacccccctggaggcctgcgcccacagcttcttcgacgagctgagagaccccaacgtgaagctgcccaacggcagagacacccccgccctgttcaacttcaccacccaggagctgagcagcaacccccccctggccaccatcctgatccccccccacgccagaatccaggccgccgccagcacccccaccaacgccaccgccgccagcgacgccaacaccggcgacagaggccagaccaacaacgccgccagcgccagcgccagcaacagcacctga

SEQ ID NO: 8618 - RNA, 1263 nt, synthetic construct
  misc_feature 1..1263: note = derived and/or modified sequence opt5 fromGSK3B__Homo_sapiens__AAH12760
  source 1..1263: mol_type = other RNA
atgagcggcagaccccggaccacatccttcgccgagtcttgcaagcctgtgcagcaaccgagcgcttttgggtccatgaaagtctctcgcgacaaggatggaagcaaagttacgaccgtggtggccacacccggccaggggcctgacagaccccaggaagtctcctacaccgatacaaaggtgatcggaaacggctctttcggggttgtgtatcaggcgaaactgtgtgacagcggagagctcgtcgctattaagaaggtgctgcaagataaacggtttaagaatcgcgaacttcagatcatgagaaaactggaccactgcaacattgttcggctccgctacttcttttattccagcggcgagaagaaagatgaagtgtacctgaatcttgtcctggactatgtgcctgagaccgtgtacagagtcgcccggcattattctcgcgccaagcagacactccccgttatctacgtgaagctgtacatgtatcagctgttcagatccctcgcttacattcacagctttggcatctgtcatcgggatatcaaacctcaaaacctgcttctggacccggataccgccgtgctcaagctgtgcgacttcgggtctgctaaacagcttgtccgcggagagcccaatgtgtcctatatttgtagcagatactatcgggcccctgaactgatctttggcgcgacggattacacctcttccattgacgtttggagcgccgggtgcgtgctcgctgagctgctgctcggacagcccatcttccctggcgactccggggtcgatcagctggtggaaattatcaaggttcttggaacacccacccgcgagcaaattagagagatgaacccgaattatacagaatttaaattccctcagatcaaggcccacccctggaccaaagtgtttcggcctagaacgcctcccgaggctatcgccctgtgttctcgcctcctggaatacacacccaccgcgcggcttacaccgctggaggcctgcgctcatagcttcttcgacgaactcagagatcccaacgtcaagctgcctaatggccgcgacacccccgccctgtttaacttcaccacacaggagctctccagcaatcctcccctggctacgattcttatcccgcctcacgcccggattcaagccgctgcgtctacccccacaaacgccaccgctgcctccgatgccaatacaggcgacagagggcagaccaacaatgctgccagcgcgtctgctagcaactccacgtga

SEQ ID NO: 8619 - protein, 102 aa, synthetic construct
  REGION 1..102: note = HSP10__Homo_sapiens__P61604
MAGQAFRKFLPLFDRVLVERSAAETVTKGGIMLPEKSQGKVLQATVVAVGSGSKGKGGEIQPVSVKVGDKVLLPEYGGTKVVLDDKDYFLFRDGDILGKYVD

SEQ ID NO: 8620 - RNA, 309 nt, synthetic construct
  misc_feature 1..309: note = HSP10__Homo_sapiens__AAA50953
  source 1..309: mol_type = other RNA
atggcaggacaagcgtttagaaagtttcttccactctttgaccgagtattggttgaaaggagtgctgctgaaactgtaaccaaaggaggcattatgcttccagaaaaatctcaaggaaaagtattgcaagcaacagtagtcgctgttggatcgggttctaaaggaaagggtggagagattcaaccagttagcgtgaaagttggagataaagttcttctcccagaatatggaggcaccaaagtagttctagatgacaaggattatttcctatttagagatggtgacattcttggaaagtacgtagactga

SEQ ID NO: 8621 - RNA, 309 nt, synthetic construct
  misc_feature 1..309: note = derived and/or modified sequence opt1 fromHSP10__Homo_sapiens__AAA50953
  source 1..309: mol_type = other RNA
atggccggccaggccttccgcaagttcctgcccctcttcgaccgggtgctggtcgagcgcagcgcggccgagaccgtgaccaagggcgggatcatgctgccggagaagtcccaggggaaggtgctccaggccacggtcgtggccgtgggcagcgggtccaagggcaagggcggggagatccagcccgtcagcgtgaaggtgggcgacaaggtcctgctgcccgagtacgggggcaccaaggtggtgctcgacgacaaggactacttcctgttccgggacggggacatcctgggcaagtacgtcgactga

SEQ ID NO: 8622 - RNA, 309 nt, synthetic construct
  misc_feature 1..309: note = derived and/or modified sequence opt2 fromHSP10__Homo_sapiens__AAA50953
  source 1..309: mol_type = other RNA
atggccggccaggccttccgcaagttcctccccctcttcgaccgcgtcctcgtcgagcgctccgccgccgagaccgtcaccaagggcggcatcatgctccccgagaagtcccagggcaaggtcctccaggccaccgtcgtcgccgtcggctccggctccaagggcaagggcggcgagatccagcccgtctccgtcaaggtcggcgacaaggtcctcctccccgagtacggcggcaccaaggtcgtcctcgacgacaaggactacttcctcttccgcgacggcgacatcctcggcaagtacgtcgactga

SEQ ID NO: 8623 - RNA, 309 nt, synthetic construct
  misc_feature 1..309: note = derived and/or modified sequence opt3 fromHSP10__Homo_sapiens__AAA50953
  source 1..309: mol_type = other RNA
atggccggccaggctttcagaaagtttctgcccctcttcgacagggtgcttgtcgagcggagcgcagccgaaaccgttacaaaagggggaatcatgctgcctgagaagtcccaaggtaaagtgttgcaggcgactgtagtggctgtcggctctgggtcaaagggaaaaggcggtgaaattcagccagtgagtgttaaggtgggggataaggtcttactgccggagtacggaggcacgaaagtggtactagacgataaggactattttctcttccgcgatggcgacatactggggaaatacgttgattga

SEQ ID NO: 8624 - RNA, 309 nt, synthetic construct
  misc_feature 1..309: note = derived and/or modified sequence opt4 fromHSP10__Homo_sapiens__AAA50953
  source 1..309: mol_type = other RNA
atggccggccaggccttcagaaagttcctgcccctgttcgacagagtgctggtggagagaagcgccgccgagaccgtgaccaagggcggcatcatgctgcccgagaagagccagggcaaggtgctgcaggccaccgtggtggccgtgggcagcggcagcaagggcaagggcggcgagatccagcccgtgagcgtgaaggtgggcgacaaggtgctgctgcccgagtacggcggcaccaaggtggtgctggacgacaaggactacttcctgttcagagacggcgacatcctgggcaagtacgtggactga

SEQ ID NO: 8625 - RNA, 309 nt, synthetic construct
  misc_feature 1..309: note = derived and/or modified sequence opt5 fromHSP10__Homo_sapiens__AAA50953
  source 1..309: mol_type = other RNA
atggccggccaggctttcagaaagtttctgcccctcttcgaccgggtgctggtcgagcgcagcgccgcggaaaccgttacaaaagggggaatcatgcttcctgagaagtcccaaggcaaagtgctgcaggctacggtggtcgccgtggggtctggaagcaagggcaaagggggagaaattcagccggtttccgtgaaggtcggcgataaggtgctcctgcccgagtacggcgggaccaaagttgtgcttgacgataaggactattttctgttcagagatggagacatcctcggcaaatacgtcgattga

SEQ ID NO: 8626 - protein, 704 aa, synthetic construct
  REGION 1..704: note = HSP75__Homo_sapiens__Q12931
MARELRALLLWGRRLRPLLRAPALAAVPGGKPILCPRRTTAQLGPRRNPAWSLQAGRLFSTQTAEDKEEPLHSIISSTESVQGSTSKHEFQAETKKLLDIVARSLYSEKEVFIRELISNASDALEKLRHKLVSDGQALPEMEIHLQTNAEKGTITIQDTGIGMTQEELVSNLGTIARSGSKAFLDALQNQAEASSKIIGQFGVGFYSAFMVADRVEVYSRSAAPGSLGYQWLSDGSGVFEIAEASGVRTGTKIIIHLKSDCKEFSSEARVRDVVTKYSNFVSFPLYLNGRRMNTLQAIWMMDPKDVREWQHEEFYRYVAQAHDKPRYTLHYKTDAPLNIRSIFYVPDMKPSMFDVSRELGSSVALYSRKVLIQTKATDILPKWLRFIRGVVDSEDIPLNLSRELLQESALIRKLRDVLQQRLIKFFIDQSKKDAEKYAKFFEDYGLFMREGIVTATEQEVKEDIAKLLRYESSALPSGQLTSLSEYASRMRAGTRNIYYLCAPNRHLAEHSPYYEAMKKKDTEVLFCFEQFDELTLLHLREFDKKKLISVETDIVVDHYKEEKFEDRSPAAECLSEKETEELMAWMRNVLGSRVTNVKVTLRLDTHPAMVTVLEMGAARHFLRMQQLAKTQEERAQLLQPTLEINPRHALIKKLNQLRASEPGLAQLLVDQIYENAMIAAGLVDDPRAMVGRLNELLVKALERH

SEQ ID NO: 8627 - RNA, 2115 nt, synthetic construct
  misc_feature 1..2115: note = HSP75__Homo_sapiens__AAH18950
  source 1..2115: mol_type = other RNA
atggcgcgcgagctgcgggcgctgctgctgtggggccgccgcctgcggcctttgctgcgggcgccggcgctggcggccgtgccgggaggaaaaccaattctgtgtcctcggaggaccacagcccagttgggccccaggcgaaacccagcctggagcttgcaggcaggacgactgttcagcacgcagaccgccgaggacaaggaggaacccctgcactcgattatcagcagcacagagagcgtgcagggttccacttccaaacatgagttccaggccgagacaaagaagcttttggacattgttgcccggtccctgtactcagaaaaagaggtgtttatacgggagctgatctccaatgccagcgatgccttggaaaaactgcgtcacaaactggtgtctgacggccaagcactgccagaaatggagattcacttgcagaccaatgccgagaaaggcaccatcaccatccaggatactggtatcgggatgacacaggaagagctggtgtccaacctggggacgattgccagatcggggtcaaaggccttcctggatgctctgcagaaccaggctgaggccagcagcaagatcatcggccagtttggagtgggtttctactcagctttcatggtggctgacagagtggaggtctattcccgctcggcagccccggggagcctgggttaccagtggctttcagatggttctggagtgtttgaaatcgccgaagcttcgggagttagaaccgggacaaaaatcatcatccacctgaaatccgactgcaaggagttttccagcgaggcccgggtgcgagatgtggtaacgaagtacagcaacttcgtcagcttccccttgtacttgaatggaaggcggatgaacaccttgcaggccatctggatgatggaccccaaggatgtccgtgagtggcaacatgaggagttctaccgctacgtcgcgcaggctcacgacaagccccgctacaccctgcactataagacggacgcaccgctcaacatccgcagcatcttctacgtgcccgacatgaaaccgtccatgtttgatgtgagccgggagctgggctccagcgttgcactgtacagccgcaaagtcctcatccagaccaaggccacggacatcctgcccaagtggctgcgcttcatccgaggtgtggtggacagtgaggacattcccctgaacctcagccgggagctgctgcaggagagcgcactcatcaggaaactccgggacgttttacagcagaggctgatcaaattcttcattgaccagagtaaaaaagatgctgagaagtatgcaaagttttttgaagattacggcctgttcatgcgggagggcattgtgaccgccaccgagcaggaggtcaaggaggacatagcaaagctgctgcgctacgagtcctcggcgctgccctccgggcagctaaccagcctctcagaatacgccagccgcatgcgggccggcacccgcaacatctactacctgtgcgcccccaaccgtcacctggcagagcactcaccctactatgaggccatgaagaagaaagacacagaggttctcttctgctttgagcagtttgatgagctcaccctgctgcaccttcgtgagtttgacaagaagaagctgatctctgtggagacggacatagtcgtggatcactacaaggaggagaagtttgaggacaggtccccagccgccgagtgcctatcagagaaggagacggaggagctcatggcctggatgagaaatgtgctggggtcgcgtgtcaccaacgtgaaggtgaccctccgactggacacccaccctgccatggtcaccgtgctggagatgggggctgcccgccacttcctgcgcatgcagcagctggccaagacccaggaggagcgcgcacagctcctgcagcccacgctggagatcaaccccaggcacgcgctcatcaagaagctgaatcagctgcgcgcaagcgagcctggcctggctcagctgctggtggatcagatatacgagaacgccatgattgctgctggacttgttgacgaccctagggccatggtgggccgcttgaatgagctgcttgtcaaggccctggagcgacactga

SEQ ID NO: 8628 - RNA, 2115 nt, synthetic construct
  misc_feature 1..2115: note = derived and/or modified sequence opt1 fromHSP75__Homo_sapiens__AAH18950
  source 1..2115: mol_type = other RNA
atggcccgcgagctgcgggccctcctgctgtggggccgccggctccgccccctgctgcgggcgccggccctcgccgccgtgcccgggggcaagcccatcctgtgcccccgccggaccaccgcccagctggggccgcgccggaaccccgcgtggagcctccaggccggccgcctgttctccacgcagaccgccgaggacaaggaggagcccctgcacagcatcatctccagcaccgagtccgtccaggggagcacctccaagcacgagttccaggccgagacgaagaagctcctggacatcgtggcgcggagcctgtactccgagaaggaggtgttcatccgcgagctcatcagcaacgcctccgacgccctggagaagctgcggcacaagctcgtcagcgacggccaggccctgcccgagatggagatccacctccagaccaacgccgagaagggcaccatcaccatccaggacacggggatcggcatgacccaggaggagctggtgtccaacctggggaccatcgcgcgcagcggctccaaggccttcctggacgccctccagaaccaggccgaggccagctccaagatcatcgggcagttcggcgtgggcttctacagcgcgttcatggtcgccgaccgggtggaggtgtactcccgcagcgccgccccggggagcctgggctaccagtggctgtccgacgggagcggcgtcttcgagatcgccgaggcgtccggcgtgcggaccgggacgaagatcatcatccacctcaagagcgactgcaaggagttctccagcgaggcccgcgtgcgggacgtcgtgaccaagtactccaacttcgtgagcttccccctgtacctgaacggccgccggatgaacaccctccaggccatctggatgatggaccccaaggacgtccgcgagtggcagcacgaggagttctaccgctacgtggcccaggcccacgacaagccccggtacaccctgcactacaagacggacgcgccgctgaacatccgctccatcttctacgtgcccgacatgaagcccagcatgttcgacgtctcccgggagctcgggagctccgtggccctgtacagccgcaaggtgctgatccagaccaaggccaccgacatcctccccaagtggctgcggttcatccgcggcgtcgtggactccgaggacatcccgctgaacctcagccgggagctgctgcaggagtccgccctcatccgcaagctgcgggacgtgctgcagcagcgcctcatcaagttcttcatcgaccagagcaagaaggacgcggagaagtacgccaagttcttcgaggactacgggctgttcatgcgggagggcatcgtcaccgccacggagcaggaggtgaaggaggacatcgccaagctgctccgctacgagtccagcgccctgcccagcggccagctgacctccctgagcgagtacgcgtcccggatgcgcgccgggacccggaacatctactacctctgcgcccccaaccgccacctggccgagcacagcccctactacgaggccatgaagaagaaggacaccgaggtcctgttctgcttcgagcagttcgacgagctcacgctgctgcacctccgggagttcgacaagaagaagctgatctccgtggagaccgacatcgtggtcgaccactacaaggaggagaagttcgaggaccgcagcccggcggccgagtgcctgtccgagaaggagaccgaggagctcatggcctggatgcggaacgtgctgggcagccgcgtgaccaacgtcaaggtgacgctgcgcctcgacacccaccccgccatggtgaccgtcctggagatgggggccgcgcggcacttcctgcgcatgcagcagctcgccaagacccaggaggagcgggcccagctgctgcagcccacgctcgagatcaacccccgccacgccctgatcaagaagctgaaccagctccgggcgtccgagccgggcctggcccagctgctcgtggaccagatctacgagaacgccatgatcgccgccgggctggtggacgacccccgcgcgatggtcggccggctgaacgagctcctggtgaaggccctggagcgccactga

SEQ ID NO: 8629 - RNA, 2115 nt, synthetic construct
  misc_feature 1..2115: note = derived and/or modified sequence opt2 fromHSP75__Homo_sapiens__AAH18950
  source 1..2115: mol_type = other RNA
atggcccgcgagctccgcgccctcctcctctggggccgccgcctccgccccctcctccgcgcccccgccctcgccgccgtccccggcggcaagcccatcctctgcccccgccgcaccaccgcccagctcggcccccgccgcaaccccgcctggtccctccaggccggccgcctcttctccacccagaccgccgaggacaaggaggagcccctccactccatcatctcctccaccgagtccgtccagggctccacctccaagcacgagttccaggccgagaccaagaagctcctcgacatcgtcgcccgctccctctactccgagaaggaggtcttcatccgcgagctcatctccaacgcctccgacgccctcgagaagctccgccacaagctcgtctccgacggccaggccctccccgagatggagatccacctccagaccaacgccgagaagggcaccatcaccatccaggacaccggcatcggcatgacccaggaggagctcgtctccaacctcggcaccatcgcccgctccggctccaaggccttcctcgacgccctccagaaccaggccgaggcctcctccaagatcatcggccagttcggcgtcggcttctactccgccttcatggtcgccgaccgcgtcgaggtctactcccgctccgccgcccccggctccctcggctaccagtggctctccgacggctccggcgtcttcgagatcgccgaggcctccggcgtccgcaccggcaccaagatcatcatccacctcaagtccgactgcaaggagttctcctccgaggcccgcgtccgcgacgtcgtcaccaagtactccaacttcgtctccttccccctctacctcaacggccgccgcatgaacaccctccaggccatctggatgatggaccccaaggacgtccgcgagtggcagcacgaggagttctaccgctacgtcgcccaggcccacgacaagccccgctacaccctccactacaagaccgacgcccccctcaacatccgctccatcttctacgtccccgacatgaagccctccatgttcgacgtctcccgcgagctcggctcctccgtcgccctctactcccgcaaggtcctcatccagaccaaggccaccgacatcctccccaagtggctccgcttcatccgcggcgtcgtcgactccgaggacatccccctcaacctctcccgcgagctcctccaggagtccgccctcatccgcaagctccgcgacgtcctccagcagcgcctcatcaagttcttcatcgaccagtccaagaaggacgccgagaagtacgccaagttcttcgaggactacggcctcttcatgcgcgagggcatcgtcaccgccaccgagcaggaggtcaaggaggacatcgccaagctcctccgctacgagtcctccgccctcccctccggccagctcacctccctctccgagtacgcctcccgcatgcgcgccggcacccgcaacatctactacctctgcgcccccaaccgccacctcgccgagcactccccctactacgaggccatgaagaagaaggacaccgaggtcctcttctgcttcgagcagttcgacgagctcaccctcctccacctccgcgagttcgacaagaagaagctcatctccgtcgagaccgacatcgtcgtcgaccactacaaggaggagaagttcgaggaccgctcccccgccgccgagtgcctctccgagaaggagaccgaggagctcatggcctggatgcgcaacgtcctcggctcccgcgtcaccaacgtcaaggtcaccctccgcctcgacacccaccccgccatggtcaccgtcctcgagatgggcgccgcccgccacttcctccgcatgcagcagctcgccaagacccaggaggagcgcgcccagctcctccagcccaccctcgagatcaacccccgccacgccctcatcaagaagctcaaccagctccgcgcctccgagcccggcctcgcccagctcctcgtcgaccagatctacgagaacgccatgatcgccgccggcctcgtcgacgacccccgcgccatggtcggccgcctcaacgagctcctcgtcaaggccctcgagcgccactga

SEQ ID NO: 8630 - RNA, 2115 nt, synthetic construct
  misc_feature 1..2115: note = derived and/or modified sequence opt3 fromHSP75__Homo_sapiens__AAH18950
  source 1..2115: mol_type = other RNA
atggccagagagctgagggctctccttctgtggggccggcgcttgcgacccttactgcgtgctcctgccctagcggctgtgccagggggaaagccgatcctctgccccagaaggaccacagcccagctgggtcctcggcgcaacccagcatggagccttcaagccggcagactgttctccactcagacggctgaagacaaagaggaacccttgcactctattatatcaagtaccgagagcgtccaggggtccacatctaagcatgaatttcaggcagagactaaaaagctcctggatatcgttgccaggtcgctgtactcagagaaagaagtgttcattcgggagctcatcagcaatgctagtgacgccttagaaaagctgcgccacaagctagtatccgatggacaagcgttgcctgagatggagattcatctgcagaccaacgcagaaaaaggcacaatcaccatacaggacactggtatcgggatgacacaggaggaacttgtgtctaatctcggaaccattgcccgaagcggctccaaggcttttctggatgcccttcaaaaccaggcagaggcttcaagtaaaatcattggccagttcggggtcggattttatagcgccttcatggtggcggacagagttgaagtgtactctaggtccgccgcaccaggttcactgggctatcagtggttgagcgatgggagtggagtctttgagatcgctgaggcctctggcgtgcggacgggtactaagataattatccacctcaaatccgactgtaaggaatttagctcggaggctcgtgtacgcgatgttgtgaccaagtactctaattttgtctccttccccctgtatttaaacgggagaaggatgaatacactgcaagccatttggatgatggaccctaaagatgtgcgggaatggcagcatgaggaattttaccgatatgtggcacaggcccacgacaagccacgctacactctccactacaaaaccgatgctccgcttaacatcagatcaatcttctatgtccccgacatgaagcctagtatgtttgacgttagcagggagctgggatcctctgtggcgttgtacagccggaaagtactaattcaaacaaaggcaaccgatatactgccaaaatggctccgcttcatcagaggcgtggtcgactcagaggatattcccctgaatcttagtagggaactgttgcaggagtccgccctcatccgtaagctgcgggacgtgttacagcagcgactgataaagttctttattgatcaaagcaaaaaggacgctgaaaaatatgccaagttctttgaggattacggcctattcatgagagaagggatcgttacggcaactgagcaggaggtgaaagaagacatcgccaagctcctgaggtatgagtcttcagcacttcctagtggacagttgacaagcctgtccgaatacgcctctcgcatgcgggcaggtaccagaaacatttattacctctgcgcgccaaataggcatctggctgagcactcgccctactatgaggccatgaagaaaaaggatactgaagtccttttctgtttcgagcagtttgacgaactgacattgctccatctgcgcgagttcgataaaaagaaattaatcagcgtggaaaccgacattgtagttgaccactacaaggaggagaagtttgaagatcgatccccggcagccgagtgcctgtcagaaaaagagacggaagaactaatggcttggatgcggaacgtgctcggcagtcgtgtcaccaatgtgaaggtcacactgagacttgacactcaccctgccatggtgaccgttttggagatgggggcagctaggcatttcctgcgcatgcaacagctcgccaaaacacaggaggagcgggcgcagctgttacaacccactctggaaataaacccaagacacgcccttatcaagaaattgaatcagctcagggcttctgagcctggactggcacagctactggtggatcagatttatgaaaacgccatgatcgctgccggcctcgtagacgatccccgagcaatggtcggtcgcctgaacgagcttttggtgaaggcgctggagcggcattga

SEQ ID NO: 8631 - RNA, 2115 nt, synthetic construct
  misc_feature 1..2115: note = derived and/or modified sequence opt4 fromHSP75__Homo_sapiens__AAH18950
  source 1..2115: mol_type = other RNA
atggccagagagctgagagccctgctgctgtggggcagaagactgagacccctgctgagagcccccgccctggccgccgtgcccggcggcaagcccatcctgtgccccagaagaaccaccgcccagctgggccccagaagaaaccccgcctggagcctgcaggccggcagactgttcagcacccagaccgccgaggacaaggaggagcccctgcacagcatcatcagcagcaccgagagcgtgcagggcagcaccagcaagcacgagttccaggccgagaccaagaagctgctggacatcgtggccagaagcctgtacagcgagaaggaggtgttcatcagagagctgatcagcaacgccagcgacgccctggagaagctgagacacaagctggtgagcgacggccaggccctgcccgagatggagatccacctgcagaccaacgccgagaagggcaccatcaccatccaggacaccggcatcggcatgacccaggaggagctggtgagcaacctgggcaccatcgccagaagcggcagcaaggccttcctggacgccctgcagaaccaggccgaggccagcagcaagatcatcggccagttcggcgtgggcttctacagcgccttcatggtggccgacagagtggaggtgtacagcagaagcgccgcccccggcagcctgggctaccagtggctgagcgacggcagcggcgtgttcgagatcgccgaggccagcggcgtgagaaccggcaccaagatcatcatccacctgaagagcgactgcaaggagttcagcagcgaggccagagtgagagacgtggtgaccaagtacagcaacttcgtgagcttccccctgtacctgaacggcagaagaatgaacaccctgcaggccatctggatgatggaccccaaggacgtgagagagtggcagcacgaggagttctacagatacgtggcccaggcccacgacaagcccagatacaccctgcactacaagaccgacgcccccctgaacatcagaagcatcttctacgtgcccgacatgaagcccagcatgttcgacgtgagcagagagctgggcagcagcgtggccctgtacagcagaaaggtgctgatccagaccaaggccaccgacatcctgcccaagtggctgagattcatcagaggcgtggtggacagcgaggacatccccctgaacctgagcagagagctgctgcaggagagcgccctgatcagaaagctgagagacgtgctgcagcagagactgatcaagttcttcatcgaccagagcaagaaggacgccgagaagtacgccaagttcttcgaggactacggcctgttcatgagagagggcatcgtgaccgccaccgagcaggaggtgaaggaggacatcgccaagctgctgagatacgagagcagcgccctgcccagcggccagctgaccagcctgagcgagtacgccagcagaatgagagccggcaccagaaacatctactacctgtgcgcccccaacagacacctggccgagcacagcccctactacgaggccatgaagaagaaggacaccgaggtgctgttctgcttcgagcagttcgacgagctgaccctgctgcacctgagagagttcgacaagaagaagctgatcagcgtggagaccgacatcgtggtggaccactacaaggaggagaagttcgaggacagaagccccgccgccgagtgcctgagcgagaaggagaccgaggagctgatggcctggatgagaaacgtgctgggcagcagagtgaccaacgtgaaggtgaccctgagactggacacccaccccgccatggtgaccgtgctggagatgggcgccgccagacacttcctgagaatgcagcagctggccaagacccaggaggagagagcccagctgctgcagcccaccctggagatcaaccccagacacgccctgatcaagaagctgaaccagctgagagccagcgagcccggcctggcccagctgctggtggaccagatctacgagaacgccatgatcgccgccggcctggtggacgaccccagagccatggtgggcagactgaacgagctgctggtgaaggccctggagagacactga

SEQ ID NO: 8632 - RNA, 2115 nt, synthetic construct
  misc_feature 1..2115: note = derived and/or modified sequence opt5 fromHSP75__Homo_sapiens__AAH18950
  source 1..2115: mol_type = other RNA
atggccagagagctgcgggctctcctgctttggggccgcagactgcggcccctcctgcgcgcccctgcgcttgctgccgtgcccgggggaaagccgatcctgtgccctagacggaccacagcccagctcggcccccgcagaaaccctgcttggagcctgcaagccgggcggctgttctccacgcagaccgctgaagacaaagaggaacccctccactctattatcagctccacagagtctgtccagggaagcacctccaagcatgaatttcaggccgagacaaagaagctgcttgatattgttgcgcgctctctgtacagcgagaaagaagtgttcatcagagagctcatttccaatgccagcgacgctctggaaaaacttcggcacaagctggtgtctgatggccaagccctccctgagatggagatccatctgcagaccaacgctgaaaaagggacaatcaccattcaggacacgggaatcggcatgacccaggaggaactggtctccaatctcggcacaattgcccgcagcgggtctaaggcgtttctggatgcccttcaaaaccaggctgaggcctccagcaaaatcattggacagttcggcgtggggttttattctgctttcatggttgccgacagagtggaagtctactcccggagcgccgctccgggatccctgggctatcagtggctctctgatgggagcggagtgtttgagatcgcggaggcctccggcgttcgcaccggcacaaagattatcatccacctgaaaagcgactgtaaggagttctcttccgaggctagagtgcgggatgtcgtgaccaagtacagcaattttgtgtctttccccctttatctgaacgggagacgcatgaatacgctccaagccatttggatgatggaccctaaagatgtccgggaatggcagcatgaggaattttacagatatgttgcccaggctcacgacaagccccgctacacactgcactacaaaaccgatgcccctctgaacatccggagcattttctatgtgcccgacatgaagccgtccatgtttgacgtgtctagagagctcggaagctccgtcgcgctgtacagccgcaaagtgcttatccaaacaaaggctaccgatattctgcctaaatggctccggttcatcagaggcgttgtggactctgaggatatccccctgaatctttcccgcgaactgctccaggagagcgccctgattcggaagctgagagacgtcctccagcagcgcctgatcaagttctttattgatcaatctaaaaaggacgccgaaaaatatgctaagttctttgaggattacgggcttttcatgcgggaaggaatcgtgaccgccacagagcaggaggttaaagaagacattgctaagctgctcagatatgagtccagcgccctgccttccggccagctgacgtctcttagcgaatacgcgtcccggatgcgcgccgggaccagaaacatctattacctctgcgctcccaatcggcatctggccgagcactctccctactatgaggctatgaagaaaaaggatacagaagtgctgttttgtttcgagcagtttgacgaactcaccctgcttcatctgagagagttcgataaaaagaaactcatcagcgtcgaaacagacattgtggtcgaccactacaaggaggagaagtttgaagatcgctcccctgccgcggagtgcctgagcgaaaaagagaccgaagaactgatggcctggatgcggaacgtgcttggatctagagttacgaatgtgaaggtcacactccgcctggacacccacccggctatggtgaccgttctggagatgggcgccgctagacatttcctccggatgcaacagctggccaaaacacaggaggaacgcgcccagcttctgcaacccaccctcgaaatcaaccctagacacgctctgattaagaaactgaatcagcttcgggcgtccgagcccggcctcgcccagctgctggtggatcagatctatgaaaacgctatgattgccgccgggctcgtcgacgatcctcgcgctatggtgggaagactgaacgagcttctggtgaaggccctcgagcggcattga

SEQ ID NO: 8633 - protein, 802 aa, synthetic construct
  REGION 1..802: note = HSP90B1__Homo_sapiens__Q5CAQ5
MRALWVLGLCCVLLTFGSVRADDEVDVDGTVEEDLGKSREGSRTDDEVVQREEEAIQLDGLNASQIRELREKSEKFAFQAEVNRMMKLIINSLYKNKEIFLRELISNASDALDKIRLISLTDENALSGNEELTVKIKCDKEKNLLHVTDTGVGMTREELVKNLGTIAKSGTSEFLNKMTEAQEDGQSTSELIGQFGVGFYSAFLVADKVIVTSKHNNDTQHIWESDSNEFSVIADPRGNTLGRGTTITLVLKEEASDYLELDTIKNLVKKYSQFINFPIYVWSSKTETVEEPMEEEEAAKEEKEESDDEAAVEEEEEEKKPKTKKVEKTVWDWELMNDIKPIWQRPSKEVEEDEYKAFYKSFSKESDDPMAYIHFTAEGEVTFKSILFVPTSAPRGLFDEYGSKKSDYIKLYVRRVFITDDFHDMMPKYLNFVKGVVDSDDLPLNVSRETLQQHKLLKVIRKKLVRKTLDMIKKIADDKYNDTFWKEFGTNIKLGVIEDHSNRTRLAKLLRFQSSHHPTDITSLDQYVERMKEKQDKIYFMAGSSRKEAESSPFVERLLKKGYEVIYLTEPVDEYCIQALPEFDGKRFQNVAKEGVKFDESEKTKESREAVEKEFEPLLNWMKDKALKDKIEKAVVSQRLTESPCALVASQYGWSGNMERIMKAQAYQTGKDISTNYYASQKKTFEINPRHPLIRDMLRRIKEDEDDKTVLDLAVVLFETATLRSGYLLPDTKAYGDRIERMLRLSLNIDPDAKVEEEPEEEPEETAEDTTEDTEQDEDEEMDVGTDEEETAKESTAEKDEL

SEQ ID NO: 8634 - RNA, 2409 nt, synthetic construct
  misc_feature 1..2409: note = HSP90B1__Homo_sapiens__CAI64497
  source 1..2409: mol_type = other RNA
atgagggccctgtgggtgctgggcctctgctgcgtcctgctgaccttcgggtcggtcagagctgacgatgaagttgatgtggatggtacagtagaagaggatctgggtaaaagtagagaaggatcaaggacggatgatgaagtagtacagagagaggaagaagctattcagttggatggattaaatgcatcacaaataagagaacttagagagaagtcggaaaagtttgccttccaagccgaagttaacagaatgatgaaacttatcatcaattcattgtataaaaataaagagattttcctgagagaactgatttcaaatgcttctgatgctttagataagataaggctaatatcactgactgatgaaaatgctctttctggaaatgaggaactaacagtcaaaattaagtgtgataaggagaagaacctgctgcatgtcacagacaccggtgtaggaatgaccagagaagagttggttaaaaaccttggtaccatagccaaatctgggacaagcgagtttttaaacaaaatgactgaagcacaggaagatggccagtcaacttctgaattgattggccagtttggtgtcggtttctattccgccttccttgtagcagataaggttattgtcacttcaaaacacaacaacgatactcagcacatctgggagtctgactccaatgaattttctgtaattgctgacccaagaggaaacactctaggacggggaacgacaattacccttgtcttaaaagaagaagcatctgattaccttgaattggatacaattaaaaatctcgtcaaaaaatattcacagttcataaactttcctatttatgtatggagcagcaagactgaaactgttgaggagcccatggaggaagaagaagcagccaaagaagagaaagaagaatctgatgatgaagctgcagtagaggaagaagaagaagaaaagaaaccaaagactaaaaaagttgaaaaaactgtctgggactgggaacttatgaatgatatcaaaccaatatggcagagaccatcaaaagaagtagaagaagatgaatacaaagctttctacaaatcattttcaaaggaaagtgatgaccccatggcttatattcactttactgctgaaggggaagttaccttcaaatcaattttatttgtacccacatctgctccacgtggtctgtttgacgaatatggatctaaaaagagcgattacattaagctctatgtgcgccgtgtattcatcacagacgacttccatgatatgatgcctaaatacctcaattttgtcaagggtgtggtggactcagatgatctccccttgaatgtttcccgcgagactcttcagcaacataaactgcttaaggtgattaggaagaagcttgttcgtaaaacgctggacatgatcaagaagattgctgatgataaatacaatgatactttttggaaagaatttggtaccaacatcaagcttggtgtgattgaagaccactcgaatcgaacacgtcttgctaaacttcttaggttccagtcttctcatcatccaactgacattactagcctagaccagtatgtggaaagaatgaaggaaaaacaagacaaaatctacttcatggctgggtccagcagaaaagaggctgaatcttctccatttgttgagcgacttctgaaaaagggctatgaagttatttacctcacagaacctgtggatgaatactgtattcaggcccttcccgaatttgatgggaagaggttccagaatgttgccaaggaaggagtgaagttcgatgaaagtgagaaaactaaggagagtcgtgaagcagttgagaaagaatttgagcctctgctgaattggatgaaagataaagcccttaaggacaagattgaaaaggctgtggtgtctcagcgcctgacagaatctccgtgtgctttggtggccagccagtacggatggtctggcaacatggagagaatcatgaaagcacaagcgtaccaaacgggcaaggacatctctacaaattactatgcgagtcagaagaaaacatttgaaattaatcccagacacccgctgatcagagacatgcttcgacgaattaaggaagatgaagatgataaaacagttttggatcttgctgtggttttgtttgaaacagcaacgcttcggtcagggtatcttttaccagacactaaagcatatggagatagaatagaaagaatgcttcgcctcagtttgaacattgaccctgatgcaaaggtggaagaagagcccgaagaagaacctgaagagacagcagaagacacaacagaagacacagagcaagacgaagatgaagaaatggatgtgggaacagatgaagaagaaacagcaaaggaatctacagctgaaaaagatgaattgtaa

SEQ ID NO: 8635 - RNA, 2409 nt, synthetic construct
  misc_feature 1..2409: note = derived and/or modified sequence opt1 fromHSP90B1__Homo_sapiens__CAI64497
  source 1..2409: mol_type = other RNA
atgcgcgccctgtgggtgctcggcctgtgctgcgtcctgctcaccttcgggagcgtgcgggccgacgacgaggtggacgtcgacggcaccgtggaggaggacctggggaagtcccgcgagggcagccggacggacgacgaggtggtccagcgcgaggaggaggcgatccagctggacgggctcaacgcctcccagatccgggagctgcgcgagaagtccgagaagttcgccttccaggccgaggtgaaccggatgatgaagctgatcatcaacagcctctacaagaacaaggagatcttcctgcgcgagctgatcagcaacgcctccgacgcgctcgacaagatccggctgatcagcctgaccgacgagaacgccctctccggcaacgaggagctgaccgtgaagatcaagtgcgacaaggagaagaacctgctccacgtcaccgacacgggcgtggggatgacccgcgaggagctggtgaagaacctgggcaccatcgccaagagcgggacctccgagttcctcaacaagatgacggaggcccaggaggacggccagagcacctccgagctgatcgggcagttcggcgtcggcttctacagcgcgttcctggtggccgacaaggtgatcgtcacctccaagcacaacaacgacacccagcacatctgggagagcgactccaacgagttcagcgtgatcgccgacccccgggggaacacgctcggccgcgggaccaccatcaccctggtgctgaaggaggaggcctccgactacctcgagctggacacgatcaagaacctggtcaagaagtacagccagttcatcaacttcccgatctacgtgtggagctccaagaccgagaccgtggaggagcccatggaggaggaggaggccgcgaaggaggagaaggaggagagcgacgacgaggccgccgtcgaggaggaggaggaggagaagaagcccaagaccaagaaggtggagaagacggtgtgggactgggagctcatgaacgacatcaagcccatctggcagcggccgtccaaggaggtcgaggaggacgagtacaaggccttctacaagagcttctccaaggagagcgacgaccccatggcctacatccacttcaccgcggagggcgaggtgaccttcaagtccatcctgttcgtccccaccagcgcgccccgcggcctgttcgacgagtacgggtccaagaagtccgactacatcaagctctacgtgcggcgcgtgttcatcacggacgacttccacgacatgatgccgaagtacctgaacttcgtcaagggcgtggtggacagcgacgacctgcccctcaacgtcagccgggagaccctgcagcagcacaagctgctcaaggtgatccgcaagaagctggtgcggaagaccctggacatgatcaagaagatcgccgacgacaagtacaacgacaccttctggaaggagttcgggacgaacatcaagctcggcgtcatcgaggaccactccaaccgcacccggctggccaagctgctccgcttccagagctcccaccaccccaccgacatcaccagcctggaccagtacgtggagcgcatgaaggagaagcaggacaagatctacttcatggccgggtccagccggaaggaggccgagtccagccccttcgtggagcgcctgctcaagaagggctacgaggtcatctacctgacggagccggtggacgagtactgcatccaggccctgcccgagttcgacggcaagcggttccagaacgtggccaaggagggggtcaagttcgacgagagcgagaagaccaaggagtcccgcgaggccgtggagaaggagttcgagcccctgctcaactggatgaaggacaaggccctgaaggacaagatcgagaaggcggtggtcagccagcggctgaccgagtccccctgcgccctcgtggccagccagtacggctggtccgggaacatggagcgcatcatgaaggcccaggcgtaccagaccggcaaggacatcagcacgaactactacgcctcccagaagaagaccttcgagatcaacccgcggcaccccctgatccgcgacatgctgcggcgcatcaaggaggacgaggacgacaagaccgtgctcgacctggccgtcgtgctgttcgagaccgccaccctccggagcgggtacctgctgcccgacacgaaggcctacggcgaccgcatcgagcggatgctccgcctgtccctgaacatcgaccccgacgcgaaggtggaggaggagccggaggaggagcccgaggagaccgccgaggacaccaccgaggacacggagcaggacgaggacgaggagatggacgtcggcaccgacgaggaggagaccgccaaggagagcaccgccgagaaggacgagctctga

SEQ ID NO: 8636 - RNA, 2409 nt, synthetic construct
  misc_feature 1..2409: note = derived and/or modified sequence opt2 fromHSP90B1__Homo_sapiens__CAI64497
  source 1..2409: mol_type = other RNA
atgcgcgccctctgggtcctcggcctctgctgcgtcctcctcaccttcggctccgtccgcgccgacgacgaggtcgacgtcgacggcaccgtcgaggaggacctcggcaagtcccgcgagggctcccgcaccgacgacgaggtcgtccagcgcgaggaggaggccatccagctcgacggcctcaacgcctcccagatccgcgagctccgcgagaagtccgagaagttcgccttccaggccgaggtcaaccgcatgatgaagctcatcatcaactccctctacaagaacaaggagatcttcctccgcgagctcatctccaacgcctccgacgccctcgacaagatccgcctcatctccctcaccgacgagaacgccctctccggcaacgaggagctcaccgtcaagatcaagtgcgacaaggagaagaacctcctccacgtcaccgacaccggcgtcggcatgacccgcgaggagctcgtcaagaacctcggcaccatcgccaagtccggcacctccgagttcctcaacaagatgaccgaggcccaggaggacggccagtccacctccgagctcatcggccagttcggcgtcggcttctactccgccttcctcgtcgccgacaaggtcatcgtcacctccaagcacaacaacgacacccagcacatctgggagtccgactccaacgagttctccgtcatcgccgacccccgcggcaacaccctcggccgcggcaccaccatcaccctcgtcctcaaggaggaggcctccgactacctcgagctcgacaccatcaagaacctcgtcaagaagtactcccagttcatcaacttccccatctacgtctggtcctccaagaccgagaccgtcgaggagcccatggaggaggaggaggccgccaaggaggagaaggaggagtccgacgacgaggccgccgtcgaggaggaggaggaggagaagaagcccaagaccaagaaggtcgagaagaccgtctgggactgggagctcatgaacgacatcaagcccatctggcagcgcccctccaaggaggtcgaggaggacgagtacaaggccttctacaagtccttctccaaggagtccgacgaccccatggcctacatccacttcaccgccgagggcgaggtcaccttcaagtccatcctcttcgtccccacctccgccccccgcggcctcttcgacgagtacggctccaagaagtccgactacatcaagctctacgtccgccgcgtcttcatcaccgacgacttccacgacatgatgcccaagtacctcaacttcgtcaagggcgtcgtcgactccgacgacctccccctcaacgtctcccgcgagaccctccagcagcacaagctcctcaaggtcatccgcaagaagctcgtccgcaagaccctcgacatgatcaagaagatcgccgacgacaagtacaacgacaccttctggaaggagttcggcaccaacatcaagctcggcgtcatcgaggaccactccaaccgcacccgcctcgccaagctcctccgcttccagtcctcccaccaccccaccgacatcacctccctcgaccagtacgtcgagcgcatgaaggagaagcaggacaagatctacttcatggccggctcctcccgcaaggaggccgagtcctcccccttcgtcgagcgcctcctcaagaagggctacgaggtcatctacctcaccgagcccgtcgacgagtactgcatccaggccctccccgagttcgacggcaagcgcttccagaacgtcgccaaggagggcgtcaagttcgacgagtccgagaagaccaaggagtcccgcgaggccgtcgagaaggagttcgagcccctcctcaactggatgaaggacaaggccctcaaggacaagatcgagaaggccgtcgtctcccagcgcctcaccgagtccccctgcgccctcgtcgcctcccagtacggctggtccggcaacatggagcgcatcatgaaggcccaggcctaccagaccggcaaggacatctccaccaactactacgcctcccagaagaagaccttcgagatcaacccccgccaccccctcatccgcgacatgctccgccgcatcaaggaggacgaggacgacaagaccgtcctcgacctcgccgtcgtcctcttcgagaccgccaccctccgctccggctacctcctccccgacaccaaggcctacggcgaccgcatcgagcgcatgctccgcctctccctcaacatcgaccccgacgccaaggtcgaggaggagcccgaggaggagcccgaggagaccgccgaggacaccaccgaggacaccgagcaggacgaggacgaggagatggacgtcggcaccgacgaggaggagaccgccaaggagtccaccgccgagaaggacgagctctga

SEQ ID NO: 8637 - RNA, 2409 nt, synthetic construct
  misc_feature 1..2409: note = derived and/or modified sequence opt3 fromHSP90B1__Homo_sapiens__CAI64497
  source 1..2409: mol_type = other RNA
atgagagccctgtgggtgctcggcctttgctgtgtcctgttgaccttcgggagcgttagggctgacgatgaggtggacgtagatggaacagtggaagaggacttaggtaagtcccgggaaggctctcgcactgatgacgaggtcgtgcagcgagaagaggaggcaatccaactggatgggctaaacgcctcacagattcgtgaactcagagagaaaagtgaaaagtttgcgttccaggctgaggttaataggatgatgaaactgataatcaacagcctttacaagaataaagagatttttctgcgggaattgatctccaacgcctctgacgcactcgataagattcgcctgatctcgctgacggacgagaatgccctctcaggaaacgaagagttaaccgtgaagataaaatgcgataaggagaaaaatctgcttcacgtcacagacactggcgtgggtatgaccagagaggagttggtaaagaacctggggacaatcgctaaaagcggaaccagtgagttcctaaataagatgactgaagcacaggaagatggccaatccacatctgagctcattggccagtttggggttggattctatagcgcctttctggtggctgacaaggtcatcgtgacctccaaacataacaatgacacgcagcacatttgggaatcagatagtaacgagttcagcgtgatcgccgaccccaggggtaatactcttggccgggggaccacaataactctggtcttgaaggaggaagcgtctgattacctcgagctggacaccattaaaaacttagttaagaaatattcccagtttatcaatttccctatttacgtgtggtcaagcaagacagaaaccgtagaggaaccaatggaggaggaagaggcagccaaagaagagaaggaggaaagtgatgacgaggctgccgtggaagaggaagaggaggaaaagaaaccgaagacgaaaaaggtcgagaaaactgtgtgggattgggaactgatgaacgacatcaagcccatctggcaacgcccttctaaggaggttgaagaggatgagtataaagcattttacaagtccttcagcaaagaatcggacgatccaatggcttatattcattttacagccgagggagaagtgaccttcaagtctatactcttcgtccccacttccgcgcctcgaggcctttttgacgagtacggtagtaaaaagtcagactacatcaagctgtatgtgagaagggtattcattacagatgactttcacgatatgatgccaaaatacttgaacttcgttaagggggtggtcgacagcgatgacctacccctgaatgtgtcccgggaaaccctccagcagcataaactgcttaaggtcatccgtaaaaagctggtgcgcaagacgttggatatgattaaaaagatagccgacgataaatataacgacaccttttggaaggagttcggaacaaatatcaaactcggcgttatcgaggatcactctaacagaactaggctggcaaagttactgcggtttcagagctcacaccatcctaccgacattacaagtctagatcaatacgtggaacgaatgaaagagaagcaggacaagatctatttcatggctggctccagccgcaaagaagccgagtcttcaccatttgtagagagactcctgaagaaagggtacgaagtcatttatcttactgagccggtggacgaatactgtatacaggctttgcccgagttcgatggaaagaggtttcaaaatgttgccaaagaaggtgtgaagttcgacgagagtgagaagaccaaagaaagccgggaggcagtcgaaaaggagtttgaacctctgctcaactggatgaaagataaggccctgaaagacaagatcgagaaggctgtggtatcccagcgccttacagagtctccatgcgcgctggtggcatcgcagtacggctggagcgggaatatggaaagaattatgaaagcccaggcttatcaaaccggaaaggatatctccactaactactatgcctcacagaaaaagacgttcgagatcaatcccaggcaccctttgattcgtgacatgctccggcgaataaaagaagatgaggacgataagacagttctggacttagcagtcgtgctgttcgaaaccgccactctaagaagtggctacctcctgccagataccaaggcttatggtgacaggatcgagcgcatgcttcggttgtctctgaacattgatcccgacgccaaagtggaggaagaaccggaagaggagcctgaagagacagcagaagacaccactgaggatacagaacaggacgaggatgaggaaatggacgtcgggacggatgaggaagagaccgcgaaggaaagcactgctgagaaagacgagctctga

SEQ ID NO: 8638 - RNA, 2409 nt, synthetic construct
  misc_feature 1..2409: note = derived and/or modified sequence opt4 fromHSP90B1__Homo_sapiens__CAI64497
  source 1..2409: mol_type = other RNA
atgagagccctgtgggtgctgggcctgtgctgcgtgctgctgaccttcggcagcgtgagagccgacgacgaggtggacgtggacggcaccgtggaggaggacctgggcaagagcagagagggcagcagaaccgacgacgaggtggtgcagagagaggaggaggccatccagctggacggcctgaacgccagccagatcagagagctgagagagaagagcgagaagttcgccttccaggccgaggtgaacagaatgatgaagctgatcatcaacagcctgtacaagaacaaggagatcttcctgagagagctgatcagcaacgccagcgacgccctggacaagatcagactgatcagcctgaccgacgagaacgccctgagcggcaacgaggagctgaccgtgaagatcaagtgcgacaaggagaagaacctgctgcacgtgaccgacaccggcgtgggcatgaccagagaggagctggtgaagaacctgggcaccatcgccaagagcggcaccagcgagttcctgaacaagatgaccgaggcccaggaggacggccagagcaccagcgagctgatcggccagttcggcgtgggcttctacagcgccttcctggtggccgacaaggtgatcgtgaccagcaagcacaacaacgacacccagcacatctgggagagcgacagcaacgagttcagcgtgatcgccgaccccagaggcaacaccctgggcagaggcaccaccatcaccctggtgctgaaggaggaggccagcgactacctggagctggacaccatcaagaacctggtgaagaagtacagccagttcatcaacttccccatctacgtgtggagcagcaagaccgagaccgtggaggagcccatggaggaggaggaggccgccaaggaggagaaggaggagagcgacgacgaggccgccgtggaggaggaggaggaggagaagaagcccaagaccaagaaggtggagaagaccgtgtgggactgggagctgatgaacgacatcaagcccatctggcagagacccagcaaggaggtggaggaggacgagtacaaggccttctacaagagcttcagcaaggagagcgacgaccccatggcctacatccacttcaccgccgagggcgaggtgaccttcaagagcatcctgttcgtgcccaccagcgcccccagaggcctgttcgacgagtacggcagcaagaagagcgactacatcaagctgtacgtgagaagagtgttcatcaccgacgacttccacgacatgatgcccaagtacctgaacttcgtgaagggcgtggtggacagcgacgacctgcccctgaacgtgagcagagagaccctgcagcagcacaagctgctgaaggtgatcagaaagaagctggtgagaaagaccctggacatgatcaagaagatcgccgacgacaagtacaacgacaccttctggaaggagttcggcaccaacatcaagctgggcgtgatcgaggaccacagcaacagaaccagactggccaagctgctgagattccagagcagccaccaccccaccgacatcaccagcctggaccagtacgtggagagaatgaaggagaagcaggacaagatctacttcatggccggcagcagcagaaaggaggccgagagcagccccttcgtggagagactgctgaagaagggctacgaggtgatctacctgaccgagcccgtggacgagtactgcatccaggccctgcccgagttcgacggcaagagattccagaacgtggccaaggagggcgtgaagttcgacgagagcgagaagaccaaggagagcagagaggccgtggagaaggagttcgagcccctgctgaactggatgaaggacaaggccctgaaggacaagatcgagaaggccgtggtgagccagagactgaccgagagcccctgcgccctggtggccagccagtacggctggagcggcaacatggagagaatcatgaaggcccaggcctaccagaccggcaaggacatcagcaccaactactacgccagccagaagaagaccttcgagatcaaccccagacaccccctgatcagagacatgctgagaagaatcaaggaggacgaggacgacaagaccgtgctggacctggccgtggtgctgttcgagaccgccaccctgagaagcggctacctgctgcccgacaccaaggcctacggcgacagaatcgagagaatgctgagactgagcctgaacatcgaccccgacgccaaggtggaggaggagcccgaggaggagcccgaggagaccgccgaggacaccaccgaggacaccgagcaggacgaggacgaggagatggacgtgggcaccgacgaggaggagaccgccaaggagagcaccgccgagaaggacgagctgtga

SEQ ID NO: 8639 - RNA, 2409 nt, synthetic construct
  misc_feature 1..2409: note = derived and/or modified sequence opt5 fromHSP90B1__Homo_sapiens__CAI64497
  source 1..2409: mol_type = other RNA
atgagagccctgtgggtgctcggcctgtgctgtgtccttctgaccttcgggagcgttcgggctgacgatgaggtggacgtggatggaacagtcgaagaggacctcggcaagtcccgcgaagggtctagaacggatgacgaggtggttcagcgggaagaggaggccatccaactggatggacttaacgcgagccagattcgcgaactgagagagaaatccgaaaagtttgctttccaggccgaggtgaatcggatgatgaaactcatcattaactctctgtacaagaataaagagatctttctgcgcgaactcattagcaacgcctccgacgctctggataagatcagacttatctctctgaccgacgagaatgccctcagcggcaacgaagaactgacagtcaagattaaatgcgataaggagaaaaatcttctgcacgtgaccgacacaggggttggaatgacccgggaggagctcgtgaagaacctgggcacaatcgctaaatccggcaccagcgagttcctgaataagatgacggaggcccaggaagatgggcaatctacctccgagctcattggacagtttggcgtcgggttctatagcgcgtttctggtggccgacaaggtgatcgtcacatctaaacataacaatgacacccagcacatttgggaatccgatagcaacgagttctctgttatcgctgacccccgcggaaatacacttggcagagggaccacgattacactggtgctcaaggaggaagcctccgattacctggagcttgacaccatcaaaaacctggtgaagaaatatagccagtttatcaatttccctatttacgtctggtcctctaagacagaaaccgtggaggaaccgatggaggaggaagaggctgccaaagaagagaaggaggaaagcgatgacgaggcggccgttgaagaggaagaggaggaaaagaaacccaagaccaaaaaggtggagaaaacagtctgggattgggaactcatgaacgacatcaagcctatttggcaacggccctccaaggaggtggaagaggatgagtataaagccttttacaagagcttctctaaagaatccgacgatcctatggcttatatccattttacggctgagggagaagttaccttcaagagcattctgttcgtgcccacatctgcccctcgcggcctgtttgacgagtacggcagcaaaaagtccgactacatcaagctctatgtcagacgggtgttcatcaccgatgactttcacgatatgatgccgaaatacctgaacttcgtcaagggggtggttgactctgatgaccttcccctgaatgtgagccgcgaaacactccagcagcataaactgcttaaggtcattcggaaaaagctggtgagaaagaccctcgatatgatcaaaaagattgccgacgataaatataacgacacgttttggaaggagttcggaacaaatatcaaactgggcgttattgaggatcactccaacagaacccgcctggctaagctcctgcggtttcagagctctcaccatcctaccgacatcacatcccttgatcaatacgtggaaagaatgaaagagaagcaggacaagatctatttcatggcggggagctctcgcaaagaagccgagtccagcccctttgtcgagcggctgctcaagaaaggatacgaagtgatttatctgaccgagcctgtggacgaatactgtatccaggctctgcccgagttcgatggcaagagatttcaaaatgttgccaaagaaggggtcaagttcgacgagtccgagaagacaaaagaatctcgcgaggccgtggaaaaggagtttgaaccgcttctcaactggatgaaagataaggctctgaaagacaagattgagaaggccgtggtcagccagcggctgacggagtccccttgcgcgctcgtggcttctcagtacggatggagcggcaatatggaaagaatcatgaaagcccaggcctatcaaaccggcaaggatatttccacaaactactatgctagccagaaaaagaccttcgagatcaatccccgccaccctctgattcgggacatgcttagacgcatcaaagaagatgaggacgataagacagttctggacctcgccgtggtcctgttcgaaaccgctacgctgcggtctgggtaccttctccccgataccaaggcctatggagacagaatcgagcggatgctgcgcctgtccctcaacattgatcccgacgcgaaagtggaggaagaacctgaagaggagccggaagagacagccgaagacaccacagaggataccgaacaggacgaggatgaggaaatggacgttggcacggatgaggaagagacagctaaggaaagcaccgccgagaaagacgagctgtga

SEQ ID NO: 8640 - protein, 756 aa, synthetic construct
  REGION 1..756: note = IKK__Homo_sapiens__O14920
MSWSPSLTTQTCGAWEMKERLGTGGFGNVIRWHNQETGEQIAIKQCRQELSPRNRERWCLEIQIMRRLTHPNVVAARDVPEGMQNLAPNDLPLLAMEYCQGGDLRKYLNQFENCCGLREGAILTLLSDIASALRYLHENRIIHRDLKPENIVLQQGEQRLIHKIIDLGYAKELDQGSLCTSFVGTLQYLAPELLEQQKYTVTVDYWSFGTLAFECITGFRPFLPNWQPVQWHSKVRQKSEVDIVVSEDLNGTVKFSSSLPYPNNLNSVLAERLEKWLQLMLMWHPRQRGTDPTYGPNGCFKALDDILNLKLVHILNMVTGTIHTYPVTEDESLQSLKARIQQDTGIPEEDQELLQEAGLALIPDKPATQCISDGKLNEGHTLDMDLVFLFDNSKITYETQISPRPQPESVSCILQEPKRNLAFFQLRKVWGQVWHSIQTLKEDCNRLQQGQRAAMMNLLRNNSCLSKMKNSMASMSQQLKAKLDFFKTSIQIDLEKYSEQTEFGITSDKLLLAWREMEQAVELCGRENEVKLLVERMMALQTDIVDLQRSPMGRKQGGTLDDLEEQARELYRRLREKPRDQRTEGDSQEMVRLLLQAIQSFEKKVRVIYTQLSKTVVCKQKALELLPKVEEVVSLMNEDEKTVVRLQEKRQKELWNLLKIACSKVRGPVSGSPDSMNASRLSQPGQLMSQPSTASNSLPEPAKKSEELVAEAHNLCTLLENAIQDTVREQDQSFTALDWSWLQTEEEEHSCLEQAS

SEQ ID NO: 8641 - RNA, 2271 nt, synthetic construct
  misc_feature 1..2271: note = IKK__Homo_sapiens__AAD08997
  source 1..2271: mol_type = other RNA
atgagctggtcaccttccctgacaacgcagacatgtggggcctgggaaatgaaagagcgccttgggacagggggatttggaaatgtcatccgatggcacaatcaggaaacaggtgagcagattgccatcaagcagtgccggcaggagctcagcccccggaaccgagagcggtggtgcctggagatccagatcatgagaaggctgacccaccccaatgtggtggctgcccgagatgtccctgaggggatgcagaacttggcgcccaatgacctgcccctgctggccatggagtactgccaaggaggagatctccggaagtacctgaaccagtttgagaactgctgtggtctgcgggaaggtgccatcctcaccttgctgagtgacattgcctctgcgcttagataccttcatgaaaacagaatcatccatcgggatctaaagccagaaaacatcgtcctgcagcaaggagaacagaggttaatacacaaaattattgacctaggatatgccaaggagctggatcagggcagtctttgcacatcattcgtggggaccctgcagtacctggccccagagctactggagcagcagaagtacacagtgaccgtcgactactggagcttcggcaccctggcctttgagtgcatcacgggcttccggcccttcctccccaactggcagcccgtgcagtggcattcaaaagtgcggcagaagagtgaggtggacattgttgttagcgaagacttgaatggaacggtgaagttttcaagctctttaccctaccccaataatcttaacagtgtcctggctgagcgactggagaagtggctgcaactgatgctgatgtggcacccccgacagaggggcacggatcccacgtatgggcccaatggctgcttcaaggccctggatgacatcttaaacttaaagctggttcatatcttgaacatggtcacgggcaccatccacacctaccctgtgacagaggatgagagtctgcagagcttgaaggccagaatccaacaggacacgggcatcccagaggaggaccaggagctgctgcaggaagcgggcctggcgttgatccccgataagcctgccactcagtgtatttcagacggcaagttaaatgagggccacacattggacatggatcttgtttttctctttgacaacagtaaaatcacctatgagactcagatctccccacggccccaacctgaaagtgtcagctgtatccttcaagagcccaagaggaatctcgccttcttccagctgaggaaggtgtggggccaggtctggcacagcatccagaccctgaaggaagattgcaaccggctgcagcagggacagcgagccgccatgatgaatctcctccgaaacaacagctgcctctccaaaatgaagaattccatggcttccatgtctcagcagctcaaggccaagttggatttcttcaaaaccagcatccagattgacctggagaagtacagcgagcaaaccgagtttgggatcacatcagataaactgctgctggcctggagggaaatggagcaggctgtggagctctgtgggcgggagaacgaagtgaaactcctggtagaacggatgatggctctgcagaccgacattgtggacttacagaggagccccatgggccggaagcaggggggaacgctggacgacctagaggagcaagcaagggagctgtacaggagactaagggaaaaacctcgagaccagcgaactgagggtgacagtcaggaaatggtacggctgctgcttcaggcaattcagagcttcgagaagaaagtgcgagtgatctatacgcagctcagtaaaactgtggtttgcaagcagaaggcgctggaactgttgcccaaggtggaagaggtggtgagcttaatgaatgaggatgagaagactgttgtccggctgcaggagaagcggcagaaggagctctggaatctcctgaagattgcttgtagcaaggtccgtggtcctgtcagtggaagcccggatagcatgaatgcctctcgacttagccagcctgggcagctgatgtctcagccctccacggcctccaacagcttacctgagccagccaagaagagtgaagaactggtggctgaagcacataacctctgcaccctgctagaaaatgccatacaggacactgtgagggaacaagaccagagtttcacggccctagactggagctggttacagacggaagaagaagagcacagctgcctggagcaggcctcatga

SEQ ID NO: 8642 - RNA, 2271 nt, synthetic construct
  misc_feature 1..2271: note = derived and/or modified sequence opt1 fromIKK__Homo_sapiens__AAD08997
  source 1..2271: mol_type = other RNA
atgagctggtcccccagcctgaccacccagacgtgcggcgcctgggagatgaaggagcgcctcgggaccggcgggttcggcaacgtgatccggtggcacaaccaggagaccggggagcagatcgccatcaagcagtgccgccaggagctgtccccgcggaaccgcgagcggtggtgcctggagatccagatcatgcgccggctcacccaccccaacgtcgtggcggcccgcgacgtgcccgagggcatgcagaacctggcccccaacgacctgccgctcctggccatggagtactgccagggcggggacctgcggaagtacctcaaccagttcgagaactgctgcggcctgcgcgagggggccatcctgacgctcctgagcgacatcgcgtccgccctgcggtacctccacgagaaccgcatcatccaccgggacctgaagcccgagaacatcgtcctgcagcagggcgagcagcgcctcatccacaagatcatcgacctggggtacgccaaggagctggaccagggcagcctctgcacctccttcgtgggcaccctgcagtacctggcccccgagctcctggagcagcagaagtacaccgtgacggtcgactactggagcttcgggaccctggcgttcgagtgcatcaccggcttccggcccttcctcccgaactggcagcccgtgcagtggcactccaaggtgcgccagaagtccgaggtcgacatcgtggtgagcgaggacctgaacgggaccgtcaagttcagctccagcctgccctaccccaacaacctcaactccgtgctggccgagcggctggagaagtggctccagctgatgctgatgtggcacccgcgccagcggggcacggaccccacctacggccccaacgggtgcttcaaggccctcgacgacatcctgaacctgaagctcgtgcacatcctgaacatggtcaccggcaccatccacacgtaccccgtgaccgaggacgagagcctgcagtccctcaaggcccgcatccagcaggacaccgggatcccggaggaggaccaggagctgctgcaggaggccggcctcgcgctgatccccgacaagcccgccacccagtgcatcagcgacgggaagctgaacgagggccacacgctcgacatggacctggtgttcctgttcgacaactccaagatcacctacgagacccagatcagcccccggccgcagcccgagagcgtctcctgcatcctgcaggagcccaagcgcaacctcgccttcttccagctgcgcaaggtgtggggccaggtgtggcacagcatccagaccctgaaggaggactgcaaccggctccagcaggggcagcgcgccgccatgatgaacctgctgcggaacaactcctgcctcagcaagatgaagaactccatggcgagcatgtcccagcagctgaaggccaagctggacttcttcaagacgagcatccagatcgacctcgagaagtactccgagcagaccgagttcggcatcaccagcgacaagctgctgctcgcctggcgcgagatggagcaggccgtcgagctgtgcgggcgggagaacgaggtgaagctgctcgtggagcgcatgatggccctgcagaccgacatcgtcgacctgcagcggtcccccatgggccgcaagcagggcgggacgctcgacgacctggaggagcaggcgcgggagctgtaccgccggctccgcgagaagccgcgggaccagcgcaccgagggcgacagccaggagatggtgcggctgctgctccaggccatccagtccttcgagaagaaggtccgcgtgatctacacccagctgagcaagaccgtggtctgcaagcagaaggccctggagctcctgcccaaggtggaggaggtggtctccctgatgaacgaggacgagaagacggtggtgcggctccaggagaagcgccagaaggagctgtggaacctgctcaagatcgcctgcagcaaggtccgggggcccgtgtccggcagccccgactccatgaacgccagccgcctgagccagccggggcagctgatgtcccagcccagcaccgcgtccaacagcctccccgagccggccaagaagtccgaggagctggtggccgaggcccacaacctgtgcaccctcctggagaacgcgatccaggacaccgtccgcgagcaggaccagagcttcacggccctggactggtcctggctccagaccgaggaggaggagcacagctgcctggagcaggcctcctga

SEQ ID NO: 8643 - RNA, 2271 nt, synthetic construct
  misc_feature 1..2271: note = derived and/or modified sequence opt2 fromIKK__Homo_sapiens__AAD08997
  source 1..2271: mol_type = other RNA
atgtcctggtccccctccctcaccacccagacctgcggcgcctgggagatgaaggagcgcctcggcaccggcggcttcggcaacgtcatccgctggcacaaccaggagaccggcgagcagatcgccatcaagcagtgccgccaggagctctccccccgcaaccgcgagcgctggtgcctcgagatccagatcatgcgccgcctcacccaccccaacgtcgtcgccgcccgcgacgtccccgagggcatgcagaacctcgcccccaacgacctccccctcctcgccatggagtactgccagggcggcgacctccgcaagtacctcaaccagttcgagaactgctgcggcctccgcgagggcgccatcctcaccctcctctccgacatcgcctccgccctccgctacctccacgagaaccgcatcatccaccgcgacctcaagcccgagaacatcgtcctccagcagggcgagcagcgcctcatccacaagatcatcgacctcggctacgccaaggagctcgaccagggctccctctgcacctccttcgtcggcaccctccagtacctcgcccccgagctcctcgagcagcagaagtacaccgtcaccgtcgactactggtccttcggcaccctcgccttcgagtgcatcaccggcttccgccccttcctccccaactggcagcccgtccagtggcactccaaggtccgccagaagtccgaggtcgacatcgtcgtctccgaggacctcaacggcaccgtcaagttctcctcctccctcccctaccccaacaacctcaactccgtcctcgccgagcgcctcgagaagtggctccagctcatgctcatgtggcacccccgccagcgcggcaccgaccccacctacggccccaacggctgcttcaaggccctcgacgacatcctcaacctcaagctcgtccacatcctcaacatggtcaccggcaccatccacacctaccccgtcaccgaggacgagtccctccagtccctcaaggcccgcatccagcaggacaccggcatccccgaggaggaccaggagctcctccaggaggccggcctcgccctcatccccgacaagcccgccacccagtgcatctccgacggcaagctcaacgagggccacaccctcgacatggacctcgtcttcctcttcgacaactccaagatcacctacgagacccagatctccccccgcccccagcccgagtccgtctcctgcatcctccaggagcccaagcgcaacctcgccttcttccagctccgcaaggtctggggccaggtctggcactccatccagaccctcaaggaggactgcaaccgcctccagcagggccagcgcgccgccatgatgaacctcctccgcaacaactcctgcctctccaagatgaagaactccatggcctccatgtcccagcagctcaaggccaagctcgacttcttcaagacctccatccagatcgacctcgagaagtactccgagcagaccgagttcggcatcacctccgacaagctcctcctcgcctggcgcgagatggagcaggccgtcgagctctgcggccgcgagaacgaggtcaagctcctcgtcgagcgcatgatggccctccagaccgacatcgtcgacctccagcgctcccccatgggccgcaagcagggcggcaccctcgacgacctcgaggagcaggcccgcgagctctaccgccgcctccgcgagaagccccgcgaccagcgcaccgagggcgactcccaggagatggtccgcctcctcctccaggccatccagtccttcgagaagaaggtccgcgtcatctacacccagctctccaagaccgtcgtctgcaagcagaaggccctcgagctcctccccaaggtcgaggaggtcgtctccctcatgaacgaggacgagaagaccgtcgtccgcctccaggagaagcgccagaaggagctctggaacctcctcaagatcgcctgctccaaggtccgcggccccgtctccggctcccccgactccatgaacgcctcccgcctctcccagcccggccagctcatgtcccagccctccaccgcctccaactccctccccgagcccgccaagaagtccgaggagctcgtcgccgaggcccacaacctctgcaccctcctcgagaacgccatccaggacaccgtccgcgagcaggaccagtccttcaccgccctcgactggtcctggctccagaccgaggaggaggagcactcctgcctcgagcaggcctcctga

SEQ ID NO: 8644 - RNA, 2271 nt, synthetic construct
  misc_feature 1..2271: note = derived and/or modified sequence opt3 fromIKK__Homo_sapiens__AAD08997
  source 1..2271: mol_type = other RNA
atgagctggtccccctctctgaccacacagacttgcggcgcctgggagatgaaggaaagactcgggacgggaggtttcggcaacgtgatcaggtggcacaatcaagagaccggggaacagattgctataaaacagtgtcggcaggagctttcacctcgcaaccgagaacgttggtgcctggagatccaaattatgagaaggttgacacatccaaatgtcgttgcagcccgggacgtgccggagggaatgcagaacttagcgcccaatgatctgcctctactcgctatggaatactgtcagggcggtgacctgcgcaagtatcttaaccagtttgagaattgctgtgggctgagagaaggagccatcttgactctcctgagtgatattgcaagcgccctgaggtacctccacgagaaccggatcatacatcgcgacttaaaaccagagaatatcgtactgcaacagggcgaacagcgacttattcacaagatcattgatttgggctatgctaaagagctggaccaggggtccctatgcacctctttcgtgggaacactccaatacctggcacccgaacttctggagcagcagaagtataccgtcactgtggattactggtcgtttggtacattggccttcgaatgtatcaccggctttagacctttcctcccaaactggcaacccgttcagtggcattcaaaggtgaggcagaaaagcgaggtcgacatagtggtaagtgaggatctgaatgggacggttaagttttcctctagcttaccttatccaaacaatctgaactccgtgctcgctgaacggcttgagaaatggctgcagttgatgctaatgtggcacccgcgtcaacgcggaactgaccccacctacggccctaatggttgcttcaaggccctggatgacattctcaacctgaaacttgtccacatcctgaacatggtgacagggactattcatacctacccagtgacagaagatgagtcattgcagagtctcaaggcgagaatccagcaggacaccggaatccccgaagaggaccaagagctgttacaggaagcaggcctggccctaattcctgataagccagctacgcagtgtataagcgacggcaaactcaatgaggggcacactctggatatggaccttgtctttttgttcgataactctaagatcacatatgaaacccagatttcccccaggccgcaacctgagtcagttagctgcatcctgcaggaacccaaacggaatctcgcctttttccagctgcgaaaggtgtggggacaggtatggcatagtatacaaactcttaaagaggactgtaaccgcctgcagcagggtcaaagagcagctatgatgaatttgctcaggaacaattcttgcctgtccaagatgaaaaacagcatggcctcgatgtctcagcagttaaaggcgaagctggactttttcaaaacatccattcagatcgatctagagaagtactcagaacaaaccgagttcggcatcacgagtgataaactcctgcttgcctggcgggaaatggagcaggcagtggagttgtgcgggcgcgaaaatgaggtcaagctgctcgtggaaagaatgatggctctgcagaccgacattgttgatttacagaggagcccaatgggacgtaaacaaggcggtacactggacgaccttgaggaacaggcccgggagttgtatcgaagactcagggagaagcctcgcgatcagcggactgaaggggactcccaggagatggtgagactgctactgcaagctatccagtcttttgaaaagaaagtcagggtgatttacacccagctcagcaagacagtagtttgtaaacaaaaggccctggagcttttgcccaaagtggaagaggtcgtgtcactgatgaacgaggatgaaaagactgtcgtgcgcttacaggagaagcgacagaaagaactctggaatctgcttaagatagcatgcagtaaagttcggggcccagtgtccggaagccccgactctatgaacgcctcacgtctgagtcagcctggccaattgatgagccagccatccaccgcttctaattcgctcccggagcccgcgaagaaaagcgaggaactggtagcagaggcccacaacctatgtacactgctcgaaaatgctatccaggataccgtcagagagcaggaccaatccttcactgccctggattggtcatggcttcagacggaagaggaggaacacagttgcttggagcaggcatcttga

SEQ ID NO: 8645 - RNA, 2271 nt, synthetic construct
  misc_feature 1..2271: note = derived and/or modified sequence opt4 fromIKK__Homo_sapiens__AAD08997
  source 1..2271: mol_type = other RNA
atgagctggagccccagcctgaccacccagacctgcggcgcctgggagatgaaggagagactgggcaccggcggcttcggcaacgtgatcagatggcacaaccaggagaccggcgagcagatcgccatcaagcagtgcagacaggagctgagccccagaaacagagagagatggtgcctggagatccagatcatgagaagactgacccaccccaacgtggtggccgccagagacgtgcccgagggcatgcagaacctggcccccaacgacctgcccctgctggccatggagtactgccagggcggcgacctgagaaagtacctgaaccagttcgagaactgctgcggcctgagagagggcgccatcctgaccctgctgagcgacatcgccagcgccctgagatacctgcacgagaacagaatcatccacagagacctgaagcccgagaacatcgtgctgcagcagggcgagcagagactgatccacaagatcatcgacctgggctacgccaaggagctggaccagggcagcctgtgcaccagcttcgtgggcaccctgcagtacctggcccccgagctgctggagcagcagaagtacaccgtgaccgtggactactggagcttcggcaccctggccttcgagtgcatcaccggcttcagacccttcctgcccaactggcagcccgtgcagtggcacagcaaggtgagacagaagagcgaggtggacatcgtggtgagcgaggacctgaacggcaccgtgaagttcagcagcagcctgccctaccccaacaacctgaacagcgtgctggccgagagactggagaagtggctgcagctgatgctgatgtggcaccccagacagagaggcaccgaccccacctacggccccaacggctgcttcaaggccctggacgacatcctgaacctgaagctggtgcacatcctgaacatggtgaccggcaccatccacacctaccccgtgaccgaggacgagagcctgcagagcctgaaggccagaatccagcaggacaccggcatccccgaggaggaccaggagctgctgcaggaggccggcctggccctgatccccgacaagcccgccacccagtgcatcagcgacggcaagctgaacgagggccacaccctggacatggacctggtgttcctgttcgacaacagcaagatcacctacgagacccagatcagccccagaccccagcccgagagcgtgagctgcatcctgcaggagcccaagagaaacctggccttcttccagctgagaaaggtgtggggccaggtgtggcacagcatccagaccctgaaggaggactgcaacagactgcagcagggccagagagccgccatgatgaacctgctgagaaacaacagctgcctgagcaagatgaagaacagcatggccagcatgagccagcagctgaaggccaagctggacttcttcaagaccagcatccagatcgacctggagaagtacagcgagcagaccgagttcggcatcaccagcgacaagctgctgctggcctggagagagatggagcaggccgtggagctgtgcggcagagagaacgaggtgaagctgctggtggagagaatgatggccctgcagaccgacatcgtggacctgcagagaagccccatgggcagaaagcagggcggcaccctggacgacctggaggagcaggccagagagctgtacagaagactgagagagaagcccagagaccagagaaccgagggcgacagccaggagatggtgagactgctgctgcaggccatccagagcttcgagaagaaggtgagagtgatctacacccagctgagcaagaccgtggtgtgcaagcagaaggccctggagctgctgcccaaggtggaggaggtggtgagcctgatgaacgaggacgagaagaccgtggtgagactgcaggagaagagacagaaggagctgtggaacctgctgaagatcgcctgcagcaaggtgagaggccccgtgagcggcagccccgacagcatgaacgccagcagactgagccagcccggccagctgatgagccagcccagcaccgccagcaacagcctgcccgagcccgccaagaagagcgaggagctggtggccgaggcccacaacctgtgcaccctgctggagaacgccatccaggacaccgtgagagagcaggaccagagcttcaccgccctggactggagctggctgcagaccgaggaggaggagcacagctgcctggagcaggccagctga

SEQ ID NO: 8646 - RNA, 2271 nt, synthetic construct
  misc_feature 1..2271: note = derived and/or modified sequence opt5 fromIKK__Homo_sapiens__AAD08997
  source 1..2271: mol_type = other RNA
atgagctggtccccctctctgaccacacagacgtgcggcgcctgggagatgaaggaaagactcgggaccggaggcttcgggaacgtgatccggtggcacaatcaagagacaggagaacagattgctatcaaacagtgtcgccaggagctgagccctagaaaccgggaacgctggtgccttgagattcaaatcatgagacggctgacccatccgaatgtcgttgccgcgcgcgacgtgcccgagggcatgcagaacctcgctcctaatgatctgccccttctggccatggaatactgtcagggaggagacctcagaaagtatctgaaccagtttgagaattgctgtggcctgcgggaaggcgccattctcacactgctttccgatatcgcttctgccctgcgctacctccacgagaacagaatcattcatcgggacctgaaacctgagaatatcgtgcttcaacagggggaacagcgcctgattcacaagatcattgatctcggatatgctaaagagctggaccagggcagcctgtgcacctccttcgtcgggacactccaatacctggcccccgaacttctggagcagcagaagtataccgtgacggttgattactggtcttttggaaccctcgcgttcgaatgtatcacaggctttagacctttcctgccgaactggcaacccgtgcagtggcatagcaaggtccggcagaaatccgaggtggacattgttgtgagcgaggatcttaatgggaccgtcaagttttcttccagcctgccttatcccaacaatctcaactctgtgctggccgaacgcctggagaaatggctccagctgatgcttatgtggcaccctagacaacggggaacagaccccacctacggcccgaatggctgcttcaaggctctggatgacatcctcaacctgaaacttgtgcacatcctgaacatggtcacggggacaattcatacctaccctgttacagaagatgagtccctccagagcctgaaggccagaatccagcaggacaccgggattcccgaagaggaccaagagctgctccaggaagctggcctggcccttatccctgataagcccgcgacccagtgtatttctgacgggaaactgaatgagggacacacactcgatatggacctggtgtttctgttcgataactccaagatcacgtatgaaacccagatcagcccccgccctcaaccggagtccgtgtcttgcattcttcaggaacccaaacggaatctcgcctttttccagctgagaaaggtctggggccaggtgtggcatagcatccaaacactgaaagaggactgtaaccgcctccagcaggggcaacgggctgccatgatgaatctgcttagaaacaattcctgcctgagcaagatgaaaaactctatggcttccatgagccagcagctcaaggccaagctggactttttcaaaacctctattcagatcgatctggagaagtacagcgaacaaacagagttcggaattacctccgataaacttctcctggcctggcgcgaaatggagcaggctgttgagctgtgcggccgggaaaatgaggtgaagctcctggtcgaaagaatgatggcgcttcagacggacatcgtggatctgcagcgctctcctatgggccggaaacaagggggaacactcgacgacctggaggaacaggccagagagctgtatcgccggcttagagagaagccccgggatcagcgcaccgaaggcgacagccaggagatggttagactcctgctgcaagctatccagtcctttgaaaagaaagtgcgggtcatttacacccagctcagcaagacagtggtctgtaaacaaaaggccctggagcttctgcctaaagtggaagaggttgtgtctctcatgaacgaggatgaaaagaccgtcgtgagactgcaggagaagcgccagaaagaactgtggaatcttctcaagatcgcctgctccaaagttcgggggcccgtgagcggatctccggactccatgaacgctagcagactgtcccagcctggccaactgatgtctcagcccagcacagcctccaattctctccctgagcccgcgaagaaaagcgaggaactggtcgctgaggcccacaacctttgtacgctgctcgaaaatgccattcaggataccgtgcgcgagcaggaccaatccttcacagctctggattggagctggctgcagaccgaagaggaggaacactcttgccttgagcaggcctcctga

SEQ ID NO: 8647 - protein, 716 aa, synthetic construct
  REGION 1..716: note = IKK__Homo_sapiens__Q14164
MQSTANYLWHTDDLLGQGATASVYKARNKKSGELVAVKVFNTTSYLRPREVQVREFEVLRKLNHQNIVKLFAVEETGGSRQKVLVMEYCSSGSLLSVLESPENAFGLPEDEFLVVLRCVVAGMNHLRENGIVHRDIKPGNIMRLVGEEGQSIYKLTDFGAARELDDDEKFVSVYGTEEYLHPDMYERAVLRKPQQKAFGVTVDLWSIGVTLYHAATGSLPFIPFGGPRRNKEIMYRITTEKPAGAIAGAQRRENGPLEWSYTLPITCQLSLGLQSQLVPILANILEVEQAKCWGFDQFFAETSDILQRVVVHVFSLSQAVLHHIYIHAHNTIAIFQEAVHKQTSVAPRHQEYLFEGHLCVLEPSVSAQHIAHTTASSPLTLFSTAIPKGLAFRDPALDVPKFVPKVDLQADYNTAKGVLGAGYQALRLARALLDGQELMFRGLHWVMEVLQATCRRTLEVARTSLLYLSSSLGTERFSSVAGTPEIQELKAAAELRSRLRTLAEVLSRCSQNITETQESLSSLNRELVKSRDQVHEDRSIQQIQCCLDKMNFIYKQFKKSRMRPGLGYNEEQIHKLDKVNFSHLAKRLLQVFQEECVQKYQASLVTHGKRMRVVHETRNHLRLVGCSVAACNTEAQGVQESLSKLLEELSHQLLQDRAKGAQASPPPIAPYPSPTRKDLLLHMQELCEGMKLLASDLLDNNRIIERLNRVPAPPDV

SEQ ID NO: 8648 - RNA, 2151 nt, synthetic construct
  misc_feature 1..2151: note = IKK__Homo_sapiens__AAF45307
  source 1..2151: mol_type = other RNA
atgcagagcacagccaattacctgtggcacacagatgacctgctggggcagggggccactgccagtgtgtacaaggcccgcaacaagaaatccggagagctggttgctgtgaaggtcttcaacactaccagctacctgcggccccgcgaggtgcaggtgagggagtttgaggtcctgcggaagctgaaccaccagaacatcgtcaagctctttgcggtggaggagacgggcggaagccggcagaaggtactggtgatggagtactgctccagtgggagcctgctgagtgtgctggagagccctgagaatgcctttgggctgcctgaggatgagttcctggtggtgctgcgctgtgtggtggccggcatgaaccacctgcgggagaacggcattgtgcatcgcgacatcaagccggggaacatcatgcgcctcgtaggggaggaggggcagagcatctacaagctgacagacttcggcgctgcccgggagctggatgatgatgagaagttcgtctcggtctatgggactgaggagtacctgcatcccgacatgtatgagcgggcggtgcttcgaaagccccagcaaaaagcgttcggggtgactgtggatctctggagcattggagtgaccttgtaccatgcagccactggcagcctgcccttcatcccctttggtgggccacggcggaacaaggagatcatgtaccggatcaccacggagaagccggctggggccattgcaggtgcccagaggcgggagaacgggcccctggagtggagctacaccctccccatcacctgccagctgtcactggggctgcagagccagctggtgcccatcctggccaacatcctggaggtggagcaggccaagtgctggggcttcgaccagttctttgcggagaccagtgacatcctgcagcgagttgtcgtccatgtcttctccctgtcccaggcagtcctgcaccacatctatatccatgcccacaacacgatagccattttccaggaggccgtgcacaagcagaccagtgtggccccccgacaccaggagtacctctttgagggtcacctctgtgtcctcgagcccagcgtctcagcacagcacatcgcccacacgacggcaagcagccccctgaccctcttcagcacagccatccctaaggggctggccttcagggaccctgctctggacgtccccaagttcgtccccaaagtggacctgcaggcggattacaacactgccaagggcgtgttgggcgccggctaccaggccctgcggctggcacgggccctgctggatgggcaggagctaatgtttcgggggctgcactgggtcatggaggtgctccaggccacatgcagacggactctggaagtggcaaggacatccctcctctacctcagcagcagcctgggaactgagaggttcagcagcgtggctggaacgcctgagatccaggaactgaaggcggctgcagaactgaggtccaggctgcggactctagcggaggtcctctccagatgctcccaaaatatcacggagacccaggagagcctgagcagcctgaaccgggagctggtgaagagccgggatcaggtacatgaggacagaagcatccagcagattcagtgctgtttggacaagatgaacttcatctacaaacagttcaagaagtctaggatgaggccagggcttggctacaacgaggagcagattcacaagctggataaggtgaatttcagtcatttagccaaaagactcctgcaggtgttccaggaggagtgcgtgcagaagtatcaagcgtccttagtcacacacggcaagaggatgagggtggtgcacgagaccaggaaccacctgcgcctggttggctgttctgtggctgcctgtaacacagaagcccagggggtccaggagagtctcagcaagctcctggaagagctatctcaccagctccttcaggaccgagcaaagggggctcaggcctcgccgcctcccatagctccttaccccagccctacacgaaaggacctgcttctccacatgcaagagctctgcgaggggatgaagctgctggcatctgacctcctggacaacaaccgcatcatcgaacggctaaatagagtcccagcacctcctgatgtctga

SEQ ID NO: 8649 - RNA, 2151 nt, synthetic construct
  misc_feature 1..2151: note = derived and/or modified sequence opt1 fromIKK__Homo_sapiens__AAF45307
  source 1..2151: mol_type = other RNA
atgcagagcaccgccaactacctgtggcacaccgacgacctcctgggccagggggccacggcgtccgtgtacaaggcccgcaacaagaagtccggcgagctggtcgccgtgaaggtgttcaacaccacctcctacctccggccccgcgaggtccaggtgcgggagttcgaggtgctgcgcaagctgaaccaccagaacatcgtcaagctgttcgccgtggaggagaccgggggcagccggcagaaggtgctggtcatggagtactgctccagcgggtccctgctcagcgtgctggagtcccccgagaacgccttcggcctgcccgaggacgagttcctcgtggtcctgcgctgcgtggtggcgggcatgaaccacctccgggagaacgggatcgtccaccgcgacatcaagcccggcaacatcatgcggctcgtgggggaggagggccagagcatctacaagctgacggacttcggggccgcccgcgagctggacgacgacgagaagttcgtgtccgtctacggcaccgaggagtacctccaccccgacatgtacgagcgggccgtgctgcgcaagccgcagcagaaggcgttcggcgtgaccgtcgacctgtggagcatcggggtgaccctctaccacgccgccacgggctccctgcccttcatccccttcgggggcccccggcgcaacaaggagatcatgtaccggatcaccaccgagaagccggccggcgccatcgcgggggcccagcgccgggagaacggccccctggagtggagctacaccctccccatcacgtgccagctgtccctggggctccagagccagctggtgcccatcctggccaacatcctcgaggtcgagcaggccaagtgctggggcttcgaccagttcttcgccgagacctccgacatcctgcagcgcgtggtcgtgcacgtgttcagcctgtcccaggcggtcctccaccacatctacatccacgcccacaacaccatcgccatcttccaggaggccgtgcacaagcagaccagcgtggccccgcggcaccaggagtacctgttcgaggggcacctgtgcgtcctcgagcccagcgtgtccgcgcagcacatcgcccacacgaccgccagcagccccctgaccctgttcagcaccgccatccccaagggcctcgccttccgcgacccggcgctggacgtgcccaagttcgtccccaaggtggacctgcaggccgactacaacacggccaagggcgtgctcggggccggctaccaggcgctgcggctggcccgcgccctcctggacgggcaggagctgatgttccgcggcctccactgggtcatggaggtgctgcaggcgacctgccggcgcaccctggaggtggcccggacctccctgctctacctgagctccagcctggggacggagcgcttctccagcgtcgccggcacccccgagatccaggagctcaaggccgccgccgagctgcggtcccgcctgcggaccctcgccgaggtgctgagccgctgctcccagaacatcaccgagacgcaggagagcctgtccagcctcaaccgggagctggtgaagtcccgcgaccaggtccacgaggaccggagcatccagcagatccagtgctgcctggacaagatgaacttcatctacaagcagttcaagaagtcccgcatgcggccgggcctcgggtacaacgaggagcagatccacaagctggacaaggtgaacttcagccacctggcgaagcgcctcctgcaggtcttccaggaggagtgcgtgcagaagtaccaggccagcctggtgacccacggcaagcggatgcgcgtggtccacgagacccggaaccacctccgcctggtggggtgctccgtggccgcctgcaacaccgaggcccagggcgtccaggagagcctgtccaagctcctggaggagctgagccaccagctcctgcaggaccgggcgaagggggcccaggccagcccgccgcccatcgccccctacccctcccccacgcgcaaggacctgctcctgcacatgcaggagctgtgcgagggcatgaagctcctggcgtccgacctgctcgacaacaaccgcatcatcgagcggctgaaccgcgtgcccgccccgcccgacgtgtga

SEQ ID NO: 8650 - RNA, 2151 nt, synthetic construct
  misc_feature 1..2151: note = derived and/or modified sequence opt2 fromIKK__Homo_sapiens__AAF45307
  source 1..2151: mol_type = other RNA
atgcagtccaccgccaactacctctggcacaccgacgacctcctcggccagggcgccaccgcctccgtctacaaggcccgcaacaagaagtccggcgagctcgtcgccgtcaaggtcttcaacaccacctcctacctccgcccccgcgaggtccaggtccgcgagttcgaggtcctccgcaagctcaaccaccagaacatcgtcaagctcttcgccgtcgaggagaccggcggctcccgccagaaggtcctcgtcatggagtactgctcctccggctccctcctctccgtcctcgagtcccccgagaacgccttcggcctccccgaggacgagttcctcgtcgtcctccgctgcgtcgtcgccggcatgaaccacctccgcgagaacggcatcgtccaccgcgacatcaagcccggcaacatcatgcgcctcgtcggcgaggagggccagtccatctacaagctcaccgacttcggcgccgcccgcgagctcgacgacgacgagaagttcgtctccgtctacggcaccgaggagtacctccaccccgacatgtacgagcgcgccgtcctccgcaagccccagcagaaggccttcggcgtcaccgtcgacctctggtccatcggcgtcaccctctaccacgccgccaccggctccctccccttcatccccttcggcggcccccgccgcaacaaggagatcatgtaccgcatcaccaccgagaagcccgccggcgccatcgccggcgcccagcgccgcgagaacggccccctcgagtggtcctacaccctccccatcacctgccagctctccctcggcctccagtcccagctcgtccccatcctcgccaacatcctcgaggtcgagcaggccaagtgctggggcttcgaccagttcttcgccgagacctccgacatcctccagcgcgtcgtcgtccacgtcttctccctctcccaggccgtcctccaccacatctacatccacgcccacaacaccatcgccatcttccaggaggccgtccacaagcagacctccgtcgccccccgccaccaggagtacctcttcgagggccacctctgcgtcctcgagccctccgtctccgcccagcacatcgcccacaccaccgcctcctcccccctcaccctcttctccaccgccatccccaagggcctcgccttccgcgaccccgccctcgacgtccccaagttcgtccccaaggtcgacctccaggccgactacaacaccgccaagggcgtcctcggcgccggctaccaggccctccgcctcgcccgcgccctcctcgacggccaggagctcatgttccgcggcctccactgggtcatggaggtcctccaggccacctgccgccgcaccctcgaggtcgcccgcacctccctcctctacctctcctcctccctcggcaccgagcgcttctcctccgtcgccggcacccccgagatccaggagctcaaggccgccgccgagctccgctcccgcctccgcaccctcgccgaggtcctctcccgctgctcccagaacatcaccgagacccaggagtccctctcctccctcaaccgcgagctcgtcaagtcccgcgaccaggtccacgaggaccgctccatccagcagatccagtgctgcctcgacaagatgaacttcatctacaagcagttcaagaagtcccgcatgcgccccggcctcggctacaacgaggagcagatccacaagctcgacaaggtcaacttctcccacctcgccaagcgcctcctccaggtcttccaggaggagtgcgtccagaagtaccaggcctccctcgtcacccacggcaagcgcatgcgcgtcgtccacgagacccgcaaccacctccgcctcgtcggctgctccgtcgccgcctgcaacaccgaggcccagggcgtccaggagtccctctccaagctcctcgaggagctctcccaccagctcctccaggaccgcgccaagggcgcccaggcctcccccccccccatcgccccctacccctcccccacccgcaaggacctcctcctccacatgcaggagctctgcgagggcatgaagctcctcgcctccgacctcctcgacaacaaccgcatcatcgagcgcctcaaccgcgtccccgccccccccgacgtctga

SEQ ID NO: 8651 - RNA, 2151 nt, synthetic construct
  misc_feature 1..2151: note = derived and/or modified sequence opt3 fromIKK__Homo_sapiens__AAF45307
  source 1..2151: mol_type = other RNA
atgcagagcaccgccaactacctgtggcacacagacgatctccttggccaaggggctactgcatccgtgtataaggccagaaataaaaagtctggagagctggtcgcggttaaagtgttcaacacgacctcatacttgaggccccgggaagtacaggtgcgcgagtttgaagtcttacgaaagctgaatcatcagaacatcgtgaaactattcgctgttgaggaaacaggtggcagtcgtcagaaggtgctcgtcatggagtattgcagctccgggtctctgctttcggtgctggagtcacctgaaaatgcctttggattgccagaggacgagttcctcgtagttctgagatgtgtggtcgcaggcatgaaccacctgagggaaaatggtattgtgcatcgggatataaagccggggaacatcatgcgcctcgtgggagaggaaggccaaagcatttacaaattaactgactttggcgccgctagagagctggatgacgatgaaaagttcgtcagtgtttatgggaccgaggaataccttcaccccgacatgtatgagagggcagtgttgcggaaacctcagcagaaggcctttggagtaacagtggatctgtggtccatcggtgtcaccctataccatgctgccactggctctctcccattcattccctttgggggacctcgccgaaataaagagatcatgtacagaataacaaccgaaaagccagcgggcgcaatcgccggtgctcagaggcgggagaacgggcccctggaatggagctatacgcttcctattacttgccaactgtccttgggactccagtcacagctggtgccaatcttagccaatattctggaggttgaacaggcaaagtgttggggcttcgaccaatttttcgctgagaccagtgatatcctccagcgtgtggtcgtgcacgtatttagcctttctcaggccgttctgcaccatatatacattcacgcgcataacacaatcgccattttccaagaggcagtgcacaaacagacttccgtcgctccgcgccaccaggaatatttgttcgagggccatctatgcgtgctggaaccctcagtcagcgcccagcacatcgctcataccacagccagttctcctctcaccctgttttccacggcaatcccaaaggggcttgccttcagagaccccgctctggatgtgcctaaatttgttccaaaggtggacttgcaagcggactacaatactgcaaaaggagtactcggtgccggctatcaggctctgaggttagcccgggcactgctagatgggcaggagctcatgttccgaggactgcactgggtcatggaagtgcttcaggccacatgtcgcagaaccttggaggttgctaggactagcctgctctacctgtcgtcttcccttggcacagagcggttttcaagtgtggccggtacccccgaaattcaagagctgaaggcagcggctgaattgcgcagcagactcaggacgctggccgaggtcttatcccgttgctctcagaacataaccgagacacaggaaagcctgtcaagtctaaatcgggagctcgtgaaatcccgagaccaggtacatgaagatagaagcatccaacagattcagtgttgcctggacaagatgaacttcatctataagcagtttaaaaagtctaggatgcgcccggggcttggctacaacgaggaacaaatacacaaattggataaggtgaatttctcacacctggcaaaacggctcctgcaggtttttcaggaggagtgtgtccaaaagtaccaggccagtttagtgactcatggaaagagaatgagggtggtccacgaaacccgcaaccatctgcgacttgttggctgcagcgtggctgcctgtaatacagaggcacagggggtgcaggaatccttgtctaaactcctggaggaactatcgcaccaactgctccaggaccgggctaagggagcccaggcgagccctcccccaattgccccttatccctccccaactcgtaaagatctgcttttgcacatgcaggagctgtgcgagggtatgaagttactcgcttcagacctgcttgataacaatagaatcatcgaaaggctgaaccgcgtacccgcacctccagacgtctga

SEQ ID NO: 8652 - RNA, 2151 nt, synthetic construct
  misc_feature 1..2151: note = derived and/or modified sequence opt4 fromIKK__Homo_sapiens__AAF45307
  source 1..2151: mol_type = other RNA
atgcagagcaccgccaactacctgtggcacaccgacgacctgctgggccagggcgccaccgccagcgtgtacaaggccagaaacaagaagagcggcgagctggtggccgtgaaggtgttcaacaccaccagctacctgagacccagagaggtgcaggtgagagagttcgaggtgctgagaaagctgaaccaccagaacatcgtgaagctgttcgccgtggaggagaccggcggcagcagacagaaggtgctggtgatggagtactgcagcagcggcagcctgctgagcgtgctggagagccccgagaacgccttcggcctgcccgaggacgagttcctggtggtgctgagatgcgtggtggccggcatgaaccacctgagagagaacggcatcgtgcacagagacatcaagcccggcaacatcatgagactggtgggcgaggagggccagagcatctacaagctgaccgacttcggcgccgccagagagctggacgacgacgagaagttcgtgagcgtgtacggcaccgaggagtacctgcaccccgacatgtacgagagagccgtgctgagaaagccccagcagaaggccttcggcgtgaccgtggacctgtggagcatcggcgtgaccctgtaccacgccgccaccggcagcctgcccttcatccccttcggcggccccagaagaaacaaggagatcatgtacagaatcaccaccgagaagcccgccggcgccatcgccggcgcccagagaagagagaacggccccctggagtggagctacaccctgcccatcacctgccagctgagcctgggcctgcagagccagctggtgcccatcctggccaacatcctggaggtggagcaggccaagtgctggggcttcgaccagttcttcgccgagaccagcgacatcctgcagagagtggtggtgcacgtgttcagcctgagccaggccgtgctgcaccacatctacatccacgcccacaacaccatcgccatcttccaggaggccgtgcacaagcagaccagcgtggcccccagacaccaggagtacctgttcgagggccacctgtgcgtgctggagcccagcgtgagcgcccagcacatcgcccacaccaccgccagcagccccctgaccctgttcagcaccgccatccccaagggcctggccttcagagaccccgccctggacgtgcccaagttcgtgcccaaggtggacctgcaggccgactacaacaccgccaagggcgtgctgggcgccggctaccaggccctgagactggccagagccctgctggacggccaggagctgatgttcagaggcctgcactgggtgatggaggtgctgcaggccacctgcagaagaaccctggaggtggccagaaccagcctgctgtacctgagcagcagcctgggcaccgagagattcagcagcgtggccggcacccccgagatccaggagctgaaggccgccgccgagctgagaagcagactgagaaccctggccgaggtgctgagcagatgcagccagaacatcaccgagacccaggagagcctgagcagcctgaacagagagctggtgaagagcagagaccaggtgcacgaggacagaagcatccagcagatccagtgctgcctggacaagatgaacttcatctacaagcagttcaagaagagcagaatgagacccggcctgggctacaacgaggagcagatccacaagctggacaaggtgaacttcagccacctggccaagagactgctgcaggtgttccaggaggagtgcgtgcagaagtaccaggccagcctggtgacccacggcaagagaatgagagtggtgcacgagaccagaaaccacctgagactggtgggctgcagcgtggccgcctgcaacaccgaggcccagggcgtgcaggagagcctgagcaagctgctggaggagctgagccaccagctgctgcaggacagagccaagggcgcccaggccagccccccccccatcgccccctaccccagccccaccagaaaggacctgctgctgcacatgcaggagctgtgcgagggcatgaagctgctggccagcgacctgctggacaacaacagaatcatcgagagactgaacagagtgcccgccccccccgacgtgtga

SEQ ID NO: 8653 - RNA, 2151 nt, synthetic construct
  misc_feature 1..2151: note = derived and/or modified sequence opt5 fromIKK__Homo_sapiens__AAF45307
  source 1..2151: mol_type = other RNA
atgcagagcaccgccaactacctgtggcacacagacgatctcctgggccaaggggctacggcctccgtgtataaggcgagaaataaaaagtctggagagcttgtcgctgttaaagtgttcaacaccacaagctacctgcggccccgcgaagtgcaggtcagagagtttgaagtgctccggaagctgaatcatcagaacatcgttaaacttttcgccgtggaggaaaccggcgggtcccgccagaaggtcctggtgatggagtattgctctagcggatccctcctgtctgttctggagagccctgaaaatgcctttggcctcccggaggacgagttcctggtggtccttagatgtgtggtggctgggatgaaccatctgcgggaaaatggaattgtccaccgcgatatcaagcccggcaacattatgagactcgttggcgaggaagggcaatccatctacaaactgacagactttggagccgctcgggagcttgatgacgatgaaaagttcgtgagcgtgtatggcaccgaggaatacctgcaccctgacatgtatgagcgcgccgtcctcagaaaaccccagcagaaggcgtttggggtgacagttgatctgtggtctattggagtgaccctgtaccatgccgctacgggctccctccctttcatcccctttgggggacctcggcgcaataaagagatcatgtacagaattaccacagaaaagccggccggcgctatcgccggcgcgcagcggcgcgagaacgggcccctggaatggagctatacccttcctattacatgccaactgtctctcggactgcagtcccagcttgtccccatcctggccaatattctcgaggtggaacaggctaagtgttggggcttcgaccaatttttcgccgagaccagcgatatcctgcagagagttgtggtccacgtgttttctctgtcccaggctgtcctccaccatatttacatccacgcccataacacgatcgccattttccaagaggctgtgcacaaacagacaagcgttgcgcctcggcaccaggaatatctgttcgaggggcatctttgcgtgctggaaccctccgtctctgcccagcacatcgctcataccacagccagctccccgctcaccctgtttagcaccgccattcctaagggacttgctttcagagaccccgccctggatgtgcctaaatttgttcccaaggtggacctccaagcggactacaatacagctaaaggcgtcctgggggccggatatcaggccctgcgcctcgctcgggccctgcttgatggccaggagctgatgttcagaggcctccactgggtgatggaagtgctgcaggctacgtgtcgccggaccctggaggttgccagaacatctcttctctacctgtccagctctctggggaccgagcgctttagctccgtcgcgggaacacccgaaatccaagagctcaaggccgctgccgaactgcggtctagacttcgcaccctggctgaggtgctcagccggtgctcccagaacattacggagacacaggaaagcctgtcttccctgaatagagagcttgtgaaaagccgcgaccaggtccatgaagatcggtctatccaacagatccagtgttgcctcgacaagatgaacttcatttataagcagtttaaaaagtccagaatgcggcctggcctggggtacaacgaggaacaaatccacaaactggataaggtgaatttcagccacctcgccaaacgcctgcttcaggtttttcaggaggagtgtgtgcaaaagtaccaggcgtccctggtcacccatggaaagagaatgcgggtggttcacgaaaccagaaaccatctccgcctggtgggctgctctgtcgccgcttgtaatacagaggcccagggggtgcaggaaagcctgtccaaacttctcgaggaactgtctcaccaactgctccaggaccgggctaagggcgcccaggccagcccgccccctattgctccctatccttcccccaccagaaaagatctgcttctgcacatgcaggagctctgcgagggaatgaagctgctggcgagcgaccttctcgataacaatcgcatcattgaaagactgaaccgggttccggcccctcccgacgtgtga

SEQ ID NO: 8654 - protein, 419 aa, synthetic construct
  REGION 1..419: note = IKK__Homo_sapiens__Q9Y6K9
MNRHLWKSQLCEMVQPSGGPAADQDVLGEESPLGKPAMLHLPSEQGAPETLQRCLEENQELRDAIRQSNQILRERCEELLHFQASQREEKEFLMCKFQEARKLVERLGLEKLDLKRQKEQALREVEHLKRCQQQMAEDKASVKAQVTSLLGELQESQSRLEAATKECQALEGRARAASEQARQLESEREALQQQHSVQVDQLRMQGQSVEAALRMERQAASEEKRKLAQLQVAYHQLFQEYDNHIKSSVVGSERKRGMQLEDLKQQLQQAEEALVAKQEVIDKLKEEAEQHKIVMETVPVLKAQADIYKADFQAERQAREKLAEKKELLQEQLEQLQREYSKLKASCQESARIEDMRKRHVEVSQAPLPPAPAYLSSPLALPSQRRSPPEEPPDFCCPKCQYQAPDMDTLQIHVMECIE

SEQ ID NO: 8655 - RNA, 1260 nt, synthetic construct
  misc_feature 1..1260: note = IKK__Homo_sapiens__AAC36330
  source 1..1260: mol_type = other RNA
atgaataggcacctctggaagagccaactgtgtgagatggtgcagcccagtggtggcccggcagcagatcaggacgtactgggcgaagagtctcctctggggaagccagccatgctgcacctgccttcagaacagggcgctcctgagaccctccagcgctgcctggaggagaatcaagagctccgagatgccatccggcagagcaaccagattctgcgggagcgctgcgaggagcttctgcatttccaagccagccagagggaggagaaggagttcctcatgtgcaagttccaggaggccaggaaactggtggagagactcggcctggagaagctcgatctgaagaggcagaaggagcaggctctgcgggaggtggagcacctgaagagatgccagcagcagatggctgaggacaaggcctctgtgaaagcccaggtgacgtccttgctcggggagctgcaggagagccagagtcgcttggaggctgccactaaggaatgccaggctctggagggtcgggcccgggcggccagcgagcaggcgcggcagctggagagtgagcgcgaggcgctgcagcagcagcacagcgtgcaggtggaccagctgcgcatgcagggccagagcgtggaggccgcgctccgcatggagcgccaggccgcctcggaggagaagaggaagctggcccagttgcaggtggcctatcaccagctcttccaagaatacgacaaccacatcaagagcagcgtggtgggcagtgagcggaagcgaggaatgcagctggaagatctcaaacagcagctccagcaggccgaggaggccctggtggccaaacaggaggtgatcgataagctgaaggaggaggccgagcagcacaagattgtgatggagaccgttccggtgctgaaggcccaggcggatatctacaaggcggacttccaggctgagaggcaggcccgggagaagctggccgagaagaaggagctcctgcaggagcagctggagcagctgcagagggagtacagcaaactgaaggccagctgtcaggagtcggccaggatcgaggacatgaggaagcggcatgtcgaggtctcccaggcccccttgccccccgcccctgcctacctctcctctcccctggccctgcccagccagaggaggagcccccccgaggagccacctgacttctgctgtcccaagtgccagtatcaggcccctgatatggacaccctgcagatacatgtcatggagtgcattgagtag

SEQ ID NO: 8656 - RNA, 1260 nt, synthetic construct
  misc_feature 1..1260: note = derived and/or modified sequence opt1 fromIKK__Homo_sapiens__AAC36330
  source 1..1260: mol_type = other RNA
atgaaccgccacctgtggaagtcccagctctgcgagatggtgcagcccagcggcgggccggccgccgaccaggacgtcctgggcgaggagagccccctggggaagcccgcgatgctccacctcccctccgagcagggcgccccggagaccctgcagcggtgcctcgaggagaaccaggagctgcgcgacgccatccggcagagcaaccagatcctgcgcgagcggtgcgaggagctcctgcacttccaggcctcccagcgcgaggagaaggagttcctgatgtgcaagttccaggaggcccggaagctcgtggagcgcctggggctggagaagctcgacctgaagcggcagaaggagcaggcgctgcgcgaggtggagcacctcaagcggtgccagcagcagatggccgaggacaaggccagcgtcaaggcccaggtgacctccctgctgggcgagctccaggagagccagtcccgcctggaggcggccacgaaggagtgccaggccctggagggccgggcccgcgccgcgagcgagcaggcccggcagctcgagtccgagcgcgaggccctgcagcagcagcacagcgtgcaggtcgaccagctgcggatgcaggggcagtccgtggaggccgccctccgcatggagcggcaggcggccagcgaggagaagcgcaagctggcccagctccaggtggcctaccaccagctgttccaggagtacgacaaccacatcaagtccagcgtcgtgggctccgagcggaagcgcgggatgcagctggaggacctgaagcagcagctgcagcaggccgaggaggcgctggtggccaagcaggaggtcatcgacaagctgaaggaggaggccgagcagcacaagatcgtgatggagaccgtgcccgtcctcaaggcccaggccgacatctacaaggcggacttccaggccgagcgccaggcccgggagaagctggccgagaagaaggagctgctccaggagcagctggagcagctgcagcgcgagtacagcaagctcaaggcgtcctgccaggagagcgcccggatcgaggacatgcgcaagcggcacgtggaggtgagccaggcgcccctgcccccggcccccgcctacctgtccagccccctcgccctgccctcccagcgccggagcccgcccgaggagccgcccgacttctgctgccccaagtgccagtaccaggcccccgacatggacaccctgcagatccacgtcatggagtgcatcgagtga

SEQ ID NO: 8657 - RNA, 1260 nt, synthetic construct
  misc_feature 1..1260: note = derived and/or modified sequence opt2 fromIKK__Homo_sapiens__AAC36330
  source 1..1260: mol_type = other RNA
atgaaccgccacctctggaagtcccagctctgcgagatggtccagccctccggcggccccgccgccgaccaggacgtcctcggcgaggagtcccccctcggcaagcccgccatgctccacctcccctccgagcagggcgcccccgagaccctccagcgctgcctcgaggagaaccaggagctccgcgacgccatccgccagtccaaccagatcctccgcgagcgctgcgaggagctcctccacttccaggcctcccagcgcgaggagaaggagttcctcatgtgcaagttccaggaggcccgcaagctcgtcgagcgcctcggcctcgagaagctcgacctcaagcgccagaaggagcaggccctccgcgaggtcgagcacctcaagcgctgccagcagcagatggccgaggacaaggcctccgtcaaggcccaggtcacctccctcctcggcgagctccaggagtcccagtcccgcctcgaggccgccaccaaggagtgccaggccctcgagggccgcgcccgcgccgcctccgagcaggcccgccagctcgagtccgagcgcgaggccctccagcagcagcactccgtccaggtcgaccagctccgcatgcagggccagtccgtcgaggccgccctccgcatggagcgccaggccgcctccgaggagaagcgcaagctcgcccagctccaggtcgcctaccaccagctcttccaggagtacgacaaccacatcaagtcctccgtcgtcggctccgagcgcaagcgcggcatgcagctcgaggacctcaagcagcagctccagcaggccgaggaggccctcgtcgccaagcaggaggtcatcgacaagctcaaggaggaggccgagcagcacaagatcgtcatggagaccgtccccgtcctcaaggcccaggccgacatctacaaggccgacttccaggccgagcgccaggcccgcgagaagctcgccgagaagaaggagctcctccaggagcagctcgagcagctccagcgcgagtactccaagctcaaggcctcctgccaggagtccgcccgcatcgaggacatgcgcaagcgccacgtcgaggtctcccaggcccccctcccccccgcccccgcctacctctcctcccccctcgccctcccctcccagcgccgctccccccccgaggagccccccgacttctgctgccccaagtgccagtaccaggcccccgacatggacaccctccagatccacgtcatggagtgcatcgagtga

SEQ ID NO: 8658 - RNA, 1260 nt, synthetic construct
  misc_feature 1..1260: note = derived and/or modified sequence opt3 fromIKK__Homo_sapiens__AAC36330
  source 1..1260: mol_type = other RNA
atgaacagacacctgtggaaaagccagctctgcgagatggtgcaaccctccggcgggcctgccgctgaccaggatgtccttggagaagagtctccactgggtaaaccggcaatgttgcatttaccctcagaacagggcgcccctgagaccctgcagaggtgtctagaagagaatcaagagctccgggacgcgatccgccagagtaaccagattctgcgagaacgttgcgaggaacttctgcacttccaggctagccaaagagaggagaaggaatttttgatgtgtaaattccaggaggccaggaagctcgttgaacggctggggctggagaaactcgatttaaagcgccagaaggaacaggcactgagagaggtggagcatcttaaaaggtgccaacagcagatggccgaagacaaggcttccgtaaaagcacaagtgacatctttgctgggagagctacaggaatcgcagtcacggctcgaggccgctactaaggaatgtcaggccctggagggccgcgcgcgagcagccagcgagcaagctagacagcttgaaagtgagagggaagccctgcagcagcaacactccgtccaggtggatcagttgcggatgcagggtcaatctgttgaggcagctctccgtatggaacgccaggccgcgagcgaggagaaaagaaagctggcccagttacaggtggcataccatcaactgtttcaggaatatgacaatcacataaagtcctcagtcgtggggagtgagaggaaacggggaatgcagctcgaagatcttaagcaacagctgcagcaggctgaggaggccttggtagctaaacaagaagttatcgacaagctaaaagaggaagccgagcagcacaagattgtgatggaaacggtcccagtgctgaaagcacaggccgatatctacaaggctgacttccaggcggagcgacaagcacgcgagaagctcgccgaaaagaaggagctgcttcaggaacagctggagcagttgcaaagagaatatagcaaactcaaggcttcttgccaggagtccgccaggattgaggatatgcggaaacgccatgtggaagtctcacaggcacccctgcctccagcccccgcttacttaagcagtcctctggccctaccatctcaaagaaggtccccgcccgaggaacctccagacttttgttgccccaagtgtcagtatcaggcacctgatatggacaccctccagatccacgttatggagtgcatagaatga

SEQ ID NO: 8659 - RNA, 1260 nt, synthetic construct
  misc_feature 1..1260: note = derived and/or modified sequence opt4 fromIKK__Homo_sapiens__AAC36330
  source 1..1260: mol_type = other RNA
atgaacagacacctgtggaagagccagctgtgcgagatggtgcagcccagcggcggccccgccgccgaccaggacgtgctgggcgaggagagccccctgggcaagcccgccatgctgcacctgcccagcgagcagggcgcccccgagaccctgcagagatgcctggaggagaaccaggagctgagagacgccatcagacagagcaaccagatcctgagagagagatgcgaggagctgctgcacttccaggccagccagagagaggagaaggagttcctgatgtgcaagttccaggaggccagaaagctggtggagagactgggcctggagaagctggacctgaagagacagaaggagcaggccctgagagaggtggagcacctgaagagatgccagcagcagatggccgaggacaaggccagcgtgaaggcccaggtgaccagcctgctgggcgagctgcaggagagccagagcagactggaggccgccaccaaggagtgccaggccctggagggcagagccagagccgccagcgagcaggccagacagctggagagcgagagagaggccctgcagcagcagcacagcgtgcaggtggaccagctgagaatgcagggccagagcgtggaggccgccctgagaatggagagacaggccgccagcgaggagaagagaaagctggcccagctgcaggtggcctaccaccagctgttccaggagtacgacaaccacatcaagagcagcgtggtgggcagcgagagaaagagaggcatgcagctggaggacctgaagcagcagctgcagcaggccgaggaggccctggtggccaagcaggaggtgatcgacaagctgaaggaggaggccgagcagcacaagatcgtgatggagaccgtgcccgtgctgaaggcccaggccgacatctacaaggccgacttccaggccgagagacaggccagagagaagctggccgagaagaaggagctgctgcaggagcagctggagcagctgcagagagagtacagcaagctgaaggccagctgccaggagagcgccagaatcgaggacatgagaaagagacacgtggaggtgagccaggcccccctgccccccgcccccgcctacctgagcagccccctggccctgcccagccagagaagaagcccccccgaggagccccccgacttctgctgccccaagtgccagtaccaggcccccgacatggacaccctgcagatccacgtgatggagtgcatcgagtga

SEQ ID NO: 8660 - RNA, 1260 nt, synthetic construct
  misc_feature 1..1260: note = derived and/or modified sequence opt5 fromIKK__Homo_sapiens__AAC36330
  source 1..1260: mol_type = other RNA
atgaacagacacctgtggaaaagccagctctgcgagatggtgcaaccctccggcgggcctgccgctgaccaggatgtcctgggagaagagtctccgcttggcaaacccgccatgctgcatctccctagcgaacagggggcgcccgagaccctgcagcggtgtcttgaagagaatcaagagctgcgcgacgctatcagacagtccaaccagattctccgggaacgctgcgaggaactgctgcacttccaggcctctcaaagagaggagaaggaatttctcatgtgtaaattccaggaggcccggaagctggttgaacgccttggactggagaaactcgatctgaagagacagaaggaacaggcccttcgggaggtggagcatctgaaacgctgccaacagcagatggccgaagacaaggctagcgtgaaagcccaagtcacatccctcctgggcgagctgcaggaatctcagagcagactcgaggcggccacgaaggaatgtcaggctctggaggggcgggcccgcgctgcctccgagcaagcgagacagcttgaaagcgagcgggaagccctgcagcagcaacactctgtgcaggttgatcagctccgcatgcagggacaatccgtggaggctgccctgagaatggaacggcaggctgccagcgaggagaaaagaaaacttgcccagctgcaggtcgcttaccatcaactctttcaggaatatgacaatcacatcaagtcttccgtggttggcagcgagcgcaagcggggcatgcagctggaagatctgaagcaacagctccagcaggcggaggaggccctggtggctaaacaagaagtcattgacaaacttaaggaggaagccgagcagcacaagatcgtgatggaaaccgtgcctgtcctgaaagcccaggctgatatttacaaggccgacttccaggcggagagacaagctcgcgagaagctcgccgaaaagaaggagctgcttcaggaacagctggagcagctccaacgggaatattctaaactgaaggcctcctgccaggagagcgctagaatcgaggatatgcgcaaacggcatgttgaagtgtcccaggctcccctgcctccggctcccgcctacctctctagccctctggcgcttccctcccaaagacgcagccctcccgaggaaccgcctgacttttgttgccccaagtgtcagtatcaggcccctgatatggacacactgcagatccacgtgatggagtgcattgaatga

SEQ ID NO: 8661 - protein, 540 aa, synthetic construct
  REGION 1..540: note = IL-1__Homo_sapiens__O43353
MNGEAICSALPTIPYHKLADLRYLSRGASGTVSSARHADWRVQVAVKHLHIHTPLLDSERKDVLREAEILHKARFSYILPILGICNEPEFLGIVTEYMPNGSLNELLHRKTEYPDVAWPLRFRILHEIALGVNYLHNMTPPLLHHDLKTQNILLDNEFHVKIADFGLSKWRMMSLSQSRSSKSAPEGGTIIYMPPENYEPGQKSRASIKHDIYSYAVITWEVLSRKQPFEDVTNPLQIMYSVSQGHRPVINEESLPYDIPHRARMISLIESGWAQNPDERPSFLKCLIELEPVLRTFEEITFLEAVIQLKKTKLQSVSSAIHLCDKKKMELSLNIPVNHGPQEESCGSSQLHENSGSPETSRSLPAPQDNDFLSRKAQDCYFMKLHHCPGNHSWDSTISGSQRAAFCDHKTTPCSSAIINPLSTAGNSERLQPGIAQQWIQSKREDIVNQMTEACLNQSLDALLSRDLIMKEDYELVSTKPTRTSKVRQLLDTTDIQGEEFAKVIVQKLKDNKQMGLQPYPEILVVSRSPSLNLLQNKSM

SEQ ID NO: 8662 - RNA, 1623 nt, synthetic construct
  misc_feature 1..1623: note = IL-1__Homo_sapiens__AAC24561
  source 1..1623: mol_type = other RNA
atgaacggggaggccatctgcagcgccctgcccaccattccctaccacaaactcgccgacctgcgctacctgagccgcggcgcctctggcactgtgtcgtccgcccgccacgcagactggcgcgtccaggtggccgtgaagcacctgcacatccacactccgctgctcgacagtgaaagaaaggatgtcttaagagaagctgaaattttacacaaagctagatttagttacattcttccaattttgggaatttgcaatgagcctgaatttttgggaatagttactgaatacatgccaaatggatcattaaatgaactcctacataggaaaactgaatatcctgatgttgcttggccattgagatttcgcatcctgcatgaaattgcccttggtgtaaattacctgcacaatatgactcctcctttacttcatcatgacttgaagactcagaatatcttattggacaatgaatttcatgttaagattgcagattttggtttatcaaagtggcgcatgatgtccctctcacagtcacgaagtagcaaatctgcaccagaaggagggacaattatctatatgccacctgaaaactatgaacctggacaaaaatcaagggccagtatcaagcacgatatatatagctatgcagttatcacatgggaagtgttatccagaaaacagccttttgaagatgtcaccaatcctttgcagataatgtatagtgtgtcacaaggacatcgacctgttattaatgaagaaagtttgccatatgatatacctcaccgagcacgtatgatctctctaatagaaagtggatgggcacaaaatccagatgaaagaccatctttcttaaaatgtttaatagaacttgaaccagttttgagaacatttgaagagataacttttcttgaagctgttattcagctaaagaaaacaaagttacagagtgtttcaagtgccattcacctatgtgacaagaagaaaatggaattatctctgaacatacctgtaaatcatggtccacaagaggaatcatgtggatcctctcagctccatgaaaatagtggttctcctgaaacttcaaggtccctgccagctcctcaagacaatgattttttatctagaaaagctcaagactgttattttatgaagctgcatcactgtcctggaaatcacagttgggatagcaccatttctggatctcaaagggctgcattctgtgatcacaagaccactccatgctcttcagcaataataaatccactctcaactgcaggaaactcagaacgtctgcagcctggtatagcccagcagtggatccagagcaaaagggaagacattgtgaaccaaatgacagaagcctgccttaaccagtcgctagatgcccttctgtccagggacttgatcatgaaagaggactatgaacttgttagtaccaagcctacaaggacctcaaaagtcagacaattactagacactactgacatccaaggagaagaatttgccaaagttatagtacaaaaattgaaagataacaaacaaatgggtcttcagccttacccggaaatacttgtggtttctagatcaccatctttaaatttacttcaaaataaaagcatgtaa

SEQ ID NO: 8663 - RNA, 1623 nt, synthetic construct
  misc_feature 1..1623: note = derived and/or modified sequence opt1 fromIL-1__Homo_sapiens__AAC24561
  source 1..1623: mol_type = other RNA
atgaacggcgaggccatctgcagcgccctgcccaccatcccgtaccacaagctcgcggacctgcgctacctgtcccgcggggccagcggcaccgtgtccagcgcccggcacgccgactggcgggtccaggtggccgtgaagcacctccacatccacacgcccctgctggactccgagcgcaaggacgtcctccgggaggcggagatcctgcacaaggcccgcttcagctacatcctgcccatcctcgggatctgcaacgagcccgagttcctgggcatcgtgaccgagtacatgccgaacgggtccctgaacgagctcctgcaccggaagaccgagtaccccgacgtggcctggcccctgcgcttccggatcctccacgagatcgccctgggcgtcaactacctgcacaacatgacgcccccgctcctgcaccacgacctgaagacccagaacatcctcctggacaacgagttccacgtgaagatcgcggacttcggcctgagcaagtggcgcatgatgtccctcagccagtcccggagctccaagagcgcccccgagggcgggaccatcatctacatgccgcccgagaactacgagcccgggcagaagtcccgcgccagcatcaagcacgacatctactcctacgccgtgatcacctgggaggtcctgagccggaagcagcccttcgaggacgtgaccaaccccctgcagatcatgtactccgtgagccagggccaccgccccgtcatcaacgaggagagcctcccgtacgacatcccccaccgggcccgcatgatctccctgatcgagagcgggtgggcgcagaaccccgacgagcggccctccttcctgaagtgcctcatcgagctggagccggtgctgcgcacgttcgaggagatcaccttcctcgaggccgtgatccagctgaagaagaccaagctgcagagcgtctccagcgccatccacctctgcgacaagaagaagatggagctgtccctgaacatccccgtgaaccacggcccccaggaggagagctgcggctccagccagctccacgagaactccgggagccccgagacctcccggagcctgccggcgccccaggacaacgacttcctgtcccgcaaggcccaggactgctacttcatgaagctccaccactgccccggcaaccacagctgggactccacgatcagcgggtcccagcgggccgccttctgcgaccacaagaccaccccctgcagcagcgccatcatcaacccgctgtccaccgccggcaacagcgagcgcctgcagcccggcatcgcccagcagtggatccagtccaagcgcgaggacatcgtgaaccagatgacggaggcgtgcctcaaccagagcctggacgccctgctctcccgggacctgatcatgaaggaggactacgagctggtcagcaccaagcccacccgcacctccaaggtgcggcagctgctcgacacgaccgacatccagggggaggagttcgccaaggtgatcgtccagaagctgaaggacaacaagcagatgggcctgcagccgtaccccgagatcctcgtggtgagccgctcccccagcctgaacctgctccagaacaagtccatgtga

SEQ ID NO: 8664 - RNA, 1623 nt, synthetic construct
  misc_feature 1..1623: note = derived and/or modified sequence opt2 fromIL-1__Homo_sapiens__AAC24561
  source 1..1623: mol_type = other RNA
atgaacggcgaggccatctgctccgccctccccaccatcccctaccacaagctcgccgacctccgctacctctcccgcggcgcctccggcaccgtctcctccgcccgccacgccgactggcgcgtccaggtcgccgtcaagcacctccacatccacacccccctcctcgactccgagcgcaaggacgtcctccgcgaggccgagatcctccacaaggcccgcttctcctacatcctccccatcctcggcatctgcaacgagcccgagttcctcggcatcgtcaccgagtacatgcccaacggctccctcaacgagctcctccaccgcaagaccgagtaccccgacgtcgcctggcccctccgcttccgcatcctccacgagatcgccctcggcgtcaactacctccacaacatgaccccccccctcctccaccacgacctcaagacccagaacatcctcctcgacaacgagttccacgtcaagatcgccgacttcggcctctccaagtggcgcatgatgtccctctcccagtcccgctcctccaagtccgcccccgagggcggcaccatcatctacatgccccccgagaactacgagcccggccagaagtcccgcgcctccatcaagcacgacatctactcctacgccgtcatcacctgggaggtcctctcccgcaagcagcccttcgaggacgtcaccaaccccctccagatcatgtactccgtctcccagggccaccgccccgtcatcaacgaggagtccctcccctacgacatcccccaccgcgcccgcatgatctccctcatcgagtccggctgggcccagaaccccgacgagcgcccctccttcctcaagtgcctcatcgagctcgagcccgtcctccgcaccttcgaggagatcaccttcctcgaggccgtcatccagctcaagaagaccaagctccagtccgtctcctccgccatccacctctgcgacaagaagaagatggagctctccctcaacatccccgtcaaccacggcccccaggaggagtcctgcggctcctcccagctccacgagaactccggctcccccgagacctcccgctccctccccgccccccaggacaacgacttcctctcccgcaaggcccaggactgctacttcatgaagctccaccactgccccggcaaccactcctgggactccaccatctccggctcccagcgcgccgccttctgcgaccacaagaccaccccctgctcctccgccatcatcaaccccctctccaccgccggcaactccgagcgcctccagcccggcatcgcccagcagtggatccagtccaagcgcgaggacatcgtcaaccagatgaccgaggcctgcctcaaccagtccctcgacgccctcctctcccgcgacctcatcatgaaggaggactacgagctcgtctccaccaagcccacccgcacctccaaggtccgccagctcctcgacaccaccgacatccagggcgaggagttcgccaaggtcatcgtccagaagctcaaggacaacaagcagatgggcctccagccctaccccgagatcctcgtcgtctcccgctccccctccctcaacctcctccagaacaagtccatgtga

SEQ ID NO: 8665 - RNA, 1623 nt, synthetic construct
  misc_feature 1..1623: note = derived and/or modified sequence opt3 fromIL-1__Homo_sapiens__AAC24561
  source 1..1623: mol_type = other RNA
atgaacggcgaggccatctgcagcgctctgccaaccattccttaccacaagctcgcagaccttagatatctgtccaggggagcctctgggacagtgtcaagtgcgcggcatgctgattggcgcgtccaggttgccgtgaaacacttgcatatacacactccattactggacagcgaacgaaaggatgtactacgtgaggcagaaatcctccataaagccagattctcctacattctgccgatccttggtatttgtaatgagcccgaatttctgggcatcgtgacggagtatatgcctaacgggtctttgaatgagctcctgcacaggaagaccgaatacccagacgtcgcttggcccctgcggttccgcatactccacgagatcgcattaggagtgaactatctgcataatatgacacctccacttttgcaccatgatctgaaaactcaaaacattctactcgacaatgaatttcacgttaagatcgccgatttcggcctgtcgaagtggagaatgatgtcacttagccagagtaggtcctctaaaagcgctcccgagggtgggaccattatctacatgcctccagagaactatgaaccgggacagaagtcccgggcctcaataaaacacgacatttacagttacgcggtgatcacatgggaggtcctgagccgcaagcagccctttgaagatgtgaccaatcctttgcaaattatgtattctgtatcccagggccatcgaccagttatcaacgaggaatcactcccctacgacatccctcacagagcaaggatgattagcctgatagagagtggctgggcccagaatccagatgagcggccctctttcttaaaatgcctgatcgaactcgagccggtgcttcgtacttttgaagagattacattcctggaagctgtcatccagttgaagaagaccaaactacaatccgtgagctcggccatacatctgtgtgacaagaaaaagatggagctctctctgaacattcctgtgaatcacgggccccaggaggaatcctgcggatcaagtcagcttcatgagaacagcggttccccagaaacgtctcgcagcctgcctgcaccccaggataatgactttttgtcaagaaaagctcaagactgttatttcatgaagctccaccactgcccaggcaaccatagttgggattccactatcagcgggtctcagagggccgcgttttgtgaccacaaaaccacaccctgctcaagtgccatcattaaccctctgagcactgcaggaaattccgagcggttacagccaggcatcgctcaacagtggattcagtctaagcgagaagatatagtcaaccagatgaccgaggcctgtctgaatcaatcgctagacgctctcctgagccgcgatcttatcatgaaggaggactacgaattggtttccacaaaaccgaccagaacgtcaaaggtgaggcagctgctcgatactacagacattcagggtgaggagttcgccaaagtaatcgtgcagaagctgaaagataacaagcaaatggggcttcagccctatcctgaaatcctggtcgtgagtcggtctcccagcttgaatctcctgcagaacaagtccatgtga

SEQ ID NO: 8666 - RNA, 1623 nt, synthetic construct
  misc_feature 1..1623: note = derived and/or modified sequence opt4 fromIL-1__Homo_sapiens__AAC24561
  source 1..1623: mol_type = other RNA
atgaacggcgaggccatctgcagcgccctgcccaccatcccctaccacaagctggccgacctgagatacctgagcagaggcgccagcggcaccgtgagcagcgccagacacgccgactggagagtgcaggtggccgtgaagcacctgcacatccacacccccctgctggacagcgagagaaaggacgtgctgagagaggccgagatcctgcacaaggccagattcagctacatcctgcccatcctgggcatctgcaacgagcccgagttcctgggcatcgtgaccgagtacatgcccaacggcagcctgaacgagctgctgcacagaaagaccgagtaccccgacgtggcctggcccctgagattcagaatcctgcacgagatcgccctgggcgtgaactacctgcacaacatgaccccccccctgctgcaccacgacctgaagacccagaacatcctgctggacaacgagttccacgtgaagatcgccgacttcggcctgagcaagtggagaatgatgagcctgagccagagcagaagcagcaagagcgcccccgagggcggcaccatcatctacatgccccccgagaactacgagcccggccagaagagcagagccagcatcaagcacgacatctacagctacgccgtgatcacctgggaggtgctgagcagaaagcagcccttcgaggacgtgaccaaccccctgcagatcatgtacagcgtgagccagggccacagacccgtgatcaacgaggagagcctgccctacgacatcccccacagagccagaatgatcagcctgatcgagagcggctgggcccagaaccccgacgagagacccagcttcctgaagtgcctgatcgagctggagcccgtgctgagaaccttcgaggagatcaccttcctggaggccgtgatccagctgaagaagaccaagctgcagagcgtgagcagcgccatccacctgtgcgacaagaagaagatggagctgagcctgaacatccccgtgaaccacggcccccaggaggagagctgcggcagcagccagctgcacgagaacagcggcagccccgagaccagcagaagcctgcccgccccccaggacaacgacttcctgagcagaaaggcccaggactgctacttcatgaagctgcaccactgccccggcaaccacagctgggacagcaccatcagcggcagccagagagccgccttctgcgaccacaagaccaccccctgcagcagcgccatcatcaaccccctgagcaccgccggcaacagcgagagactgcagcccggcatcgcccagcagtggatccagagcaagagagaggacatcgtgaaccagatgaccgaggcctgcctgaaccagagcctggacgccctgctgagcagagacctgatcatgaaggaggactacgagctggtgagcaccaagcccaccagaaccagcaaggtgagacagctgctggacaccaccgacatccagggcgaggagttcgccaaggtgatcgtgcagaagctgaaggacaacaagcagatgggcctgcagccctaccccgagatcctggtggtgagcagaagccccagcctgaacctgctgcagaacaagagcatgtga

SEQ ID NO: 8667 - RNA, 1623 nt, synthetic construct
  misc_feature 1..1623: note = derived and/or modified sequence opt5 fromIL-1__Homo_sapiens__AAC24561
  source 1..1623: mol_type = other RNA
atgaacggcgaggccatctgcagcgctctgcccaccattccttaccacaagctcgccgacctgagatatctttccagaggggcgtctggaacagtgagctccgctcgccatgccgattggagagtccaggttgccgtgaaacatctgcacatccacacgccgctcctggactctgaacggaaggatgtgcttcgcgaggctgaaattctgcataaagccagattcagctacatcctccccattctgggcatctgtaatgagcctgaatttctggggatcgtcaccgagtatatgcccaacggatccctcaatgagctgcttcaccggaagacagaataccctgacgtggcttggcccctgcgcttccggattctccacgagatcgccctgggcgttaactatcttcataatatgacccctccgctgctccaccatgatctgaaaacacaaaacattctgctcgacaatgaatttcacgtgaagatcgcggatttcgggctgtctaagtggcggatgatgagcctttcccagagcagatcttccaaaagcgcccccgagggaggcaccattatctacatgcctcccgagaactatgaacctggccagaagtctcgcgcttccattaaacacgacatctacagctacgccgtcatcacatgggaggtgctgtctcggaagcagccctttgaagatgttaccaatccgctccaaattatgtattccgtgagccaggggcatcgccctgtcatcaacgaggaatccctgccctacgacattcctcacagagctcggatgatctctcttattgagagcggatgggcccagaatcccgatgagcgcccctccttcctgaaatgcctcatcgaactggagcctgtgctgagaacgtttgaagagatcaccttcctcgaagcggtgattcagctgaagaagacaaaacttcaaagcgtctcttccgccatccatctgtgtgacaagaaaaagatggagctcagcctgaacattccggttaatcacggcccccaggaggaatcttgcgggagctcccagcttcatgagaactctggaagccctgaaacctcccggagcctgcccgctcctcaggataatgactttctctctagaaaagcccaagactgttatttcatgaagctgcaccactgccccggcaaccattcctgggatagcacaatctctgggtcccagcgcgctgccttttgtgaccacaaaaccacgccgtgcagctccgccattatcaaccctctgtctacagctggaaatagcgagcggctccagcccggcatcgcgcaacagtggattcagtccaagagagaagatatcgtgaaccagatgaccgaggcctgtctgaatcaatctcttgacgctctgctcagccgcgatctgattatgaaggaggactacgaactggtgtccacaaaacctacccggaccagcaaggtcagacagcttctcgatacaacggacatccagggcgaggagttcgccaaagtgattgttcagaagctgaaagataacaagcaaatggggctgcagccctatcctgaaatcctcgtggtctctcgctcccccagcctgaatcttctgcagaacaagtctatgtga

SEQ ID NO: 8668 - protein, 224 aa, synthetic construct
  REGION 1..224: note = IL-1__Homo_sapiens__Q8N9C1
MIVVLSPDYVTEKSISMLEFKLGVMCQNSIATKLIVVEYRPLEHPHPGILQLKESVSFVSWKGEKSKHSGSKFWKALRLALPLRSLSASSGWNESCSSQSDISLDHVQRRRSRLKEPPELQSSERAAGSPPAPGTMSKHRGKSSATCRCCVTYCEGENHLRNKSRAEIHNQPQWETHLCKPVPQESETQWIQNGTRLEPPAPQISALALHHFTDLSNNNDFYIL

SEQ ID NO: 8669 - RNA, 675 nt, synthetic construct
  misc_feature 1..675: note = IL-1__Homo_sapiens__BAC04487
  source 1..675: mol_type = other RNA
atgattgttgttctgagccctgactatgtgacagaaaagagcatcagcatgctggagtttaaactgggtgtcatgtgccagaactccattgccaccaagctcattgtggttgagtaccgtccccttgagcaccctcacccaggcattcttcagctcaaagagtctgtgtcttttgtgagctggaagggagaaaagtccaaacattctggctctaaattctggaaagctttgcggttggctcttcccctgagaagtctgagtgccagttctggctggaatgagagctgctcttcccagtctgacatcagtctggatcacgttcaaaggaggagaagtcgtttgaaagagcccccagaacttcagagctcagagagggctgcaggtagccctccagccccaggcacaatgtccaagcaccgagggaagtcctccgccacctgccgctgttgtgtcacctactgtgaaggagagaatcaccttaggaacaagagccgggcagagattcataaccagccccagtgggagacacacctctgtaagcctgttccccaagagtcagaaactcaatggatacaaaatggcaccagattggaaccccctgctccccagatctcagcccttgctcttcatcatttcacggacttatccaataacaacgacttttatatcctataa

SEQ ID NO: 8670 - RNA, 675 nt, synthetic construct
  misc_feature 1..675: note = derived and/or modified sequence opt1 fromIL-1__Homo_sapiens__BAC04487
  source 1..675: mol_type = other RNA
atgatcgtggtcctgagccccgactacgtgaccgagaagtccatcagcatgctcgagttcaagctgggcgtgatgtgccagaactccatcgccaccaagctgatcgtcgtggagtaccgcccgctcgagcacccccaccccgggatcctgcagctgaaggagagcgtgtccttcgtcagctggaagggcgagaagtccaagcacagcgggtccaagttctggaaggccctccggctggcgctgcccctccgcagcctgtccgccagctccggctggaacgagagctgctccagccagtccgacatcagcctggaccacgtgcagcggcgccggtcccgcctcaaggagccgcccgagctgcagagcagcgagcgggccgccgggtccccgcccgcccccggcacgatgagcaagcaccgcggcaagtccagcgcgacctgccggtgctgcgtgacctactgcgagggggagaaccacctccgcaacaagtcccgggccgagatccacaaccagccccagtgggagacccacctgtgcaagcccgtcccccaggagagcgagacgcagtggatccagaacggcacccgcctggagccgcccgcgccccagatctccgccctggccctccaccacttcaccgacctgagcaacaacaacgacttctacatcctgtga

SEQ ID NO: 8671 - RNA, 675 nt, synthetic construct
  misc_feature 1..675: note = derived and/or modified sequence opt2 fromIL-1__Homo_sapiens__BAC04487
  source 1..675: mol_type = other RNA
atgatcgtcgtcctctcccccgactacgtcaccgagaagtccatctccatgctcgagttcaagctcggcgtcatgtgccagaactccatcgccaccaagctcatcgtcgtcgagtaccgccccctcgagcacccccaccccggcatcctccagctcaaggagtccgtctccttcgtctcctggaagggcgagaagtccaagcactccggctccaagttctggaaggccctccgcctcgccctccccctccgctccctctccgcctcctccggctggaacgagtcctgctcctcccagtccgacatctccctcgaccacgtccagcgccgccgctcccgcctcaaggagccccccgagctccagtcctccgagcgcgccgccggctccccccccgcccccggcaccatgtccaagcaccgcggcaagtcctccgccacctgccgctgctgcgtcacctactgcgagggcgagaaccacctccgcaacaagtcccgcgccgagatccacaaccagccccagtgggagacccacctctgcaagcccgtcccccaggagtccgagacccagtggatccagaacggcacccgcctcgagccccccgccccccagatctccgccctcgccctccaccacttcaccgacctctccaacaacaacgacttctacatcctctga

SEQ ID NO: 8672 - RNA, 675 nt, synthetic construct
  misc_feature 1..675: note = derived and/or modified sequence opt3 fromIL-1__Homo_sapiens__BAC04487
  source 1..675: mol_type = other RNA
atgatcgtggtcctgagccccgactacgttaccgagaagtccatttctatgctcgagttcaaacttggcgtgatgtgccagaactcaatagccacaaagctgatcgtagtggaatatagacctttggaacacccacatccggggattttacaactgaaagagagtgtcagctttgtgtcctggaagggagaaaaatctaagcactcgggttcaaagttctggaaagctctaaggctcgcactgccccttcggagcctgagtgcctcctctggctggaatgagagctgttcctcacagagtgatatcagcttggaccatgttcagcgccgacgttctagactcaaggagcctccagaactgcagtcctcagagagggcggctgggagtccccctgccccaggaactatgagcaaacaccggggcaagtcttccgcaacgtgccgctgttgcgtgacctactgtgaaggtgagaaccatctgagaaataaaagcagggccgagattcacaaccaaccccagtgggaaacacacctctgcaagcctgtcccacaggagtcggaaactcagtggatccaaaatgggacccggttagagccgcccgctcctcagatatctgcactggcccttcatcactttacagatttgtccaacaataacgacttctatatcctgtga

SEQ ID NO: 8673 - RNA, 675 nt, synthetic construct
  misc_feature 1..675: note = derived and/or modified sequence opt4 fromIL-1__Homo_sapiens__BAC04487
  source 1..675: mol_type = other RNA
atgatcgtggtgctgagccccgactacgtgaccgagaagagcatcagcatgctggagttcaagctgggcgtgatgtgccagaacagcatcgccaccaagctgatcgtggtggagtacagacccctggagcacccccaccccggcatcctgcagctgaaggagagcgtgagcttcgtgagctggaagggcgagaagagcaagcacagcggcagcaagttctggaaggccctgagactggccctgcccctgagaagcctgagcgccagcagcggctggaacgagagctgcagcagccagagcgacatcagcctggaccacgtgcagagaagaagaagcagactgaaggagccccccgagctgcagagcagcgagagagccgccggcagcccccccgcccccggcaccatgagcaagcacagaggcaagagcagcgccacctgcagatgctgcgtgacctactgcgagggcgagaaccacctgagaaacaagagcagagccgagatccacaaccagccccagtgggagacccacctgtgcaagcccgtgccccaggagagcgagacccagtggatccagaacggcaccagactggagccccccgccccccagatcagcgccctggccctgcaccacttcaccgacctgagcaacaacaacgacttctacatcctgtga

SEQ ID NO: 8674 - RNA, 675 nt, synthetic construct
  misc_feature 1..675: note = derived and/or modified sequence opt5 fromIL-1__Homo_sapiens__BAC04487
  source 1..675: mol_type = other RNA
atgatcgtggtcctgagccccgactacgttaccgagaagtccatttctatgctcgagttcaaactgggcgtgatgtgccagaacagcatcgccacaaaacttattgtggtcgaatatagacctctggaacacccgcatcccgggatcctccaactgaaggagtccgtgtcttttgttagctggaagggagaaaaatccaagcactctggcagcaagttctggaaagcccttcggctggctctccctctgcgctccctgagcgcgtcttccgggtggaatgagagctgttcttcccagagcgatatttctctcgaccatgtgcagagacggcgctccagactgaaggagccccctgaacttcagagctccgagcgggctgccggatctccccctgccccgggcacgatgagcaaacaccgcgggaagtccagcgctacctgcagatgttgcgtcacatactgtgaaggagagaaccatctgcggaataaatctcgcgccgagatccacaaccaaccccagtgggaaacccacctctgcaagcctgtgccccaggagtccgaaacacagtggatccaaaatggcaccagactggagcctcccgctccgcagattagcgcccttgcgctgcatcactttacagatctctctaacaataacgacttctatatcctgtga

SEQ ID NO: 8675 - protein, 152 aa, synthetic construct
  REGION 1..152: note = IL-1__Homo_sapiens__Q8WWZ1
MCSLPMARYYIIKYADQKALYTRDGQLLVGDPVADNCCAEKICILPNRGLARTKVPIFLGIQGGSRCLACVETEEGPSLQLEDVNIEELYKGGEEATRFTFFQSSSGSAFRLEAAAWPGWFLCGPAEPQQPVQLTKESEPSARTKFYFEQSW

SEQ ID NO: 8676 - RNA, 459 nt, synthetic construct
  misc_feature 1..459: note = IL-1__Homo_sapiens__AAK33010
  source 1..459: mol_type = other RNA
atgtgttccctccccatggcaagatactacataattaaatatgcagaccagaaggctctatacacaagagatggccagctgctggtgggagatcctgttgcagacaactgctgtgcagagaagatctgcatacttcctaacagaggcttggcccgcaccaaggtccccattttcctggggatccagggagggagccgctgcctggcatgtgtggagacagaagaggggccttccctacagctggaggatgtgaacattgaggaactgtacaaaggtggtgaagaggccacacgcttcaccttcttccagagcagctcaggctccgccttcaggcttgaggctgctgcctggcctggctggttcctgtgtggcccggcagagccccagcagccagtacagctcaccaaggagagtgagccctcagcccgtaccaagttttactttgaacagagctggtag

SEQ ID NO: 8677 - RNA, 459 nt, synthetic construct
  misc_feature 1..459: note = derived and/or modified sequence opt1 fromIL-1__Homo_sapiens__AAK33010
  source 1..459: mol_type = other RNA
atgtgcagcctgcccatggcccgctactacatcatcaagtacgccgaccagaaggcgctctacacccgggacggccagctgctggtgggggacccggtcgccgacaactgctgcgccgagaagatctgcatcctccccaaccgcggcctggcccggaccaaggtgcccatcttcctggggatccagggcgggtcccgctgcctcgcctgcgtggagacggaggagggccccagcctgcagctggaggacgtcaacatcgaggagctctacaagggcggggaggaggcgacccggttcaccttcttccagtccagctccggcagcgccttccgcctggaggccgccgcgtggccggggtggttcctgtgcggccccgccgagccccagcagcccgtgcagctcaccaaggagtccgagccgagcgcccggacgaagttctacttcgagcagtcctggtga

SEQ ID NO: 8678 - RNA, 459 nt, synthetic construct
  misc_feature 1..459: note = derived and/or modified sequence opt2 fromIL-1__Homo_sapiens__AAK33010
  source 1..459: mol_type = other RNA
atgtgctccctccccatggcccgctactacatcatcaagtacgccgaccagaaggccctctacacccgcgacggccagctcctcgtcggcgaccccgtcgccgacaactgctgcgccgagaagatctgcatcctccccaaccgcggcctcgcccgcaccaaggtccccatcttcctcggcatccagggcggctcccgctgcctcgcctgcgtcgagaccgaggagggcccctccctccagctcgaggacgtcaacatcgaggagctctacaagggcggcgaggaggccacccgcttcaccttcttccagtcctcctccggctccgccttccgcctcgaggccgccgcctggcccggctggttcctctgcggccccgccgagccccagcagcccgtccagctcaccaaggagtccgagccctccgcccgcaccaagttctacttcgagcagtcctggtga

SEQ ID NO: 8679 - RNA, 459 nt, synthetic construct
  misc_feature 1..459: note = derived and/or modified sequence opt3 fromIL-1__Homo_sapiens__AAK33010
  source 1..459: mol_type = other RNA
atgtgcagcctgcccatggccagatactatatcattaagtacgctgaccagaaagcactctataccagggatggccaacttctggtgggggaccctgtcgccgataactgttgcgcggagaagatatgtatcttgccaaatcggggattagctcgcacaaaagttccgattttcctgggtatccagggcgggtcccgatgcctagcctgtgtggaaactgaggaaggaccctctctccagctggaggacgtaaacattgaggaactttacaagggcggtgaggaagcaacgcgttttaccttctttcagtcaagtagcgggtccgccttcagactggaggctgcagcctggcctggatggtttttgtgcggcccagctgaaccccaacagcctgtgcagctcacaaaagagtctgagccatcggccaggactaagttctattttgaacagtcatggtga

SEQ ID NO: 8680 - RNA, 459 nt, synthetic construct
  misc_feature 1..459: note = derived and/or modified sequence opt4 fromIL-1__Homo_sapiens__AAK33010
  source 1..459: mol_type = other RNA
atgtgcagcctgcccatggccagatactacatcatcaagtacgccgaccagaaggccctgtacaccagagacggccagctgctggtgggcgaccccgtggccgacaactgctgcgccgagaagatctgcatcctgcccaacagaggcctggccagaaccaaggtgcccatcttcctgggcatccagggcggcagcagatgcctggcctgcgtggagaccgaggagggccccagcctgcagctggaggacgtgaacatcgaggagctgtacaagggcggcgaggaggccaccagattcaccttcttccagagcagcagcggcagcgccttcagactggaggccgccgcctggcccggctggttcctgtgcggccccgccgagccccagcagcccgtgcagctgaccaaggagagcgagcccagcgccagaaccaagttctacttcgagcagagctggtga

SEQ ID NO: 8681 - RNA, 459 nt, synthetic construct
  misc_feature 1..459: note = derived and/or modified sequence opt5 fromIL-1__Homo_sapiens__AAK33010
  source 1..459: mol_type = other RNA
atgtgcagcctgcccatggccagatactatatcattaagtacgctgaccagaaagccctctatacccgggatggccaactgcttgtgggggaccctgtcgcggataactgttgcgctgagaagatctgtattctgccgaatcgcggactcgccagaacaaaagttcccatcttcctgggcattcaagggggatcccggtgccttgcctgtgtggaaacggaggaaggcccttctctgcagctcgaggacgtgaacatcgaggaactgtacaaagggggagaggaagctacccgctttacattctttcagagctcctctggcagcgccttcagactggaggctgccgcgtggcccggctggtttctctgcgggcctgccgaaccccagcagcctgtccagctgaccaaggagtccgagccgtctgctcggacaaagttctattttgaacagagctggtga

SEQ ID NO: 8682 - protein, 164 aa, synthetic construct
  REGION 1..164: note = IL-1__Homo_sapiens__Q9NZH7
MNPQREAAPKSYAIRDSRQMVWVLSGNSLIAAPLSRSIKPVTLHLIACRDTEFSDKEKGNMVYLGIKGKDLCLFCAEIQGKPTLQLKLQGSQDNIGKDTCWKLVGIHTCINLDVRESCFMGTLDQWGIGVGRKKWKSSFQHHHLRKKDKDFSSMRTNIGMPGRM

SEQ ID NO: 8683 - RNA, 495 nt, synthetic construct
  misc_feature 1..495: note = IL-1__Homo_sapiens__AAF69250
  source 1..495: mol_type = other RNA
atgaacccacaacgggaggcagcacccaaatcctatgctattcgtgattctcgacagatggtgtgggtcctgagtggaaattctttaatagcagctcctcttagccgcagcattaagcctgtcactcttcatttaatagcctgtagagacacagaattcagtgacaaggaaaagggtaatatggtttacctgggaatcaagggaaaagatctctgtctcttctgtgcagaaattcagggcaagcctactttgcagcttaagcttcagggctcccaagataacatagggaaggacacttgctggaaactagttggaattcacacatgcataaacctggatgtgagagagagctgcttcatgggaacccttgaccaatggggaataggagtgggtagaaagaagtggaagagttcctttcaacatcaccatctcaggaagaaggacaaagatttctcatccatgcggaccaacataggaatgccaggaaggatgtag

SEQ ID NO: 8684 - RNA, 495 nt, synthetic construct
  misc_feature 1..495: note = derived and/or modified sequence opt1 fromIL-1__Homo_sapiens__AAF69250
  source 1..495: mol_type = other RNA
atgaacccccagcgcgaggccgcccccaagagctacgcgatccgggactcccgccagatggtgtgggtcctgagcggcaactccctgatcgccgccccgctgagccggtccatcaagcccgtgaccctgcacctcatcgcctgccgcgacaccgagttcagcgacaaggagaaggggaacatggtgtacctgggcatcaaggggaaggacctgtgcctcttctgcgccgagatccagggcaagcccaccctgcagctgaagctccaggggtcccaggacaacatcggcaaggacacgtgctggaagctggtcggcatccacacgtgcatcaacctggacgtgcgggagagctgcttcatggggaccctcgaccagtggggcatcggggtgggccgcaagaagtggaagtccagcttccagcaccaccacctccggaagaaggacaaggacttctccagcatgcgcaccaacatcgggatgccgggccggatgtga

SEQ ID NO: 8685 - RNA, 495 nt, synthetic construct
  misc_feature 1..495: note = derived and/or modified sequence opt2 fromIL-1__Homo_sapiens__AAF69250
  source 1..495: mol_type = other RNA
atgaacccccagcgcgaggccgcccccaagtcctacgccatccgcgactcccgccagatggtctgggtcctctccggcaactccctcatcgccgcccccctctcccgctccatcaagcccgtcaccctccacctcatcgcctgccgcgacaccgagttctccgacaaggagaagggcaacatggtctacctcggcatcaagggcaaggacctctgcctcttctgcgccgagatccagggcaagcccaccctccagctcaagctccagggctcccaggacaacatcggcaaggacacctgctggaagctcgtcggcatccacacctgcatcaacctcgacgtccgcgagtcctgcttcatgggcaccctcgaccagtggggcatcggcgtcggccgcaagaagtggaagtcctccttccagcaccaccacctccgcaagaaggacaaggacttctcctccatgcgcaccaacatcggcatgcccggccgcatgtga

SEQ ID NO: 8686 - RNA, 495 nt, synthetic construct
  misc_feature 1..495: note = derived and/or modified sequence opt3 fromIL-1__Homo_sapiens__AAF69250
  source 1..495: mol_type = other RNA
atgaacccccagagagaggccgctcctaagagctacgcaatcagggactcccggcaaatggtgtgggtcctgtctggcaattcactcattgccgcgccacttagtcgcagcataaaaccggttaccctgcacttgatcgcttgccgagatacagagttctccgacaaggaaaaagggaacatggtgtatttaggaattaagggtaaagatctgtgtctattttgcgccgaaatccagggcaagcccactctccagctgaaacttcaggggtctcaagacaatattggaaaagatacgtgttggaagctggtaggcatccatacctgcataaacttggacgtgcgtgagtcgtgtttcatgggtacactcgatcagtgggggatcggagtcggcagaaagaagtggaaaagctcatttcagcaccatcacctgaggaagaaggacaaagatttcagttccatgcggactaatattggcatgcctgggcgcatgtga

SEQ ID NO: 8687 - RNA, 495 nt, synthetic construct
  misc_feature 1..495: note = derived and/or modified sequence opt4 fromIL-1__Homo_sapiens__AAF69250
  source 1..495: mol_type = other RNA
atgaacccccagagagaggccgcccccaagagctacgccatcagagacagcagacagatggtgtgggtgctgagcggcaacagcctgatcgccgcccccctgagcagaagcatcaagcccgtgaccctgcacctgatcgcctgcagagacaccgagttcagcgacaaggagaagggcaacatggtgtacctgggcatcaagggcaaggacctgtgcctgttctgcgccgagatccagggcaagcccaccctgcagctgaagctgcagggcagccaggacaacatcggcaaggacacctgctggaagctggtgggcatccacacctgcatcaacctggacgtgagagagagctgcttcatgggcaccctggaccagtggggcatcggcgtgggcagaaagaagtggaagagcagcttccagcaccaccacctgagaaagaaggacaaggacttcagcagcatgagaaccaacatcggcatgcccggcagaatgtga

SEQ ID NO: 8688 - RNA, 495 nt, synthetic construct
  misc_feature 1..495: note = derived and/or modified sequence opt5 fromIL-1__Homo_sapiens__AAF69250
  source 1..495: mol_type = other RNA
atgaacccccagagagaggccgctcctaagagctacgccatccgggactcccgccaaatggtgtgggtcctgtctggcaatagcctcattgcggctccgctgtccagatctatcaaacccgttacccttcacctgattgcctgccgggatacagaatttagcgacaaggagaaagggaacatggtgtatctcggaatcaagggcaaagatctgtgtcttttctgcgccgaaattcaggggaagcctacgctgcagctcaagctgcagggatcccaagacaatatcggcaaagatacctgttggaagctggtggggatccatacatgcattaacctcgacgtccgcgagtcttgtttcatgggaaccctggatcagtggggcatcggcgtggggcggaaaaagtggaaaagctcctttcagcaccatcaccttagaaagaaggacaaagatttcagctctatgcgcacaaatattggaatgcccggcagaatgtga

SEQ ID NO: 8689 - protein, 155 aa, synthetic construct
  REGION 1..155: note = IL-1__Homo_sapiens__Q9UBH0
MVLSGALCFRMKDSALKVLYLHNNQLLAGGLHAGKVIKGEEISVVPNRWLDASLSPVILGVQGGSQCLSCGVGQEPTLTLEPVNIMELYLGAKESKSFTFYRRDMGLTSSFESAAYPGWFLCTVPEADQPVRLTQLPENGGWNAPITDFYFQQCD

SEQ ID NO: 8690 - RNA, 468 nt, synthetic construct
  misc_feature 1..468: note = IL-1__Homo_sapiens__AAF02757
  source 1..468: mol_type = other RNA
atggtcctgagtggggcgctgtgcttccgaatgaaggactcggcattgaaggtgctttatctgcataataaccagcttctagctggagggctgcatgcagggaaggtcattaaaggtgaagagatcagcgtggtccccaatcggtggctggatgccagcctgtcccccgtcatcctgggtgtccagggtggaagccagtgcctgtcatgtggggtggggcaggagccgactctaacactagagccagtgaacatcatggagctctatcttggtgccaaggaatccaagagcttcaccttctaccggcgggacatggggctcacctccagcttcgagtcggctgcctacccgggctggttcctgtgcacggtgcctgaagccgatcagcctgtcagactcacccagcttcccgagaatggtggctggaatgcccccatcacagacttctacttccagcagtgtgactag

SEQ ID NO: 8691 - RNA, 468 nt, synthetic construct
  misc_feature 1..468: note = derived and/or modified sequence opt1 fromIL-1__Homo_sapiens__AAF02757
  source 1..468: mol_type = other RNA
atggtgctgagcggcgccctctgcttccgcatgaaggactccgccctgaaggtcctgtacctccacaacaaccagctgctggccgggggcctccacgcggggaaggtgatcaagggcgaggagatcagcgtggtccccaaccggtggctggacgcctccctgagcccggtgatcctcggggtgcagggcggctcccagtgcctgagctgcggggtcggccaggagcccaccctgaccctcgagcccgtgaacatcatggagctgtacctgggggccaaggagtccaagagcttcacgttctaccgccgggacatgggcctcacctccagcttcgagtccgccgcgtaccccgggtggttcctgtgcaccgtgccggaggccgaccagcccgtccgcctgacccagctccccgagaacggcggctggaacgcccccatcacggacttctacttccagcagtgcgactga

SEQ ID NO: 8692 - RNA, 468 nt, synthetic construct
  misc_feature 1..468: note = derived and/or modified sequence opt2 fromIL-1__Homo_sapiens__AAF02757
  source 1..468: mol_type = other RNA
atggtcctctccggcgccctctgcttccgcatgaaggactccgccctcaaggtcctctacctccacaacaaccagctcctcgccggcggcctccacgccggcaaggtcatcaagggcgaggagatctccgtcgtccccaaccgctggctcgacgcctccctctcccccgtcatcctcggcgtccagggcggctcccagtgcctctcctgcggcgtcggccaggagcccaccctcaccctcgagcccgtcaacatcatggagctctacctcggcgccaaggagtccaagtccttcaccttctaccgccgcgacatgggcctcacctcctccttcgagtccgccgcctaccccggctggttcctctgcaccgtccccgaggccgaccagcccgtccgcctcacccagctccccgagaacggcggctggaacgcccccatcaccgacttctacttccagcagtgcgactga

SEQ ID NO: 8693 - RNA, 468 nt, synthetic construct
  misc_feature 1..468: note = derived and/or modified sequence opt3 fromIL-1__Homo_sapiens__AAF02757
  source 1..468: mol_type = other RNA
atggtgctgagcggcgccctctgcttcagaatgaaggactccgctcttaaagtcctgtacttgcacaacaatcagttactggcagggggactacatgccggtaaggttatcaaaggcgaggaaatttctgtggtacccaacaggtggctcgatgcgtcactgagtcctgtgatacttggggtccaaggaggcagccagtgtctgtcctgcggtgtggggcaggagccaaccttgacactcgaaccggttaatatcatggagctgtatctgggagctaaggaatctaaatcgtttactttctaccggcgcgacatgggcctcacgagctcatttgagagtgccgcatatcccggctggttcttatgtaccgtgcctgaggccgatcagccagtccgactgacacaacttcccgaaaacgggggatggaatgctcctattactgacttttacttccagcagtgcgattga

SEQ ID NO: 8694 - RNA, 468 nt, synthetic construct
  misc_feature 1..468: note = derived and/or modified sequence opt4 fromIL-1__Homo_sapiens__AAF02757
  source 1..468: mol_type = other RNA
atggtgctgagcggcgccctgtgcttcagaatgaaggacagcgccctgaaggtgctgtacctgcacaacaaccagctgctggccggcggcctgcacgccggcaaggtgatcaagggcgaggagatcagcgtggtgcccaacagatggctggacgccagcctgagccccgtgatcctgggcgtgcagggcggcagccagtgcctgagctgcggcgtgggccaggagcccaccctgaccctggagcccgtgaacatcatggagctgtacctgggcgccaaggagagcaagagcttcaccttctacagaagagacatgggcctgaccagcagcttcgagagcgccgcctaccccggctggttcctgtgcaccgtgcccgaggccgaccagcccgtgagactgacccagctgcccgagaacggcggctggaacgcccccatcaccgacttctacttccagcagtgcgactga

SEQ ID NO: 8695 - RNA, 468 nt, synthetic construct
  misc_feature 1..468: note = derived and/or modified sequence opt5 fromIL-1__Homo_sapiens__AAF02757
  source 1..468: mol_type = other RNA
atggtgctgagcggcgccctctgcttcagaatgaaggactccgctctgaaagtcctttacctgcacaacaatcagctcctggccgggggacttcatgcgggcaaggttatcaaaggggaggaaatttctgtggtgcccaaccggtggctggatgctagcctctcccctgtcatcctgggagtgcaaggcgggtctcagtgtctgagctgcggagttggccaggagccgaccctcacactggaacccgtgaatattatggagctttatctgggcgccaaggaatccaaatcttttacgttctaccgcagagacatggggctcaccagctcctttgagagcgccgcttatcctggatggttcctgtgtacagtccccgaggccgatcagcctgtgcggcttacccaactgcccgaaaacggcgggtggaatgctcctatcacagacttttacttccagcagtgcgattga

SEQ ID NO: 8696 - protein, 158 aa, synthetic construct
  REGION 1..158: note = IL-1__Homo_sapiens__Q9UHA7
MEKALKIDTPQQGSIQDINHRVWVLQDQTLIAVPRKDRMSPVTIALISCRHVETLEKDRGNPIYLGLNGLNLCLMCAKVGDQPTLQLKEKDIMDLYNQPEPVKSFLFYHSQSGRNSTFESVAFPGWFIAVSSEGGCPLILTQELGKANTTDFGLTMLF

SEQ ID NO: 8697 - RNA, 477 nt, synthetic construct
  misc_feature 1..477: note = IL-1__Homo_sapiens__AAF25211
  source 1..477: mol_type = other RNA
atggaaaaagcattgaaaattgacacacctcagcaggggagcattcaggatatcaatcatcgggtgtgggttcttcaggaccagacgctcatagcagtcccgaggaaggaccgtatgtctccagtcactattgccttaatctcatgccgacatgtggagacccttgagaaagacagagggaaccccatctacctgggcctgaatggactcaatctctgcctgatgtgtgctaaagtcggggaccagcccacactgcagctgaaggaaaaggatataatggatttgtacaaccaacccgagcctgtgaagtcctttctcttctaccacagccagagtggcaggaactccaccttcgagtctgtggctttccctggctggttcatcgctgtcagctctgaaggaggctgtcctctcatccttacccaagaactggggaaagccaacactactgactttgggttaactatgctgttttaa

SEQ ID NO: 8698 - RNA, 477 nt, synthetic construct
  misc_feature 1..477: note = derived and/or modified sequence opt1 fromIL-1__Homo_sapiens__AAF25211
  source 1..477: mol_type = other RNA
atggagaaggccctgaagatcgacacgccccagcagggcagcatccaggacatcaaccaccgcgtgtgggtcctccaggaccagaccctgatcgccgtgccgcggaaggaccgcatgtcccccgtgaccatcgcgctgatcagctgccggcacgtcgagaccctcgagaaggaccgcgggaaccccatctacctgggcctgaacgggctcaacctgtgcctgatgtgcgccaaggtgggcgaccagcccaccctccagctgaaggagaaggacatcatggacctgtacaaccagccggagcccgtgaagtccttcctcttctaccacagccagtccgggcggaacagcaccttcgagtccgtcgccttccccggctggttcatcgccgtgagctccgagggcgggtgccccctgatcctgacgcaggagctcggcaaggccaacaccaccgacttcgggctgaccatgctgttctga

SEQ ID NO: 8699 - RNA, 477 nt, synthetic construct
  misc_feature 1..477: note = derived and/or modified sequence opt2 fromIL-1__Homo_sapiens__AAF25211
  source 1..477: mol_type = other RNA
atggagaaggccctcaagatcgacaccccccagcagggctccatccaggacatcaaccaccgcgtctgggtcctccaggaccagaccctcatcgccgtcccccgcaaggaccgcatgtcccccgtcaccatcgccctcatctcctgccgccacgtcgagaccctcgagaaggaccgcggcaaccccatctacctcggcctcaacggcctcaacctctgcctcatgtgcgccaaggtcggcgaccagcccaccctccagctcaaggagaaggacatcatggacctctacaaccagcccgagcccgtcaagtccttcctcttctaccactcccagtccggccgcaactccaccttcgagtccgtcgccttccccggctggttcatcgccgtctcctccgagggcggctgccccctcatcctcacccaggagctcggcaaggccaacaccaccgacttcggcctcaccatgctcttctga

SEQ ID NO: 8700 - RNA, 477 nt, synthetic construct
  misc_feature 1..477: note = derived and/or modified sequence opt3 fromIL-1__Homo_sapiens__AAF25211
  source 1..477: mol_type = other RNA
atggagaaggccctgaaaatcgacacaccccagcaaggcagcattcaggatataaaccacagagtgtgggtcctccaggaccagacccttatcgctgttcctaggaaggatcggatgtccccagtgactattgcactgatctcttgccgccatgtagaaacgttggagaaagaccgagggaatccgatttacttaggactgaacggtctaaatctctgtctgatgtgcgccaaggtgggcgatcaacccacccttcagctgaaagaaaaggacatcatggatttgtataaccagcctgagccagtcaagtcattcctcttttaccacagtcagagcgggcgtaattccacattcgaatctgtggcgtttcccggatggttcatagctgtttcgtcagagggcggttgtcctctgatcctgactcaagagctcgggaaagccaacaccacagactttggattaaccatgctgttctga

SEQ ID NO: 8701 - RNA, 477 nt, synthetic construct
  misc_feature 1..477: note = derived and/or modified sequence opt4 fromIL-1__Homo_sapiens__AAF25211
  source 1..477: mol_type = other RNA
atggagaaggccctgaagatcgacaccccccagcagggcagcatccaggacatcaaccacagagtgtgggtgctgcaggaccagaccctgatcgccgtgcccagaaaggacagaatgagccccgtgaccatcgccctgatcagctgcagacacgtggagaccctggagaaggacagaggcaaccccatctacctgggcctgaacggcctgaacctgtgcctgatgtgcgccaaggtgggcgaccagcccaccctgcagctgaaggagaaggacatcatggacctgtacaaccagcccgagcccgtgaagagcttcctgttctaccacagccagagcggcagaaacagcaccttcgagagcgtggccttccccggctggttcatcgccgtgagcagcgagggcggctgccccctgatcctgacccaggagctgggcaaggccaacaccaccgacttcggcctgaccatgctgttctga

SEQ ID NO: 8702 - RNA, 477 nt, synthetic construct
  misc_feature 1..477: note = derived and/or modified sequence opt5 fromIL-1__Homo_sapiens__AAF25211
  source 1..477: mol_type = other RNA
atggagaaggccctgaaaatcgacacaccccagcaaggcagcattcaggatatcaaccacagagtgtgggtcctccaggaccagaccctgattgctgttcctcggaaggatcgcatgtccccggtgacgatcgcccttatttcttgcagacatgtggagaccctggagaaagaccgggggaatcccatctacctcggactgaacggccttaatctgtgtctcatgtgcgcgaaggtcggggatcaacctacactgcagctgaaagaaaaggacatcatggatctctataaccagcccgagcctgttaagagcttcctgttttaccactcccagtctggacgcaatagcaccttcgaatccgtggcttttcccggctggttcattgccgtgtctagcgaagggggatgtcctcttatcctgacacaagagctcggcaaagccaacaccacagactttggcctgaccatgcttttctga

SEQ ID NO: 8703 - protein, 569 aa, synthetic construct
  REGION 1..569: note = IL-1R1__Homo_sapiens__P14778
MKVLLRLICFIALLISSLEADKCKEREEKIILVSSANEIDVRPCPLNPNEHKGTITWYKDDSKTPVSTEQASRIHQHKEKLWFVPAKVEDSGHYYCVVRNSSYCLRIKISAKFVENEPNLCYNAQAIFKQKLPVAGDGGLVCPYMEFFKNENNELPKLQWYKDCKPLLLDNIHFSGVKDRLIVMNVAEKHRGNYTCHASYTYLGKQYPITRVIEFITLEENKPTRPVIVSPANETMEVDLGSQIQLICNVTGQLSDIAYWKWNGSVIDEDDPVLGEDYYSVENPANKRRSTLITVLNISEIESRFYKHPFTCFAKNTHGIDAAYIQLIYPVTNFQKHMIGICVTLTVIIVCSVFIYKIFKIDIVLWYRDSCYDFLPIKASDGKTYDAYILYPKTVGEGSTSDCDIFVFKVLPEVLEKQCGYKLFIYGRDDYVGEDIVEVINENVKKSRRLIIILVRETSGFSWLGGSSEEQIAMYNALVQDGIKVVLLELEKIQDYEKMPESIKFIKQKHGAIRWSGDFTQGPQSAKTRFWKNVRYHMPVQRRSPSSKHQLLSPATKEKLQREAHVPLG

SEQ ID NO: 8704 - RNA, 1710 nt, synthetic construct
  misc_feature 1..1710: note = IL-1R1__Homo_sapiens__AAA59137
  source 1..1710: mol_type = other RNA
atgaaagtgttactcagacttatttgtttcatagctctactgatttcttctctggaggctgataaatgcaaggaacgtgaagaaaaaataattttagtgtcatctgcaaatgaaattgatgttcgtccctgtcctcttaacccaaatgaacacaaaggcactataacttggtataaagatgacagcaagacacctgtatctacagaacaagcctccaggattcatcaacacaaagagaaactttggtttgttcctgctaaggtggaggattcaggacattactattgcgtggtaagaaattcatcttactgcctcagaattaaaataagtgcaaaatttgtggagaatgagcctaacttatgttataatgcacaagccatatttaagcagaaactacccgttgcaggagacggaggacttgtgtgcccttatatggagttttttaaaaatgaaaataatgagttacctaaattacagtggtataaggattgcaaacctctacttcttgacaatatacactttagtggagtcaaagataggctcatcgtgatgaatgtggctgaaaagcatagagggaactatacttgtcatgcatcctacacatacttgggcaagcaatatcctattacccgggtaatagaatttattactctagaggaaaacaaacccacaaggcctgtgattgtgagcccagctaatgagacaatggaagtagacttgggatcccagatacaattgatctgtaatgtcaccggccagttgagtgacattgcttactggaagtggaatgggtcagtaattgatgaagatgacccagtgctaggggaagactattacagtgtggaaaatcctgcaaacaaaagaaggagtaccctcatcacagtgcttaatatatcggaaattgaaagtagattttataaacatccatttacctgttttgccaagaatacacatggtatagatgcagcatatatccagttaatatatccagtcactaatttccagaagcacatgattggtatatgtgtcacgttgacagtcataattgtgtgttctgttttcatctataaaatcttcaagattgacattgtgctttggtacagggattcctgctatgattttctcccaataaaagcttcagatggaaagacctatgacgcatatatactgtatccaaagactgttggggaagggtctacctctgactgtgatatttttgtgtttaaagtcttgcctgaggtcttggaaaaacagtgtggatataagctgttcatttatggaagggatgactacgttggggaagacattgttgaggtcattaatgaaaacgtaaagaaaagcagaagactgattatcattttagtcagagaaacatcaggcttcagctggctgggtggttcatctgaagagcaaatagccatgtataatgctcttgttcaggatggaattaaagttgtcctgcttgagctggagaaaatccaagactatgagaaaatgccagaatcgattaaattcattaagcagaaacatggggctatccgctggtcaggggactttacacagggaccacagtctgcaaagacaaggttctggaagaatgtcaggtaccacatgccagtccagcgacggtcaccttcatctaaacaccagttactgtcaccagccactaaggagaaactgcaaagagaggctcacgtgcctctcgggtag

SEQ ID NO: 8705 - RNA, 1710 nt, synthetic construct
  misc_feature 1..1710: note = derived and/or modified sequence opt1 fromIL-1R1__Homo_sapiens__AAA59137
  source 1..1710: mol_type = other RNA
atgaaggtgctgctccgcctgatctgcttcatcgccctgctcatcagctccctggaggccgacaagtgcaaggagcgggaggagaagatcatcctggtcagctccgcgaacgagatcgacgtgcgcccctgcccgctcaaccccaacgagcacaagggcaccatcacctggtacaaggacgacagcaagacgcccgtgtccaccgagcaggccagccggatccaccagcacaaggagaagctgtggttcgtccccgccaaggtggaggactccgggcactactactgcgtggtccgcaacagctcctactgcctgcggatcaagatcagcgccaagttcgtggagaacgagccgaacctctgctacaacgcccaggcgatcttcaagcagaagctgcccgtggccggcgacgggggcctggtctgcccctacatggagttcttcaagaacgagaacaacgagctccccaagctgcagtggtacaaggactgcaagccgctgctcctggacaacatccacttctccggggtgaaggaccgcctgatcgtgatgaacgtcgccgagaagcaccggggcaactacacgtgccacgccagctacacctacctcggcaagcagtaccccatcacccgcgtgatcgagttcatcaccctggaggagaacaagcccacccggcccgtgatcgtctccccggcgaacgagaccatggaggtggacctggggagccagatccagctcatctgcaacgtgacgggccagctgtccgacatcgcctactggaagtggaacgggagcgtcatcgacgaggacgaccccgtgctgggcgaggactactactccgtggagaaccccgccaacaagcgccggagcaccctcatcaccgtcctgaacatctccgagatcgagagccgcttctacaagcaccccttcacgtgcttcgccaagaacacccacgggatcgacgccgcgtacatccagctgatctacccggtgaccaacttccagaagcacatgatcggcatctgcgtgaccctcaccgtcatcatcgtgtgcagcgtcttcatctacaagatcttcaagatcgacatcgtgctgtggtaccgggactcctgctacgacttcctgcccatcaaggccagcgacggcaagacgtacgacgcctacatcctctaccccaagaccgtgggggagggctccaccagcgactgcgacatcttcgtcttcaaggtgctgcccgaggtgctggagaagcagtgcgggtacaagctgttcatctacggccgcgacgactacgtcggcgaggacatcgtggaggtgatcaacgagaacgtcaagaagtcccggcgcctcatcatcatcctggtgcgggagaccagcgggttctcctggctcggcgggagctccgaggagcagatcgccatgtacaacgccctggtgcaggacggcatcaaggtcgtgctgctcgagctggagaagatccaggactacgagaagatgccggagagcatcaagttcatcaagcagaagcacggggcgatccgctggtccggcgacttcacgcagggcccccagagcgccaagacccggttctggaagaacgtgcgctaccacatgcccgtccagcggcgctcccccagctccaagcaccagctgctcagcccggccaccaaggagaagctgcagcgcgaggcccacgtgcccctggggtga

SEQ ID NO: 8706 - RNA, 1710 nt, synthetic construct
  misc_feature 1..1710: note = derived and/or modified sequence opt2 fromIL-1R1__Homo_sapiens__AAA59137
  source 1..1710: mol_type = other RNA
atgaaggtcctcctccgcctcatctgcttcatcgccctcctcatctcctccctcgaggccgacaagtgcaaggagcgcgaggagaagatcatcctcgtctcctccgccaacgagatcgacgtccgcccctgccccctcaaccccaacgagcacaagggcaccatcacctggtacaaggacgactccaagacccccgtctccaccgagcaggcctcccgcatccaccagcacaaggagaagctctggttcgtccccgccaaggtcgaggactccggccactactactgcgtcgtccgcaactcctcctactgcctccgcatcaagatctccgccaagttcgtcgagaacgagcccaacctctgctacaacgcccaggccatcttcaagcagaagctccccgtcgccggcgacggcggcctcgtctgcccctacatggagttcttcaagaacgagaacaacgagctccccaagctccagtggtacaaggactgcaagcccctcctcctcgacaacatccacttctccggcgtcaaggaccgcctcatcgtcatgaacgtcgccgagaagcaccgcggcaactacacctgccacgcctcctacacctacctcggcaagcagtaccccatcacccgcgtcatcgagttcatcaccctcgaggagaacaagcccacccgccccgtcatcgtctcccccgccaacgagaccatggaggtcgacctcggctcccagatccagctcatctgcaacgtcaccggccagctctccgacatcgcctactggaagtggaacggctccgtcatcgacgaggacgaccccgtcctcggcgaggactactactccgtcgagaaccccgccaacaagcgccgctccaccctcatcaccgtcctcaacatctccgagatcgagtcccgcttctacaagcaccccttcacctgcttcgccaagaacacccacggcatcgacgccgcctacatccagctcatctaccccgtcaccaacttccagaagcacatgatcggcatctgcgtcaccctcaccgtcatcatcgtctgctccgtcttcatctacaagatcttcaagatcgacatcgtcctctggtaccgcgactcctgctacgacttcctccccatcaaggcctccgacggcaagacctacgacgcctacatcctctaccccaagaccgtcggcgagggctccacctccgactgcgacatcttcgtcttcaaggtcctccccgaggtcctcgagaagcagtgcggctacaagctcttcatctacggccgcgacgactacgtcggcgaggacatcgtcgaggtcatcaacgagaacgtcaagaagtcccgccgcctcatcatcatcctcgtccgcgagacctccggcttctcctggctcggcggctcctccgaggagcagatcgccatgtacaacgccctcgtccaggacggcatcaaggtcgtcctcctcgagctcgagaagatccaggactacgagaagatgcccgagtccatcaagttcatcaagcagaagcacggcgccatccgctggtccggcgacttcacccagggcccccagtccgccaagacccgcttctggaagaacgtccgctaccacatgcccgtccagcgccgctccccctcctccaagcaccagctcctctcccccgccaccaaggagaagctccagcgcgaggcccacgtccccctcggctga

SEQ ID NO: 8707 - RNA, 1710 nt, synthetic construct
  misc_feature 1..1710: note = derived and/or modified sequence opt3 fromIL-1R1__Homo_sapiens__AAA59137
  source 1..1710: mol_type = other RNA
atgaaggtgctgctcagacttatctgcttcattgccctgttgataagctccttagaggctgacaaatgtaaggaaagggaggagaaaatcattctggtctcttcagcaaacgaaatcgatgttcggccctgccctctaaatccaaacgaacacaagggcaccattacatggtacaaagacgatagtaagactccggtgagcacggagcaggcctcccgcatccatcaacacaaggagaaactctggtttgtacccgcgaaggtggaagactctgggcattattactgtgtcgtgcgaaattcgtcatattgcctgcgtataaaaatcagcgctaagttcgttgagaacgaacctaatctttgttacaacgcccaggcaatttttaaacagaagctgccagtggccggagatggtggcttggtctgcccctatatggagttctttaagaatgagaacaatgaactccctaaactgcagtggtacaaggactgtaaaccactgctcttagataacatccacttcagtggggtgaaggacagactgattgtaatgaatgttgctgagaaacataggggaaactatacctgccacgcatcctacacataccttggcaagcaatatcccatcactcgggtgatagaatttattaccttggaggaaaataaacctacacgcccagtcatcgtgtctccggccaacgagaccatggaggtggatctgggtagccagattcagctaatctgtaatgtcactgggcagctctccgacatcgcttactggaagtggaacggatcagttattgatgaagacgatcccgtgctgggcgaggactattacagtgtagaaaaccctgccaataagagaaggagcacacttataaccgtgctgaacatctctgagattgaatcccggttctataaacacccatttacgtgcttcgcgaagaatactcatggcatcgacgcagcctacatacaattgatttatcccgtcaccaactttcagaaacacatgatcgggatctgtgtgacactcactgttattatcgtgtgctcagtcttcatttacaagatatttaaaatcgatattgtgctgtggtaccgcgacagctgctatgatttcttacctatcaaggctagtgacggaaagacctacgatgcctatatcctgtacccaaaaacagtaggtgagggctctacctccgactgtgatattttcgtttttaaggtgctccccgaggtccttgaaaaacagtgcgggtataagctgttcatatacggacgagacgattatgtgggcgaggacatcgtcgaagtgattaatgagaacgttaaaaagagcagaaggttgatcattatcctagtgcgggaaacgtcgggtttttcttggctcgggggatcctcagaggagcagatagcaatgtacaatgctctggtacaagatggcatcaaggtcgtgctgcttgaactggagaaaattcaggactacgaaaagatgccggagagtatcaaattcattaagcagaaacatggcgccatccgttggagcggggactttactcaaggacctcagtccgcgaagacacgcttctggaagaacgttagatatcacatgcccgtgcagaggcggtctccaagctcaaaacaccagttgctcagtcctgccaccaaggagaaactgcaacgagaagcacatgtccccttaggttga

SEQ ID NO: 8708 - RNA, 1710 nt, synthetic construct
  misc_feature 1..1710: note = derived and/or modified sequence opt4 fromIL-1R1__Homo_sapiens__AAA59137
  source 1..1710: mol_type = other RNA
atgaaggtgctgctgagactgatctgcttcatcgccctgctgatcagcagcctggaggccgacaagtgcaaggagagagaggagaagatcatcctggtgagcagcgccaacgagatcgacgtgagaccctgccccctgaaccccaacgagcacaagggcaccatcacctggtacaaggacgacagcaagacccccgtgagcaccgagcaggccagcagaatccaccagcacaaggagaagctgtggttcgtgcccgccaaggtggaggacagcggccactactactgcgtggtgagaaacagcagctactgcctgagaatcaagatcagcgccaagttcgtggagaacgagcccaacctgtgctacaacgcccaggccatcttcaagcagaagctgcccgtggccggcgacggcggcctggtgtgcccctacatggagttcttcaagaacgagaacaacgagctgcccaagctgcagtggtacaaggactgcaagcccctgctgctggacaacatccacttcagcggcgtgaaggacagactgatcgtgatgaacgtggccgagaagcacagaggcaactacacctgccacgccagctacacctacctgggcaagcagtaccccatcaccagagtgatcgagttcatcaccctggaggagaacaagcccaccagacccgtgatcgtgagccccgccaacgagaccatggaggtggacctgggcagccagatccagctgatctgcaacgtgaccggccagctgagcgacatcgcctactggaagtggaacggcagcgtgatcgacgaggacgaccccgtgctgggcgaggactactacagcgtggagaaccccgccaacaagagaagaagcaccctgatcaccgtgctgaacatcagcgagatcgagagcagattctacaagcaccccttcacctgcttcgccaagaacacccacggcatcgacgccgcctacatccagctgatctaccccgtgaccaacttccagaagcacatgatcggcatctgcgtgaccctgaccgtgatcatcgtgtgcagcgtgttcatctacaagatcttcaagatcgacatcgtgctgtggtacagagacagctgctacgacttcctgcccatcaaggccagcgacggcaagacctacgacgcctacatcctgtaccccaagaccgtgggcgagggcagcaccagcgactgcgacatcttcgtgttcaaggtgctgcccgaggtgctggagaagcagtgcggctacaagctgttcatctacggcagagacgactacgtgggcgaggacatcgtggaggtgatcaacgagaacgtgaagaagagcagaagactgatcatcatcctggtgagagagaccagcggcttcagctggctgggcggcagcagcgaggagcagatcgccatgtacaacgccctggtgcaggacggcatcaaggtggtgctgctggagctggagaagatccaggactacgagaagatgcccgagagcatcaagttcatcaagcagaagcacggcgccatcagatggagcggcgacttcacccagggcccccagagcgccaagaccagattctggaagaacgtgagataccacatgcccgtgcagagaagaagccccagcagcaagcaccagctgctgagccccgccaccaaggagaagctgcagagagaggcccacgtgcccctgggctga

SEQ ID NO: 8709 - RNA, 1710 nt, synthetic construct
  misc_feature 1..1710: note = derived and/or modified sequence opt5 fromIL-1R1__Homo_sapiens__AAA59137
  source 1..1710: mol_type = other RNA
atgaaggtgctgctcagactgatctgcttcattgcccttctgatcagctccctcgaggctgacaaatgtaaggaacgggaggaaaagattatcctggtctctagcgccaacgagattgatgttcgcccctgccctcttaatccgaacgaacacaagggcaccatcacatggtacaaagacgattccaagacgcccgtgtctaccgagcaggcgagcagaatccatcaacacaaggagaaactgtggtttgtgcctgctaaggtcgaagactccgggcattattactgtgtggttcgcaattctagctattgcctccggattaaaatctccgccaagttcgtggagaacgaacccaatctgtgttacaacgcccaggctatttttaaacagaagctgcctgtcgccggagatggcgggctcgtgtgcccctatatggagttctttaagaatgagaacaatgaactgcctaaacttcagtggtacaaggactgtaaaccgctgctcctggataacatccacttcagcggagttaaggacagacttattgtgatgaatgtcgctgagaaacatcggggcaactatacatgccacgcctcttacacctacctggggaagcaatatcccatcacacgcgtgattgaatttatcaccctcgaggaaaataaacctacaagacccgtgatcgtctcccctgcgaacgagaccatggaggttgatctgggaagccagattcagctgatctgtaatgtgacgggccagctctctgacattgcctactggaagtggaacggctccgtgatcgatgaagacgatcccgtcctgggggaggactattacagcgtggaaaacccggctaataagcggcgctctacccttattacagttctgaacatctccgagatcgaaagcagattctataaacacccttttacctgcttcgccaagaatacacatggaattgacgctgcctacatccaactcatttatcccgtgaccaactttcagaaacacatgatcggcatttgtgtcacgctgacagtgatcatcgtttgctccgtgttcatttacaagatctttaaaattgatatcgtcctttggtaccgggactcttgctatgatttcctgcctattaaggcgagcgacgggaagacctacgatgcctatatcctctaccccaaaacagtgggagagggctccaccagcgactgtgatattttcgtctttaaggtgctgcccgaggttctggaaaaacagtgcgggtataaactcttcatctacggacgcgacgattatgtgggcgaggacatcgtcgaagtgattaatgagaacgttaaaaagtctagacggctgatcattatccttgtgcgcgaaacctccggctttagctggctcgggggatctagcgaggagcagattgctatgtacaatgccctggtccaagatggcatcaaggtggtgctgcttgaactggagaaaatccaggactacgaaaagatgcctgagtccattaaattcatcaagcagaaacatggggctattagatggtctggagactttacacaaggcccgcagagcgccaagacgcggttctggaagaacgttagatatcacatgcccgtccagcgccggtcccctagctctaaacaccagctcctgtcccccgccaccaaggagaaactgcaaagagaagctcatgtgcctctcgggtga

SEQ ID NO: 8710 - protein, 569 aa, synthetic construct [sequence omitted]

SEQ ID NO: 8711 - RNA, 1710 nt, synthetic construct
  misc_feature 1..1710: note = IL-1R1__Homo_sapiens__AAH67508
  source 1..1710: mol_type = other RNA
atgaaagtgttactcagacttatttgtttcatagctctactgatttcttctctggaggctgataaatgcaaggaacgtgaagaaaaaataattttagtgtcatctgcaaatgaaattgatgttcgtccctgtcctcttaacccaaatgaacacaaaggcactataacttggtataaagatgacagcaagacacctgtatctacagaacaagcctccaggattcatcaacacaaagagaaactttggtttgttcctgctaaggtggaggattcaggacattactattgcgtggtaagaaattcatcttactgcctcagaattaaaataagtgcaaaatttgtggagaatgagcctaacttatgttataatgcacaagccatatttaagcagaacctacccgttgcaggagacggaggacttgtgtgcccttatatggagttttttaaaaatgaaaataatgagttacctaaattacagtggtataaggattgcaaacctctacttcttgacaatatacactttagtggagtcaaagataggctcatcgtgatgaatgtggctgaaaagcatagagggaactatacttgtcatgcatcctacacatacttgggcaagcaatatcctattacccgggtaatagaatttattactctagaggaaaacaaacccacaaggcctgtgattgtgagcccagctaatgagacaatggaagtagacttgggatcccagatacaattgatctgtaatgtcaccggccagttgagtgacattgcttactggaagtggaatgggtcagtaattgatgaagatgacccagtgctaggggaagactattacagtgtggaaaatcctgcaaacaaaagaaggagtaccctcatcacagtgcttaatatatcggaaattgaaagtagattttataaacatccatttacctgttttgccaagaatacacatggtatagatgcagcatatatccagttaatatatccagtcactaatttccagaagcacatgattggtatatgtgtcacgttgacagtcataattgtgtgttctgttttcatctataaaatcttcaagattgacattgtgctttggtacagggattcctgctatgattttctcccaataaaagcttcagatggaaagacctatgacgcatatatactgtatccaaagactgttggggaagggtctacctctgactgtgatatttttgtgtttaaagtcttgcctgaggtcttggaaaaacagtgtggatataagctgttcatttatggaagggatgactacgttggggaagacattgttgaggtcattaatgaaaacgtaaagaaaagcagaagactgattatcattttagtcagagaaacatcaagcttcagctggctgggtggttcatctgaagagcaaatagccatgtataatgctcttgttcaggatggaattaaagttgtcctgcttgagctggagaaaatccaagactatgagaaaatgccagaatcgattaaattcattaagcagaaacatggggctatccgctggtcaggggactttacacagggaccacagtctgcaaagacaaggttctggaagaatgtcaggtaccacatgccagtccagcgacggtcaccttcatctaaacaccagttactgtcaccagccactaaggagaaactgcaaagagaggctcacgtgcctctcgggtag

SEQ ID NO: 8712 - RNA, 1710 nt, synthetic construct
  misc_feature 1..1710: note = derived and/or modified sequence opt1 fromIL-1R1__Homo_sapiens__AAH67508
  source 1..1710: mol_type = other RNA
atgaaggtgctgctccgcctgatctgcttcatcgccctgctcatcagctccctggaggccgacaagtgcaaggagcgggaggagaagatcatcctggtcagctccgcgaacgagatcgacgtgcgcccctgcccgctcaaccccaacgagcacaagggcaccatcacctggtacaaggacgacagcaagacgcccgtgtccaccgagcaggccagccggatccaccagcacaaggagaagctgtggttcgtccccgccaaggtggaggactccgggcactactactgcgtggtccgcaacagctcctactgcctgcggatcaagatcagcgccaagttcgtggagaacgagccgaacctctgctacaacgcccaggcgatcttcaagcagaacctgcccgtggccggcgacgggggcctggtctgcccctacatggagttcttcaagaacgagaacaacgagctccccaagctgcagtggtacaaggactgcaagccgctgctcctggacaacatccacttctccggggtgaaggaccgcctgatcgtgatgaacgtcgccgagaagcaccggggcaactacacgtgccacgccagctacacctacctcggcaagcagtaccccatcacccgcgtgatcgagttcatcaccctggaggagaacaagcccacccggcccgtgatcgtctccccggcgaacgagaccatggaggtggacctggggagccagatccagctcatctgcaacgtgacgggccagctgtccgacatcgcctactggaagtggaacgggagcgtcatcgacgaggacgaccccgtgctgggcgaggactactactccgtggagaaccccgccaacaagcgccggagcaccctcatcaccgtcctgaacatctccgagatcgagagccgcttctacaagcaccccttcacgtgcttcgccaagaacacccacgggatcgacgccgcgtacatccagctgatctacccggtgaccaacttccagaagcacatgatcggcatctgcgtgaccctcaccgtcatcatcgtgtgcagcgtcttcatctacaagatcttcaagatcgacatcgtgctgtggtaccgggactcctgctacgacttcctgcccatcaaggccagcgacggcaagacgtacgacgcctacatcctctaccccaagaccgtgggggagggctccaccagcgactgcgacatcttcgtcttcaaggtgctgcccgaggtgctggagaagcagtgcgggtacaagctgttcatctacggccgcgacgactacgtcggcgaggacatcgtggaggtgatcaacgagaacgtcaagaagtcccggcgcctcatcatcatcctggtgcgggagaccagctccttcagctggctcgggggctccagcgaggagcagatcgccatgtacaacgccctggtgcaggacgggatcaaggtcgtgctgctcgagctggagaagatccaggactacgagaagatgccggagtccatcaagttcatcaagcagaagcacggcgcgatccgctggagcggggacttcacgcagggcccccagtccgccaagacccggttctggaagaacgtgcgctaccacatgcccgtccagcggcgcagcccctccagcaagcaccagctgctctccccggccaccaaggagaagctgcagcgcgaggcccacgtgcccctgggctga

SEQ ID NO: 8713 - RNA, 1710 nt, synthetic construct
  misc_feature 1..1710: note = derived and/or modified sequence opt2 fromIL-1R1__Homo_sapiens__AAH67508
  source 1..1710: mol_type = other RNA
atgaaggtcctcctccgcctcatctgcttcatcgccctcctcatctcctccctcgaggccgacaagtgcaaggagcgcgaggagaagatcatcctcgtctcctccgccaacgagatcgacgtccgcccctgccccctcaaccccaacgagcacaagggcaccatcacctggtacaaggacgactccaagacccccgtctccaccgagcaggcctcccgcatccaccagcacaaggagaagctctggttcgtccccgccaaggtcgaggactccggccactactactgcgtcgtccgcaactcctcctactgcctccgcatcaagatctccgccaagttcgtcgagaacgagcccaacctctgctacaacgcccaggccatcttcaagcagaacctccccgtcgccggcgacggcggcctcgtctgcccctacatggagttcttcaagaacgagaacaacgagctccccaagctccagtggtacaaggactgcaagcccctcctcctcgacaacatccacttctccggcgtcaaggaccgcctcatcgtcatgaacgtcgccgagaagcaccgcggcaactacacctgccacgcctcctacacctacctcggcaagcagtaccccatcacccgcgtcatcgagttcatcaccctcgaggagaacaagcccacccgccccgtcatcgtctcccccgccaacgagaccatggaggtcgacctcggctcccagatccagctcatctgcaacgtcaccggccagctctccgacatcgcctactggaagtggaacggctccgtcatcgacgaggacgaccccgtcctcggcgaggactactactccgtcgagaaccccgccaacaagcgccgctccaccctcatcaccgtcctcaacatctccgagatcgagtcccgcttctacaagcaccccttcacctgcttcgccaagaacacccacggcatcgacgccgcctacatccagctcatctaccccgtcaccaacttccagaagcacatgatcggcatctgcgtcaccctcaccgtcatcatcgtctgctccgtcttcatctacaagatcttcaagatcgacatcgtcctctggtaccgcgactcctgctacgacttcctccccatcaaggcctccgacggcaagacctacgacgcctacatcctctaccccaagaccgtcggcgagggctccacctccgactgcgacatcttcgtcttcaaggtcctccccgaggtcctcgagaagcagtgcggctacaagctcttcatctacggccgcgacgactacgtcggcgaggacatcgtcgaggtcatcaacgagaacgtcaagaagtcccgccgcctcatcatcatcctcgtccgcgagacctcctccttctcctggctcggcggctcctccgaggagcagatcgccatgtacaacgccctcgtccaggacggcatcaaggtcgtcctcctcgagctcgagaagatccaggactacgagaagatgcccgagtccatcaagttcatcaagcagaagcacggcgccatccgctggtccggcgacttcacccagggcccccagtccgccaagacccgcttctggaagaacgtccgctaccacatgcccgtccagcgccgctccccctcctccaagcaccagctcctctcccccgccaccaaggagaagctccagcgcgaggcccacgtccccctcggctga

SEQ ID NO: 8714 - RNA, 1710 nt, synthetic construct
  misc_feature 1..1710: note = derived and/or modified sequence opt3 fromIL-1R1__Homo_sapiens__AAH67508
  source 1..1710: mol_type = other RNA
atgaaggtgctgctcagacttatctgcttcattgccctgttgataagctccttagaggctgacaaatgtaaggaaagggaggagaaaatcattctggtctcttcagcaaacgaaatcgatgttcggccctgccctctaaatccaaacgaacacaagggcaccattacatggtacaaagacgatagtaagactccggtgagcacggagcaggcctcccgcatccatcaacacaaggagaaactctggtttgtacccgcgaaggtggaagactctgggcattattactgtgtcgtgcgaaattcgtcatattgcctgcgtataaaaatcagcgctaagttcgttgagaacgaacctaatctttgttacaacgcccaggcaatttttaaacagaatctgccagtggccggagatggtggcttggtctgcccctatatggagttctttaagaacgagaataacgaactccctaagctgcagtggtacaaagactgtaagccactgctcttagataatatccacttcagtggggtgaaagacagactgattgtaatgaacgttgctgagaagcataggggaaattatacctgccacgcatcctacacataccttggcaaacaatatcccatcactcgggtgatagaatttattaccttggaggaaaacaagcctacacgcccagtcatcgtgtctccggccaatgagaccatggaggtggatctgggtagccagattcagctaatctgtaacgtcactgggcagctctccgacatcgcttactggaaatggaacggatcagttattgatgaagacgatcccgtgctgggcgaggactattacagtgtagaaaatcctgccaacaagagaaggagcacacttataaccgtgctgaatatctctgagattgaatcccggttctataagcacccatttacgtgcttcgcgaaaaacactcatggcatcgacgcagcctacatacaattgatttatcccgtcaccaattttcagaagcacatgatcgggatctgtgtgacactcactgttattatcgtgtgctcagtcttcatttacaaaatatttaagatcgatattgtgctgtggtaccgcgacagctgctatgatttcttacctatcaaagctagtgacggaaagacctacgatgcctatatcctgtacccaaagacagtaggtgagggctctacctccgactgtgatattttcgtttttaaagtgctccccgaggtccttgaaaagcagtgcgggtataaactgttcatatacggacgagacgattatgtgggcgaggacatcgtcgaagtgattaacgagaatgttaagaaaagcagaaggttgatcattatcctagtgcgggaaacgtcgtctttttcctggctgggtgggtcaagtgaggagcagatagcaatgtacaacgctctcgtacaagatggaatcaaggtcgtgctgcttgaactggagaagattcaggactacgagaaaatgccggaaagcatcaagttcattaaacagaagcatggcgccatccgttggtccggcgactttactcaagggcctcagtctgcgaaaacacgcttctggaagaatgttagatatcacatgcccgtgcagaggcggagcccatcaagtaagcaccagttgctctcccctgccaccaaagagaagctgcaacgagaagcacatgtccccttaggatga

SEQ ID NO: 8715 - RNA, 1710 nt, synthetic construct
  misc_feature 1..1710: note = derived and/or modified sequence opt4 fromIL-1R1__Homo_sapiens__AAH67508
  source 1..1710: mol_type = other RNA
atgaaggtgctgctgagactgatctgcttcatcgccctgctgatcagcagcctggaggccgacaagtgcaaggagagagaggagaagatcatcctggtgagcagcgccaacgagatcgacgtgagaccctgccccctgaaccccaacgagcacaagggcaccatcacctggtacaaggacgacagcaagacccccgtgagcaccgagcaggccagcagaatccaccagcacaaggagaagctgtggttcgtgcccgccaaggtggaggacagcggccactactactgcgtggtgagaaacagcagctactgcctgagaatcaagatcagcgccaagttcgtggagaacgagcccaacctgtgctacaacgcccaggccatcttcaagcagaacctgcccgtggccggcgacggcggcctggtgtgcccctacatggagttcttcaagaacgagaacaacgagctgcccaagctgcagtggtacaaggactgcaagcccctgctgctggacaacatccacttcagcggcgtgaaggacagactgatcgtgatgaacgtggccgagaagcacagaggcaactacacctgccacgccagctacacctacctgggcaagcagtaccccatcaccagagtgatcgagttcatcaccctggaggagaacaagcccaccagacccgtgatcgtgagccccgccaacgagaccatggaggtggacctgggcagccagatccagctgatctgcaacgtgaccggccagctgagcgacatcgcctactggaagtggaacggcagcgtgatcgacgaggacgaccccgtgctgggcgaggactactacagcgtggagaaccccgccaacaagagaagaagcaccctgatcaccgtgctgaacatcagcgagatcgagagcagattctacaagcaccccttcacctgcttcgccaagaacacccacggcatcgacgccgcctacatccagctgatctaccccgtgaccaacttccagaagcacatgatcggcatctgcgtgaccctgaccgtgatcatcgtgtgcagcgtgttcatctacaagatcttcaagatcgacatcgtgctgtggtacagagacagctgctacgacttcctgcccatcaaggccagcgacggcaagacctacgacgcctacatcctgtaccccaagaccgtgggcgagggcagcaccagcgactgcgacatcttcgtgttcaaggtgctgcccgaggtgctggagaagcagtgcggctacaagctgttcatctacggcagagacgactacgtgggcgaggacatcgtggaggtgatcaacgagaacgtgaagaagagcagaagactgatcatcatcctggtgagagagaccagcagcttcagctggctgggcggcagcagcgaggagcagatcgccatgtacaacgccctggtgcaggacggcatcaaggtggtgctgctggagctggagaagatccaggactacgagaagatgcccgagagcatcaagttcatcaagcagaagcacggcgccatcagatggagcggcgacttcacccagggcccccagagcgccaagaccagattctggaagaacgtgagataccacatgcccgtgcagagaagaagccccagcagcaagcaccagctgctgagccccgccaccaaggagaagctgcagagagaggcccacgtgcccctgggctga

SEQ ID NO: 8716 - RNA, 1710 nt, synthetic construct
  misc_feature 1..1710: note = derived and/or modified sequence opt5 fromIL-1R1__Homo_sapiens__AAH67508
  source 1..1710: mol_type = other RNA
atgaaggtgctgctcagactgatctgcttcattgcccttctgatcagctccctcgaggctgacaaatgtaaggaacgggaggaaaagattatcctggtctctagcgccaacgagattgatgttcgcccctgccctcttaatccgaacgaacacaagggcaccatcacatggtacaaagacgattccaagacgcccgtgtctaccgagcaggcgagcagaatccatcaacacaaggagaaactgtggtttgtgcctgctaaggtcgaagactccgggcattattactgtgtggttcgcaattctagctattgcctccggattaaaatctccgccaagttcgtggagaacgaacccaatctgtgttacaacgcccaggctatttttaaacagaatctgcctgtcgccggagatggcgggctcgtgtgcccctatatggagttctttaagaacgagaataacgaactgcctaaacttcagtggtacaaagactgtaagccgctgctcctggataatatccacttcagcggagttaaagacagacttattgtgatgaacgtcgctgagaagcatcggggcaattatacatgccacgcctcttacacctacctggggaaacaatatcccatcacacgcgtgattgaatttatcaccctcgaggaaaacaagcctacaagacccgtgatcgtctcccctgcgaatgagaccatggaggttgatctgggaagccagattcagctgatctgtaacgtgacgggccagctctctgacattgcctactggaaatggaacggctccgtgatcgatgaagacgatcccgtcctgggggaggactattacagcgtggaaaatccggctaacaagcggcgctctacccttattacagttctgaatatctccgagatcgaaagcagattctataagcacccttttacctgcttcgccaaaaacacacatggaattgacgctgcctacatccaactcatttatcccgtgaccaattttcagaagcacatgatcggcatttgtgtcacgctgacagtgatcatcgtttgctccgtgttcatttacaaaatctttaagattgatatcgtcctttggtaccgggactcttgctatgatttcctgcctattaaagcgagcgacgggaagacctacgatgcctatatcctctaccccaagacagtgggagagggctccaccagcgactgtgatattttcgtctttaaagtgctgcccgaggttctggaaaagcagtgcgggtataaactcttcatctacggacgcgacgattatgtgggcgaggacatcgtcgaagtgattaacgagaatgttaagaaatctagacggctgatcattatccttgtgcgcgaaacctccagcttttcttggctgggcgggagctccgaggagcagattgctatgtacaacgccctcgtccaagatggaatcaaggtggtgctgcttgaactggagaagatccaggactacgagaaaatgcctgaatctattaagttcatcaaacagaagcatggcgctattagatggagcggggactttacacaaggaccgcagtccgccaaaacgcggttctggaagaatgttagatatcacatgcccgtccagcgccggagcccttcttccaagcaccagctcctgagccccgccaccaaagagaagctgcaaagagaagctcatgtgcctctcggctga

SEQ ID NO: 8717 - protein, 569 aa, synthetic construct [sequence omitted]

SEQ ID NO: 8718 - RNA, 1710 nt, synthetic construct
  misc_feature 1..1710: note = IL-1R1__Homo_sapiens__AAH67507
  source 1..1710: mol_type = other RNA
atgaaagtgttactcagacttatttgtttcatagctctactgatttcttctctggaggctgataaatgcaaggaacgtgaagaaaaaataattttagtgtcatctgcaaatgaaattgatgttcgtccctgtcctcttaacccaaatgaacacaaaggcactataacttggtataaagatgacagcaagacacctgtatctacagaacaagcctccaggattcatcaacacaaagagaaactttggtttgttcctgctaaggtggaagattcaggacattactattgcgtggtaagaaattcatcttactgcctcagaattaaaataagtgcaaaatttgtggagaatgagcctaacttatgttataatgcacaagccatatttaagcagaaactacccgttgcaggagacggaggacttgtgtgcccttatatggagttttttaaaaatgaaaataatgagttacctaaattacagtggtataaggattgcaaacctctacttcttgacaatatacactttagtggagtcaaagataggctcatcgtgatgaatgtggctgaaaagcatagagggaactatactcgtcatgcatcctacacatacttgggcaagcaatatcctattacccgggtaatagaatttattactctagaggaaaacaaacccacaaggcctgtgattgtgagcccagctaatgagacaatggaagtagacttgggatcccagatacaattgatctgtaatgtcaccggccagttgagtgacattgcttactggaagtggaatgggtcagtaattgatgaagatgacccagtgctaggggaagactattacagtgtggagaatcctgcaaacaaaagaaggagtaccctcatcacagtgcttaatatatcggaaattgaaagtagattttataaacatccatttacctgttttgccaagaatacacatggtatagatgcagcatatatccagttaatatatccagtcactaatttccagaagcacatgattggtatatgtgtcacgttgacagtcataattgtgtgttctgttttcatctataaaatcttcaagattgacattgtgctttggtacagggattcctgctatgattttctcccaataaaagcttcagatggaaagacctatgacgcatatatactgtatccaaagactgttggggaagggtctacctctgactgtgatatttttgtgtttaaagtcttgcctggggtcttggaaaaacagtgtggatataagctgttcatttatggaagggatgactacgttggggaagacattgttgaggtcattaatgaaaacgtaaagaaaagcagaagactgattatcattttagtcagagaaacatcaggcttcagctggctgggtggttcatctgaagagcaaatagccatgtataatgctcttgttcaggacggaattaaagttgtcctgcttgagctggagaaaatccaagactatgagaaaatgccagaatcgattaaattcattaagcagaaacatgggactatccgctggtcaggggactttacacagggaccacagtctgcaaagacaaggttctggaagaatgtcagataccacatgccagtccagcgacggtcaccttcatctaaacaccagttactgtcaccagccactaaggagaaactgcaaagagaggctcacgtgcctctcgggtag

SEQ ID NO: 8719 - RNA, 1710 nt, synthetic construct
  misc_feature 1..1710: note = derived and/or modified sequence opt1 fromIL-1R1__Homo_sapiens__AAH67507
  source 1..1710: mol_type = other RNA
atgaaggtgctgctccgcctgatctgcttcatcgccctgctcatcagctccctggaggccgacaagtgcaaggagcgggaggagaagatcatcctggtcagctccgcgaacgagatcgacgtgcgcccctgcccgctcaaccccaacgagcacaagggcaccatcacctggtacaaggacgacagcaagacgcccgtgtccaccgagcaggccagccggatccaccagcacaaggagaagctgtggttcgtccccgccaaggtggaggactccgggcactactactgcgtggtccgcaacagctcctactgcctgcggatcaagatcagcgccaagttcgtggagaacgagccgaacctctgctacaacgcccaggcgatcttcaagcagaagctgcccgtggccggcgacgggggcctggtctgcccctacatggagttcttcaagaacgagaacaacgagctccccaagctgcagtggtacaaggactgcaagccgctgctcctggacaacatccacttctccggggtgaaggaccgcctgatcgtgatgaacgtcgccgagaagcaccggggcaactacacccgccacgccagctacacctacctcggcaagcagtaccccatcacgcgggtgatcgagttcatcaccctggaggagaacaagcccacccgccccgtgatcgtctccccggcgaacgagaccatggaggtggacctggggagccagatccagctcatctgcaacgtgacgggccagctgtccgacatcgcctactggaagtggaacgggagcgtcatcgacgaggacgaccccgtgctgggcgaggactactactccgtggagaaccccgccaacaagcggcgcagcaccctcatcaccgtcctgaacatctccgagatcgagagccggttctacaagcaccccttcacgtgcttcgccaagaacacccacgggatcgacgccgcgtacatccagctgatctacccggtgaccaacttccagaagcacatgatcggcatctgcgtgaccctcaccgtcatcatcgtgtgcagcgtcttcatctacaagatcttcaagatcgacatcgtgctgtggtaccgcgactcctgctacgacttcctgcccatcaaggccagcgacggcaagacgtacgacgcctacatcctctaccccaagaccgtgggggagggctccaccagcgactgcgacatcttcgtcttcaaggtgctgcccggggtgctggagaagcagtgcggctacaagctgttcatctacggccgggacgactacgtcggggaggacatcgtggaggtgatcaacgagaacgtcaagaagtcccgccggctcatcatcatcctggtgcgcgagaccagcggcttctcctggctcgggggcagctccgaggagcagatcgccatgtacaacgccctggtgcaggacgggatcaaggtcgtgctgctcgagctggagaagatccaggactacgagaagatgccggagagcatcaagttcatcaagcagaagcacggcacgatccggtggtccggcgacttcacccaggggccccagagcgcgaagacccgcttctggaagaacgtgcggtaccacatgcccgtccagcgccgctcccccagctccaagcaccagctgctcagcccggccaccaaggagaagctgcagcgggaggcccacgtgcccctgggctga

SEQ ID NO: 8720 - RNA, 1710 nt, synthetic construct
  misc_feature 1..1710: note = derived and/or modified sequence opt2 fromIL-1R1__Homo_sapiens__AAH67507
  source 1..1710: mol_type = other RNA
atgaaggtcctcctccgcctcatctgcttcatcgccctcctcatctcctccctcgaggccgacaagtgcaaggagcgcgaggagaagatcatcctcgtctcctccgccaacgagatcgacgtccgcccctgccccctcaaccccaacgagcacaagggcaccatcacctggtacaaggacgactccaagacccccgtctccaccgagcaggcctcccgcatccaccagcacaaggagaagctctggttcgtccccgccaaggtcgaggactccggccactactactgcgtcgtccgcaactcctcctactgcctccgcatcaagatctccgccaagttcgtcgagaacgagcccaacctctgctacaacgcccaggccatcttcaagcagaagctccccgtcgccggcgacggcggcctcgtctgcccctacatggagttcttcaagaacgagaacaacgagctccccaagctccagtggtacaaggactgcaagcccctcctcctcgacaacatccacttctccggcgtcaaggaccgcctcatcgtcatgaacgtcgccgagaagcaccgcggcaactacacccgccacgcctcctacacctacctcggcaagcagtaccccatcacccgcgtcatcgagttcatcaccctcgaggagaacaagcccacccgccccgtcatcgtctcccccgccaacgagaccatggaggtcgacctcggctcccagatccagctcatctgcaacgtcaccggccagctctccgacatcgcctactggaagtggaacggctccgtcatcgacgaggacgaccccgtcctcggcgaggactactactccgtcgagaaccccgccaacaagcgccgctccaccctcatcaccgtcctcaacatctccgagatcgagtcccgcttctacaagcaccccttcacctgcttcgccaagaacacccacggcatcgacgccgcctacatccagctcatctaccccgtcaccaacttccagaagcacatgatcggcatctgcgtcaccctcaccgtcatcatcgtctgctccgtcttcatctacaagatcttcaagatcgacatcgtcctctggtaccgcgactcctgctacgacttcctccccatcaaggcctccgacggcaagacctacgacgcctacatcctctaccccaagaccgtcggcgagggctccacctccgactgcgacatcttcgtcttcaaggtcctccccggcgtcctcgagaagcagtgcggctacaagctcttcatctacggccgcgacgactacgtcggcgaggacatcgtcgaggtcatcaacgagaacgtcaagaagtcccgccgcctcatcatcatcctcgtccgcgagacctccggcttctcctggctcggcggctcctccgaggagcagatcgccatgtacaacgccctcgtccaggacggcatcaaggtcgtcctcctcgagctcgagaagatccaggactacgagaagatgcccgagtccatcaagttcatcaagcagaagcacggcaccatccgctggtccggcgacttcacccagggcccccagtccgccaagacccgcttctggaagaacgtccgctaccacatgcccgtccagcgccgctccccctcctccaagcaccagctcctctcccccgccaccaaggagaagctccagcgcgaggcccacgtccccctcggctga

SEQ ID NO: 8721 - RNA, 1710 nt, synthetic construct
  misc_feature 1..1710: note = derived and/or modified sequence opt3 fromIL-1R1__Homo_sapiens__AAH67507
  source 1..1710: mol_type = other RNA
atgaaggtgctgctcagacttatctgcttcattgccctgttgataagctccttagaggctgacaaatgtaaggaaagggaggagaaaatcattctggtctcttcagcaaacgagatcgatgttcggccctgccctctaaatccaaacgaacacaagggcaccattacatggtacaaagacgatagtaagactccggtgagcacggagcaggcctcccgcatccatcaacacaaggagaaactctggtttgtacccgcgaaggtggaagactctgggcattattactgtgtcgtgcgaaattcgtcatattgcctgcgtataaaaatcagcgctaagttcgttgagaacgaacctaatctttgttacaacgcccaggcaatttttaaacagaagctgccagtggccggagatggtggcttggtctgcccctatatggagttctttaagaatgagaacaatgaactccctaaactgcagtggtacaaggactgtaaaccactgctcttagataacatccacttcagtggggtgaaggacagactgattgtaatgaatgttgctgagaaacataggggaaactatacccggcacgcatcctacacataccttggcaagcaatatcccatcactcgcgtgatagaatttattaccttggaggaaaataaacctacaagaccagtcatcgtgtctccggccaacgagaccatggaggtggatctgggtagccagattcagctaatctgcaatgtcactgggcagctctccgacatcgcttactggaagtggaacggatcagttattgatgaagacgatcccgtgctgggcgaggactattacagtgtagaaaaccctgccaataagaggcggagcacacttataaccgtgctgaacatctctgagattgaatcccgcttctataaacacccatttacgtgtttcgcgaagaatactcatggcatcgacgcagcctacatacaattgatttatcccgtcaccaactttcagaaacacatgatcgggatctgcgtgacactcactgttattatcgtgtgttcagtcttcatttacaagatatttaaaatcgatattgtgctgtggtaccgagacagctgctatgatttcttacctatcaaggctagtgacggaaagacctacgatgcctatatcctgtacccaaaaacagtaggtgagggctctacctccgactgcgatattttcgtttttaaggtgctccccggggtccttgagaaacagtgtggatataagctgttcatatacggcagagacgattatgtgggtgaagacatcgtcgaggtgattaatgaaaacgttaaaaagagcaggcggttgatcattatcctagtgcgtgagacgtcggggttttcttggctgggaggctcctcagaagaacagatagcaatgtacaatgctctcgtacaagatggcatcaaggtcgtgctgcttgagctggagaaaattcaggactacgaaaagatgccggaaagtatcaaattcattaagcagaaacatgggactatccgctggagcggagactttacacaaggtcctcagtccgccaagaccagattctggaagaacgttaggtatcacatgcccgtgcagcggcgatctccaagctcaaaacaccagttgctcagtcctgcgactaaggagaaactgcaacgcgaggcccatgtccccttaggctga

SEQ ID NO: 8722 - RNA, 1710 nt, synthetic construct
  misc_feature 1..1710: note = derived and/or modified sequence opt4 fromIL-1R1__Homo_sapiens__AAH67507
  source 1..1710: mol_type = other RNA
atgaaggtgctgctgagactgatctgcttcatcgccctgctgatcagcagcctggaggccgacaagtgcaaggagagagaggagaagatcatcctggtgagcagcgccaacgagatcgacgtgagaccctgccccctgaaccccaacgagcacaagggcaccatcacctggtacaaggacgacagcaagacccccgtgagcaccgagcaggccagcagaatccaccagcacaaggagaagctgtggttcgtgcccgccaaggtggaggacagcggccactactactgcgtggtgagaaacagcagctactgcctgagaatcaagatcagcgccaagttcgtggagaacgagcccaacctgtgctacaacgcccaggccatcttcaagcagaagctgcccgtggccggcgacggcggcctggtgtgcccctacatggagttcttcaagaacgagaacaacgagctgcccaagctgcagtggtacaaggactgcaagcccctgctgctggacaacatccacttcagcggcgtgaaggacagactgatcgtgatgaacgtggccgagaagcacagaggcaactacaccagacacgccagctacacctacctgggcaagcagtaccccatcaccagagtgatcgagttcatcaccctggaggagaacaagcccaccagacccgtgatcgtgagccccgccaacgagaccatggaggtggacctgggcagccagatccagctgatctgcaacgtgaccggccagctgagcgacatcgcctactggaagtggaacggcagcgtgatcgacgaggacgaccccgtgctgggcgaggactactacagcgtggagaaccccgccaacaagagaagaagcaccctgatcaccgtgctgaacatcagcgagatcgagagcagattctacaagcaccccttcacctgcttcgccaagaacacccacggcatcgacgccgcctacatccagctgatctaccccgtgaccaacttccagaagcacatgatcggcatctgcgtgaccctgaccgtgatcatcgtgtgcagcgtgttcatctacaagatcttcaagatcgacatcgtgctgtggtacagagacagctgctacgacttcctgcccatcaaggccagcgacggcaagacctacgacgcctacatcctgtaccccaagaccgtgggcgagggcagcaccagcgactgcgacatcttcgtgttcaaggtgctgcccggcgtgctggagaagcagtgcggctacaagctgttcatctacggcagagacgactacgtgggcgaggacatcgtggaggtgatcaacgagaacgtgaagaagagcagaagactgatcatcatcctggtgagagagaccagcggcttcagctggctgggcggcagcagcgaggagcagatcgccatgtacaacgccctggtgcaggacggcatcaaggtggtgctgctggagctggagaagatccaggactacgagaagatgcccgagagcatcaagttcatcaagcagaagcacggcaccatcagatggagcggcgacttcacccagggcccccagagcgccaagaccagattctggaagaacgtgagataccacatgcccgtgcagagaagaagccccagcagcaagcaccagctgctgagccccgccaccaaggagaagctgcagagagaggcccacgtgcccctgggctga

SEQ ID NO: 8723 - RNA, 1710 nt, synthetic construct
  misc_feature 1..1710: note = derived and/or modified sequence opt5 fromIL-1R1__Homo_sapiens__AAH67507
  source 1..1710: mol_type = other RNA
atgaaggtgctgctcagactgatctgcttcattgcccttctgatcagctccctcgaggctgacaaatgtaaggaacgggaggaaaagattatcctggtctctagcgccaacgagattgatgttcgcccctgccctcttaatccgaacgaacacaagggcaccatcacatggtacaaagacgattccaagacgcccgtgtctaccgagcaggcgagcagaatccatcaacacaaggagaaactgtggtttgtgcctgctaaggtcgaagactccgggcattattactgtgtggttcgcaattctagctattgcctccggattaaaatctccgccaagttcgtggagaacgaacccaatctgtgttacaacgcccaggctatttttaaacagaagctgcctgtcgccggagatggcgggctcgtgtgcccctatatggagttctttaagaatgagaacaatgaactgcctaaacttcagtggtacaaggactgtaaaccgctgctcctggataacatccacttcagcggagttaaggacagacttattgtgatgaatgtcgctgagaaacatcggggcaactatacacgccacgcctcttacacctacctggggaagcaatatcccatcacaagagtgattgaatttatcaccctcgaggaaaataaacctacacggcccgtgatcgtctcccctgcgaacgagaccatggaggttgatctgggaagccagattcagctgatctgcaatgtgacgggccagctctctgacattgcctactggaagtggaacggctccgtgatcgatgaagacgatcccgtcctgggggaggactattacagcgtggaaaacccggctaataagcgcagatctacccttattacagttctgaacatctccgagatcgaaagccggttctataaacacccttttacctgtttcgccaagaatacacatggaattgacgctgcctacatccaactcatttatcccgtgaccaactttcagaaacacatgatcggcatttgcgtcacgctgacagtgatcatcgtttgttccgtgttcatttacaagatctttaaaattgatatcgtcctttggtaccgcgactcttgctatgatttcctgcctattaaggcgagcgacgggaagacctacgatgcctatatcctctaccccaaaacagtgggagagggctccaccagcgactgcgatattttcgtctttaaggtgctgcccggggttctggagaaacagtgtggatataaactcttcatctacggcagagacgattatgtgggcgaagacatcgtcgaggtgattaatgaaaacgttaaaaagtctcggcgcctgatcattatccttgtgagagagacctccgggtttagctggctgggaggctctagcgaagaacagattgctatgtacaatgccctcgtccaagatgggatcaaggtggtgctgcttgagctggagaaaatccaggactacgagaagatgcctgaatccattaaattcatcaagcagaaacatggaacaattcggtggtctggcgactttacgcaagggccgcagagcgctaagaccagattctggaagaacgttcgctatcacatgcccgtccagcggagatcccctagctctaaacaccagctcctgtcccccgccacaaaggagaaactgcaacgcgaggcccatgtgcctctcggatga

SEQ ID NO: 8724 - protein, 85 aa, synthetic construct
  REGION 1..85: note = IRAK1__Homo_sapiens__L8E7M9
MGPWTACSCCRPAPSQAWAWNRTGRGPKKVMNFRADVFTWADPPNPEVKVLMVRSSHGARVLSTLPAVGVGAHARGGEKEVALLF

SEQ ID NO: 8725 - RNA, 258 nt, synthetic construct
  misc_feature 1..258: note = IRAK1__Homo_sapiens__CCQ43144
  source 1..258: mol_type = other RNA
atggggccctggacagcctgcagctgctgtcgtccagctccctcccaggcttgggcctggaacaggacaggcaggggcccgaagaaagtgatgaatttcagagctgatgtgttcacctgggcagatcccccaaatccggaagtcaaagttctcatggtcagaagttctcatggtgcacgagtcctcagcactctgccggcagtgggggtgggggcccatgcccgcgggggagagaaggaggtggccctgctgttctag

SEQ ID NO: 8726 - RNA, 258 nt, synthetic construct
  misc_feature 1..258: note = derived and/or modified sequence opt1 fromIRAK1__Homo_sapiens__CCQ43144
  source 1..258: mol_type = other RNA
atgggcccctggaccgcctgcagctgctgccgcccggccccctcccaggcgtgggcctggaaccggaccgggcgcggccccaagaaggtgatgaacttccgggccgacgtcttcacgtgggccgacccgcccaaccccgaggtgaaggtgctgatggtccgcagctcccacggggcccgggtgctcagcaccctgcccgcggtgggcgtcggggcccacgcccgcggcggcgagaaggaggtggccctcctgttctga

SEQ ID NO: 8727 - RNA, 258 nt, synthetic construct
  misc_feature 1..258: note = derived and/or modified sequence opt2 fromIRAK1__Homo_sapiens__CCQ43144
  source 1..258: mol_type = other RNA
atgggcccctggaccgcctgctcctgctgccgccccgccccctcccaggcctgggcctggaaccgcaccggccgcggccccaagaaggtcatgaacttccgcgccgacgtcttcacctgggccgacccccccaaccccgaggtcaaggtcctcatggtccgctcctcccacggcgcccgcgtcctctccaccctccccgccgtcggcgtcggcgcccacgcccgcggcggcgagaaggaggtcgccctcctcttctga

SEQ ID NO: 8728 - RNA, 258 nt, synthetic construct
  misc_feature 1..258: note = derived and/or modified sequence opt3 fromIRAK1__Homo_sapiens__CCQ43144
  source 1..258: mol_type = other RNA
atgggcccctggaccgcctgcagctgttgcagacctgctccatcccaggcatgggcctggaacaggacagggcggggaccgaagaaagtgatgaatttccgcgcggacgtctttacttgggctgatccccctaacccagaggttaaggtgctgatggtacgatcttcacacggtgcccgtgtgctcagtacgcttcccgcagtcggcgtgggggcccatgctagaggaggcgaaaaagaggttgcactgttgttctga

SEQ ID NO: 8729 - RNA, 258 nt, synthetic construct
  misc_feature 1..258: note = derived and/or modified sequence opt4 fromIRAK1__Homo_sapiens__CCQ43144
  source 1..258: mol_type = other RNA
atgggcccctggaccgcctgcagctgctgcagacccgcccccagccaggcctgggcctggaacagaaccggcagaggccccaagaaggtgatgaacttcagagccgacgtgttcacctgggccgacccccccaaccccgaggtgaaggtgctgatggtgagaagcagccacggcgccagagtgctgagcaccctgcccgccgtgggcgtgggcgcccacgccagaggcggcgagaaggaggtggccctgctgttctga

SEQ ID NO: 8730 - RNA, 258 nt, synthetic construct
  misc_feature 1..258: note = derived and/or modified sequence opt5 fromIRAK1__Homo_sapiens__CCQ43144
  source 1..258: mol_type = other RNA
atgggcccctggaccgcctgcagctgttgcagacctgctccgtcccaggcctgggcgtggaaccggacagggcgcggacccaagaaagtgatgaatttcagagctgacgtctttacgtgggccgatcctcccaaccctgaggttaaggtgctgatggtgcggtctagccacggcgcccgcgtcctctccaccctgcccgctgtgggggttggagcccatgctagaggcggggaaaaagaggtggcccttctgttctga

SEQ ID NO: 8731 - protein, 712 aa, synthetic construct
  REGION 1..712: note = IRAK1__Homo_sapiens__P51617
MAGGPGPGEPAAPGAQHFLYEVPPWVMCRFYKVMDALEPADWCQFAALIVRDQTELRLCERSGQRTASVLWPWINRNARVADLVHILTHLQLLRARDIITAWHPPAPLPSPGTTAPRPSSIPAPAEAEAWSPRKLPSSASTFLSPAFPGSQTHSGPELGLVPSPASLWPPPPSPAPSSTKPGPESSVSLLQGARPFPFCWPLCEISRGTHNFSEELKIGEGGFGCVYRAVMRNTVYAVKRLKENADLEWTAVKQSFLTEVEQLSRFRHPNIVDFAGYCAQNGFYCLVYGFLPNGSLEDRLHCQTQACPPLSWPQRLDILLGTARAIQFLHQDSPSLIHGDIKSSNVLLDERLTPKLGDFGLARFSRFAGSSPSQSSMVARTQTVRGTLAYLPEEYIKTGRLAVDTDTFSFGVVVLETLAGQRAVKTHGARTKYLKDLVEEEAEEAGVALRSTQSTLQAGLAADAWAAPIAMQIYKKHLDPRPGPCPPELGLGLGQLACCCLHRRAKRRPPMTQVYERLEKLQAVVAGVPGHSEAASCIPPSPQENSYVSSTGRAHSGAAPWQPLAAPSGASAQAAEQLQRGPNQPVESDESLGGLSAALRSWHLTPSCPLDPAPLREAGCPQGDTAGESSWGSGPGSRPTAVEGLALGSSASSSSEPPQIIINPARQKMVQKLALYEDGALDSLQLLSSSSLPGLGLEQDRQGPEESDEFQS

SEQ ID NO: 8732 - RNA, 2139 nt, synthetic construct
  misc_feature 1..2139: note = IRAK1__Homo_sapiens__AAC08756
  source 1..2139: mol_type = other RNA
atggccggggggccgggcccgggggagcccgcagcccccggcgcccagcacttcttgtacgaggtgccgccctgggtcatgtgccgcttctacaaagtgatggacgccctggagcccgccgactggtgccagttcgccgccctgatcgtgcgcgaccagaccgagctgcggctgtgcgagcgctccgggcagcgcacggccagcgtcctgtggccctggatcaaccgcaacgcccgtgtggccgacctcgtgcacatcctcacgcacctgcagctgctccgtgcgcgggacatcatcacagcctggcaccctcccgccccgcttccgtccccaggcaccactgccccgaggcccagcagcatccctgcacccgccgaggccgaggcctggagcccccggaagttgccatcctcagcctccaccttcctctccccagcttttccaggctcccagacccattcagggcctgagctcggcctggtcccaagccctgcttccctgtggcctccaccgccatctccagccccttcttctaccaagccaggcccagagagctcagtgtccctcctgcagggagcccgcccctttccgttttgctggcccctctgtgagatttcccggggcacccacaacttctcggaggagctcaagatcggggagggtggctttgggtgcgtgtaccgggcggtgatgaggaacacggtgtatgctgtgaagaggctgaaggagaacgctgacctggagtggactgcagtgaagcagagcttcctgaccgaggtggagcagctgtccaggtttcgtcacccaaacattgtggactttgctggctactgtgctcagaacggcttctactgcctggtgtacggcttcctgcccaacggctccctggaggaccgtctccactgccagacccaggcctgcccacctctctcctggcctcagcgactggacatccttctgggtacagcccgggcaattcagtttctacatcaggacagccccagcctcatccatggagacatcaagagttccaacgtccttctggatgagaggctgacacccaagctgggagactttggcctggcccggttcagccgctttgccgggtccagccccagccagagcagcatggtggcccggacacagacagtgcggggcaccctggcctacctgcccgaggagtacatcaagacgggaaggctggctgtggacacggacaccttcagctttggggtggtagtgctagagaccttggctggtcagagggctgtgaagacgcacggtgccaggaccaagtatctgaaagacctggtggaagaggaggctgaggaggctggagtggctttgagaagcacccagagcacactgcaagcaggtctggctgcagatgcctgggctgctcccatcgccatgcagatctacaagaagcacctggaccccaggcccgggccctgcccacctgagctgggcctgggcctgggccagctggcctgctgctgcctgcaccgccgggccaaaaggaggcctcctatgacccaggtgtacgagaggctagagaagctgcaggcagtggtggcgggggtgcccgggcattcggaggccgccagctgcatccccccttccccgcaggagaactcctacgtgtccagcactggcagagcccacagtggggctgctccatggcagcccctggcagcgccatcaggagccagtgcccaggcagcagagcagctgcagagaggccccaaccagcccgtggagagtgacgagagcctaggcggcctctctgctgccctgcgctcctggcacttgactccaagctgccctctggacccagcacccctcagggaggccggctgtcctcagggggacacggcaggagaatcgagctgggggagtggcccaggatcccggcccacagccgtggaaggactggcccttggcagctctgcatcatcgtcgtcagagccaccgcagattatcatcaaccctgcccgacagaagatggtccagaagctggccctgtacgaggatggggccctggacagcctgcagctgctgtcgtccagctccctcccaggcttgggcctggaacaggacaggcaggggcccgaagaaagtgatgaatttcagagctga

SEQ ID NO: 8733 - RNA, 2139 nt, synthetic construct
  misc_feature 1..2139: note = derived and/or modified sequence opt1 fromIRAK1__Homo_sapiens__AAC08756
  source 1..2139: mol_type = other RNA
atggccggcgggcccggcccgggggagcccgccgcgcccggcgcccagcacttcctgtacgaggtgcccccgtgggtcatgtgccgcttctacaaggtgatggacgccctcgagcccgccgactggtgccagttcgccgcgctgatcgtgcgggaccagaccgagctgcgcctctgcgagcggagcgggcagcgcaccgcctccgtcctgtggccctggatcaaccggaacgcccgcgtggccgacctggtgcacatcctcacgcacctccagctgctgcgggcgcgcgacatcatcaccgcctggcacccgcccgcgcccctgcccagccccggcaccaccgccccgcggccctccagcatccccgcccccgccgaggccgaggcctggtccccgcgcaagctgcccagctccgccagcacgttcctctcccccgccttccccggcagccagacccactccgggccggagctgggcctggtccccagccccgcgtccctctggcccccgccgcccagccccgccccctccagcaccaagcccgggcccgagtccagcgtgtccctgctgcagggcgcccggccgttccccttctgctggcccctctgcgagatcagccgcgggacccacaacttcagcgaggagctgaagatcggcgagggcgggttcggctgcgtgtaccgggccgtcatgcgcaacacggtgtacgccgtgaagcggctgaaggagaacgcggacctcgagtggaccgccgtcaagcagtccttcctgaccgaggtggagcagctgagccgcttccggcaccccaacatcgtggacttcgccgggtactgcgcccagaacggcttctactgcctcgtctacggcttcctgccgaacgggtccctggaggaccgcctccactgccagacccaggcctgcccgcccctgagctggccccagcggctggacatcctcctgggcacggcgcgcgccatccagttcctgcaccaggactcccccagcctcatccacggggacatcaagtccagcaacgtgctgctggacgagcggctcacccccaagctgggcgacttcgggctggcccgcttctcccgcttcgccggcagctcccccagccagtccagcatggtggcgcggacccagaccgtccgcggcacgctcgcctacctgcccgaggagtacatcaagaccgggcggctggccgtggacaccgacaccttctccttcggcgtggtcgtgctcgagacgctggccgggcagcgcgccgtgaagacccacggcgcgcggaccaagtacctgaaggacctcgtcgaggaggaggccgaggaggccggggtggccctgcgcagcacccagtccacgctgcaggccggcctcgcggccgacgcctgggccgccccgatcgcgatgcagatctacaagaagcacctggacccccggcccggcccctgcccgcccgagctggggctgggcctcgggcagctggcctgctgctgcctgcaccgccgggccaagcgccggccgcccatgacccaggtctacgagcgcctcgagaagctgcaggccgtggtggcgggcgtccccgggcacagcgaggccgcctcctgcatcccgcccagcccccaggagaacagctacgtgtccagcaccggccgggcccactccggcgccgcgccctggcagcccctggccgcccccagcggggcctccgcccaggcggccgagcagctccagcgcggcccgaaccagcccgtggagagcgacgagtccctcgggggcctgagcgccgccctgcggtcctggcacctgacccccagctgccccctggacccggcgcccctccgcgaggccggctgcccccagggggacacggccggcgagtccagctgggggtccggccccgggagccggccgaccgccgtcgagggcctggccctgggctccagcgcgtccagcagctccgagccgccccagatcatcatcaaccccgcccgccagaagatggtgcagaagctcgccctgtacgaggacggggccctggacagcctccagctgctgtccagctccagcctccccggcctggggctggagcaggaccggcagggccccgaggagtccgacgagttccagagctga

SEQ ID NO: 8734 - RNA, 2139 nt, synthetic construct
  misc_feature 1..2139: note = derived and/or modified sequence opt2 fromIRAK1__Homo_sapiens__AAC08756
  source 1..2139: mol_type = other RNA
atggccggcggccccggccccggcgagcccgccgcccccggcgcccagcacttcctctacgaggtccccccctgggtcatgtgccgcttctacaaggtcatggacgccctcgagcccgccgactggtgccagttcgccgccctcatcgtccgcgaccagaccgagctccgcctctgcgagcgctccggccagcgcaccgcctccgtcctctggccctggatcaaccgcaacgcccgcgtcgccgacctcgtccacatcctcacccacctccagctcctccgcgcccgcgacatcatcaccgcctggcacccccccgcccccctcccctcccccggcaccaccgccccccgcccctcctccatccccgcccccgccgaggccgaggcctggtccccccgcaagctcccctcctccgcctccaccttcctctcccccgccttccccggctcccagacccactccggccccgagctcggcctcgtcccctcccccgcctccctctggcccccccccccctcccccgccccctcctccaccaagcccggccccgagtcctccgtctccctcctccagggcgcccgccccttccccttctgctggcccctctgcgagatctcccgcggcacccacaacttctccgaggagctcaagatcggcgagggcggcttcggctgcgtctaccgcgccgtcatgcgcaacaccgtctacgccgtcaagcgcctcaaggagaacgccgacctcgagtggaccgccgtcaagcagtccttcctcaccgaggtcgagcagctctcccgcttccgccaccccaacatcgtcgacttcgccggctactgcgcccagaacggcttctactgcctcgtctacggcttcctccccaacggctccctcgaggaccgcctccactgccagacccaggcctgcccccccctctcctggccccagcgcctcgacatcctcctcggcaccgcccgcgccatccagttcctccaccaggactccccctccctcatccacggcgacatcaagtcctccaacgtcctcctcgacgagcgcctcacccccaagctcggcgacttcggcctcgcccgcttctcccgcttcgccggctcctccccctcccagtcctccatggtcgcccgcacccagaccgtccgcggcaccctcgcctacctccccgaggagtacatcaagaccggccgcctcgccgtcgacaccgacaccttctccttcggcgtcgtcgtcctcgagaccctcgccggccagcgcgccgtcaagacccacggcgcccgcaccaagtacctcaaggacctcgtcgaggaggaggccgaggaggccggcgtcgccctccgctccacccagtccaccctccaggccggcctcgccgccgacgcctgggccgcccccatcgccatgcagatctacaagaagcacctcgacccccgccccggcccctgcccccccgagctcggcctcggcctcggccagctcgcctgctgctgcctccaccgccgcgccaagcgccgcccccccatgacccaggtctacgagcgcctcgagaagctccaggccgtcgtcgccggcgtccccggccactccgaggccgcctcctgcatccccccctccccccaggagaactcctacgtctcctccaccggccgcgcccactccggcgccgccccctggcagcccctcgccgccccctccggcgcctccgcccaggccgccgagcagctccagcgcggccccaaccagcccgtcgagtccgacgagtccctcggcggcctctccgccgccctccgctcctggcacctcaccccctcctgccccctcgaccccgcccccctccgcgaggccggctgcccccagggcgacaccgccggcgagtcctcctggggctccggccccggctcccgccccaccgccgtcgagggcctcgccctcggctcctccgcctcctcctcctccgagcccccccagatcatcatcaaccccgcccgccagaagatggtccagaagctcgccctctacgaggacggcgccctcgactccctccagctcctctcctcctcctccctccccggcctcggcctcgagcaggaccgccagggccccgaggagtccgacgagttccagtcctga

SEQ ID NO: 8735 - RNA, 2139 nt, synthetic construct
  misc_feature 1..2139: note = derived and/or modified sequence opt3 fromIRAK1__Homo_sapiens__AAC08756
  source 1..2139: mol_type = other RNA
atggccggcgggcccggacctggtgagccagctgcaccgggcgcccagcacttcctgtacgaagtgcccccttgggtcatgtgcagattttataaggttatggacgcgctcgagccagctgattggtgtcaattcgccgcacttatcgtgagggaccagaccgaactgcggttgtgcgagcgcagcgggcagcgaacagcctccgtattatggccctggattaaccgtaatgctagagtggcagatctggtccatatactaactcacctccagctgcttagggcccgggacatcattacggcttggcatcctccagcgcccctgccttctccaggaaccacagccccgcgcccctcaagtatccctgcaccagccgaagctgaggcctggagccccagaaaattgccttcctctgcatcgacttttctctcaccagctttccccggcagccaaacccacagtggtccggagctggggctggtgccttcccccgcctctctctggccacctcccccaagccccgcgccttcctcaacaaagccaggaccggaaagtagcgtttctttactgcagggcgccaggccctttcctttctgttggccactttgcgagatttcccggggcacccataacttttcagaagagttgaaaatcggggagggaggtttcggctgtgtgtaccgcgcagtcatgcgaaatactgtgtatgctgtaaagagactgaaagaaaacgccgatctagagtggacagctgttaagcagagctttctcaccgaagtggagcagctgagtaggttccggcaccccaatatagtcgactttgccgggtactgcgcacaaaacggattctattgtcttgtgtacggctttctgcctaatggttctttggaagatcgtctccactgccagacgcaggcctgtccacccctgtcctggccgcagcgcttagacatcctgctcgggactgctagagcgattcaattccttcatcaggatagcccttcgctgatccacggagacattaagtcttccaacgtgttgctagatgagaggctgaccccaaaactcggcgacttcggcctggcacggttttcacgattcgccgggagtagcccctcccagtctagcatggtcgctcgcacacaaactgttagaggaacccttgcctatctgcctgaggaatacatcaagacaggtaggttggcagtggataccgacacgttttcattcggcgtagtggtcctcgagactctggccgggcagcgggctgtgaaaacacatggagcccgcaccaagtacttaaaagacctggttgaagaggaagcagaggaggcgggcgtggctctaagaagtactcagtccacactccaggccggtctggcagccgatgcttgggccgcacccatagctatgcaaatttataagaagcaccttgacccaaggcctgggccctgcccaccggaattgggcctgggactcggccagctggcctgttgctgccttcaccgtcgggcgaaacgaagacctcccatgacccaggtctacgagaggctggaaaagttgcaggccgtggtagctggggttccaggacatagcgaggcagcctcttgtattcccccttcaccacaagaaaatagttatgtgagctccacgggtcgcgctcactctggcgccgcaccctggcagcctctcgcggccccgtcgggggctagcgcccaggcagctgagcagctgcaacggggaccaaaccagcccgtcgagtccgatgaatcattaggcggtctgagtgccgcactaagatcttggcatctcacccctagctgcccactggaccccgcccctcttagggaggctgggtgtccgcagggcgatacagcgggagaatcctcatggggcagcgggcccggatctcgcccaactgccgtggagggtttggcactgggctccagtgcttctagctcctcagagcctccccagatcatcatcaatccagcccgacagaaaatggtccaaaagctcgccctgtacgaagacggggctttagatagtctgcagcttttgagctcgtcctctctccctggactgggcctagagcaagaccggcagggtcccgaagagagcgatgaatttcagtcatga

SEQ ID NO: 8736 - RNA, 2139 nt, synthetic construct
  misc_feature 1..2139: note = derived and/or modified sequence opt4 fromIRAK1__Homo_sapiens__AAC08756
  source 1..2139: mol_type = other RNA
atggccggcggccccggccccggcgagcccgccgcccccggcgcccagcacttcctgtacgaggtgcccccctgggtgatgtgcagattctacaaggtgatggacgccctggagcccgccgactggtgccagttcgccgccctgatcgtgagagaccagaccgagctgagactgtgcgagagaagcggccagagaaccgccagcgtgctgtggccctggatcaacagaaacgccagagtggccgacctggtgcacatcctgacccacctgcagctgctgagagccagagacatcatcaccgcctggcacccccccgcccccctgcccagccccggcaccaccgcccccagacccagcagcatccccgcccccgccgaggccgaggcctggagccccagaaagctgcccagcagcgccagcaccttcctgagccccgccttccccggcagccagacccacagcggccccgagctgggcctggtgcccagccccgccagcctgtggccccccccccccagccccgcccccagcagcaccaagcccggccccgagagcagcgtgagcctgctgcagggcgccagacccttccccttctgctggcccctgtgcgagatcagcagaggcacccacaacttcagcgaggagctgaagatcggcgagggcggcttcggctgcgtgtacagagccgtgatgagaaacaccgtgtacgccgtgaagagactgaaggagaacgccgacctggagtggaccgccgtgaagcagagcttcctgaccgaggtggagcagctgagcagattcagacaccccaacatcgtggacttcgccggctactgcgcccagaacggcttctactgcctggtgtacggcttcctgcccaacggcagcctggaggacagactgcactgccagacccaggcctgcccccccctgagctggccccagagactggacatcctgctgggcaccgccagagccatccagttcctgcaccaggacagccccagcctgatccacggcgacatcaagagcagcaacgtgctgctggacgagagactgacccccaagctgggcgacttcggcctggccagattcagcagattcgccggcagcagccccagccagagcagcatggtggccagaacccagaccgtgagaggcaccctggcctacctgcccgaggagtacatcaagaccggcagactggccgtggacaccgacaccttcagcttcggcgtggtggtgctggagaccctggccggccagagagccgtgaagacccacggcgccagaaccaagtacctgaaggacctggtggaggaggaggccgaggaggccggcgtggccctgagaagcacccagagcaccctgcaggccggcctggccgccgacgcctgggccgcccccatcgccatgcagatctacaagaagcacctggaccccagacccggcccctgcccccccgagctgggcctgggcctgggccagctggcctgctgctgcctgcacagaagagccaagagaagaccccccatgacccaggtgtacgagagactggagaagctgcaggccgtggtggccggcgtgcccggccacagcgaggccgccagctgcatcccccccagcccccaggagaacagctacgtgagcagcaccggcagagcccacagcggcgccgccccctggcagcccctggccgcccccagcggcgccagcgcccaggccgccgagcagctgcagagaggccccaaccagcccgtggagagcgacgagagcctgggcggcctgagcgccgccctgagaagctggcacctgacccccagctgccccctggaccccgcccccctgagagaggccggctgcccccagggcgacaccgccggcgagagcagctggggcagcggccccggcagcagacccaccgccgtggagggcctggccctgggcagcagcgccagcagcagcagcgagcccccccagatcatcatcaaccccgccagacagaagatggtgcagaagctggccctgtacgaggacggcgccctggacagcctgcagctgctgagcagcagcagcctgcccggcctgggcctggagcaggacagacagggccccgaggagagcgacgagttccagagctga

SEQ ID NO: 8737 - RNA, 2139 nt, synthetic construct
  misc_feature 1..2139: note = derived and/or modified sequence opt5 fromIRAK1__Homo_sapiens__AAC08756
  source 1..2139: mol_type = other RNA
atggccggcgggcccggacctggcgagccggctgcccccggggcgcagcacttcctgtacgaagtgcctccctgggtcatgtgcagattttataaggttatggacgctctcgagcctgccgattggtgtcaattcgccgctctgatcgtgcgggaccagaccgaacttcgcctgtgcgagagaagcggacagcggacagcctccgtgctctggccctggattaaccgcaatgctagagtcgccgatctggtgcatatccttacgcatctgcagctcctgcgggcgcgcgacattatcaccgcctggcaccctccggctcccctgccttctcccggcacaaccgcccctagacccagctccattccggctcctgccgaagcggaggcctggtctccccggaaactccctagctccgcttctacatttctgagccccgccttccccgggtcccaaacccacagcggacctgagcttggcctggttccgtctcccgcttccctctggcctccccctcccagcccggccccttcttccacaaagcccggccctgaaagctctgtgtccctgcttcagggggcccgcccctttcctttctgttggcccctgtgcgagatcagcagaggaacccataacttttccgaggagctcaaaatcggcgaagggggattcggctgtgtctaccgggctgtgatgcgcaatacggtttatgcggtgaagagactgaaagaaaacgccgatctggagtggaccgctgtcaagcagtcttttctcacagaagtggagcagctgagccggttccgccacccgaatattgtggactttgccgggtactgcgcccaaaacggattctattgtcttgtctacggctttctgcctaatggctccctcgaagatagactgcactgccagacccaggcttgtcctccccttagctggccccagcggctggacatcctcctggggacagccagagcgattcaattcctgcatcaggattctccgtccctcatccacggagacattaagagctctaacgttctgcttgatgagcgcctgacccccaaactcggcgacttcgggctggctcggtttagcagattcgccggatcctctcctagccagtccagcatggtggcccgcacgcaaacagtgcggggcacccttgcttatctgcccgaggaatacatcaagacagggagactcgccgtcgataccgacaccttttctttcggagtggttgtgctggagacactggctggccagcgcgccgtcaaaacgcatggcgcgcggaccaagtacctcaaagacctggtggaagaggaagccgaggaggctggggttgcccttagatccacacagagcaccctgcaggctggactcgccgcggatgcctgggctgcccctattgctatgcaaatctataagaagcacctggacccccgccctggcccctgcccgcctgaactggggcttggactcggccagctggcctgttgctgcctgcaccggagagccaaacgccggccccctatgacacaggtgtacgagagactcgaaaagctgcaggctgtcgtggcgggggtccccggccattctgaggccgcttcctgtatcccgcctagcccccaagaaaattcctatgtgtctagcaccggacgggcccactccggcgccgctccttggcagccccttgccgcgccctctggggctagcgcccaggccgctgagcagctgcaacgcggacctaaccagccggttgagtccgatgaaagcctcggcgggctgtctgccgcgctgagatcctggcatcttacgcccagctgccctctcgaccccgctcctctgcgggaggccggatgtccccagggcgatacagccggggaatcttcctggggcagcggacctggctctagaccgaccgctgtggaggggctggccctcggaagctccgcttctagctccagcgagccccctcagattatcattaatcccgcccgccagaaaatggtccaaaagctggcgctttacgaagacggcgccctggattccctccagctgctgtctagctcctctcttcctgggctcggactggagcaagaccggcagggccccgaagagagcgatgaatttcagtcctga

SEQ ID NO: 8738 - protein, 625 aa, synthetic construct
  REGION 1..625: note = IRAK2__Homo_sapiens__O43187
MACYIYQLPSWVLDDLCRNMDALSEWDWMEFASYVITDLTQLRKIKSMERVQGVSITRELLWWWGMRQATVQQLVDLLCRLELYRAAQIILNWKPAPEIRCPIPAFPDSVKPEKPLAASVRKAEDEQEEGQPVRMATFPGPGSSPARAHQPAFLQPPEEDAPHSLRSDLPTSSDSKDFSTSIPKQEKLLSLAGDSLFWSEADVVQATDDFNQNRKISQGTFADVYRGHRHGKPFVFKKLRETACSSPGSIERFFQAELQICLRCCHPNVLPVLGFCAARQFHSFIYPYMANGSLQDRLQGQGGSDPLPWPQRVSICSGLLCAVEYLHGLEIIHSNVKSSNVLLDQNLTPKLAHPMAHLCPVNKRSKYTMMKTHLLRTSAAYLPEDFIRVGQLTKRVDIFSCGIVLAEVLTGIPAMDNNRSPVYLKDLLLSDIPSSTASLCSRKTGVENVMAKEICQKYLEKGAGRLPEDCAEALATAACLCLRRRNTSLQEVCGSVAAVEERLRGRETLLPWSGLSEGTGSSSNTPEETDDVDNSSLDASSSMSVAPWAGAATPLLPTENGEGRLRVIVGREADSSSEACVGLEPPQDVTETSWQIEINEAKRKLMENILLYKEEKVDSIELFGP

SEQ ID NO: 8739 - RNA, 1878 nt, synthetic construct
  misc_feature 1..1878: note = IRAK2__Homo_sapiens__AAI25185
  source 1..1878: mol_type = other RNA
atggcctgctacatctaccagctgccctcctgggtgctggacgacctgtgccgcaacatggacgcgctcagcgagtgggactggatggagttcgcctcctacgtgatcacagacctgacccagctgcggaagatcaagtccatggagcgggtgcagggtgtgagcatcacgcgggagctgctgtggtggtggggcatgcggcaggccaccgtccagcaacttgtggacctcctgtgccgcctggagctctaccgggctgcccagatcatcctgaactggaaaccggctcctgaaatcaggtgtcccattccagccttccctgactctgtgaagccagaaaagcctttggcagcttctgtaagaaaggctgaggatgaacaggaagaggggcagcctgtgaggatggccacctttccaggcccagggtcctctccagccagagcccaccagccggcctttctccagcctcctgaagaagatgcccctcattccttgagaagcgacctccccacttcgtctgattcaaaggacttcagcacctccattcctaagcaggaaaaacttttgagcttggctggagacagccttttctggagtgaggcagacgtggtccaggcaaccgatgacttcaatcaaaaccgcaaaatcagccaggggacctttgctgacgtctacagagggcacaggcacgggaagccattcgtcttcaagaagctcagagagacagcctgttcaagtccaggatcaatcgaaagattcttccaggcagagttgcagatttgtcttagatgctgccaccccaatgtcttacctgtgctgggcttctgtgctgcaagacagtttcacagcttcatctacccctacatggcaaatggttccctacaggacagactgcagggtcagggtggctcggaccccctcccctggccccagcgtgtcagcatctgctcagggctgctctgtgccgtcgagtacctgcatggtctggagatcatccacagcaacgtcaagagctctaatgtcttgctggaccaaaatctcacccccaaacttgctcacccaatggctcatctgtgtcctgtcaacaaaaggtcaaaatacaccatgatgaagactcacctgctccggacgtcagccgcgtatctgccagaggatttcatccgggtggggcagctgacaaagcgagtggacatcttcagctgtggaatagtgttggccgaggtcctcacgggcatccctgcaatggataacaaccgaagcccggtttacctgaaggacttactcctcagtgatattccaagcagcaccgcctcgctctgctccaggaagacgggcgtggagaacgtgatggcaaaggagatctgccagaagtacctggagaagggcgcagggaggcttccggaggactgcgccgaggccctggccacggctgcctgcctgtgcctgcggaggcgtaacaccagcctgcaggaggtgtgtggctctgtggctgctgtggaagagcggctccgaggtcgggagacgttgctcccttggagtgggctttctgagggtacaggctcttcttccaacaccccagaggaaacagacgacgttgacaattccagccttgatgcctcctcctccatgagtgtggcaccctgggcaggggctgccaccccacttctccccacagagaatggggaaggaaggctgcgggtcatcgtgggaagggaggctgactcctcctctgaggcctgtgttggcctggagcctccccaggatgttacagaaacttcgtggcaaattgagatcaatgaggccaaaaggaaactgatggagaatattctgctctacaaagaggaaaaagtggacagcattgagctctttggcccctga

SEQ ID NO: 8740 - RNA, 1878 nt, synthetic construct
  misc_feature 1..1878: note = derived and/or modified sequence opt1 fromIRAK2__Homo_sapiens__AAI25185
  source 1..1878: mol_type = other RNA
atggcctgctacatctaccagctgcccagctgggtgctcgacgacctgtgccgcaacatggacgccctgtccgagtgggactggatggagttcgcgagctacgtcatcaccgacctcacccagctgcggaagatcaagtccatggagcgcgtgcagggcgtgagcatcacgcgggagctgctctggtggtgggggatgcgccaggccaccgtccagcagctggtggacctgctctgccggctggagctgtaccgcgccgcccagatcatcctcaactggaagccggcccccgagatccggtgccccatccccgcgttcccggactccgtgaagcccgagaagcccctggccgccagcgtccgcaaggccgaggacgagcaggaggagggccagcccgtgcggatggcgaccttcccggggcccggctccagccccgcccgcgcccaccagcccgccttcctgcagccgcccgaggaggacgcgccccactccctccggagcgacctgcccacctccagcgactccaaggacttcagcacgtccatcccgaagcaggagaagctgctcagcctggccggggactccctgttctggagcgaggccgacgtggtccaggccaccgacgacttcaaccagaaccgcaagatctcccagggcaccttcgccgacgtgtaccggggccaccgccacgggaagcccttcgtgttcaagaagctccgggagaccgcctgcagcagccccggctccatcgagcgcttcttccaggcggagctgcagatctgcctgcggtgctgccaccccaacgtcctcccggtgctggggttctgcgccgcccgccagttccacagcttcatctacccctacatggccaacggctccctgcaggaccggctccaggggcagggcggcagcgaccccctgccctggccgcagcgcgtgtccatctgcagcgggctgctctgcgccgtcgagtacctgcacggcctggagatcatccactccaacgtcaagagctccaacgtgctcctggaccagaacctgacgcccaagctcgcgcaccccatggcccacctgtgccccgtgaacaagcggagcaagtacaccatgatgaagacccacctcctccgcacctccgccgcctacctgccggaggacttcatccgcgtggggcagctgacgaagcgggtggacatcttcagctgcggcatcgtcctcgccgaggtgctgaccggcatccccgcgatggacaacaaccgctcccccgtgtacctgaaggacctcctgctgagcgacatcccgtccagcaccgcctccctctgcagccggaagaccggggtcgagaacgtgatggccaaggagatctgccagaagtacctggagaagggcgccgggcgcctgcccgaggactgcgcggaggccctggccacggccgcctgcctctgcctgcggcgccggaacacctccctgcaggaggtctgcggcagcgtggcggccgtggaggagcgcctccgggggcgcgagaccctgctgccctggagcggcctctccgagggcaccgggagctccagcaacacgcccgaggagaccgacgacgtcgacaactccagcctggacgcctccagctccatgagcgtggccccgtgggccggcgcggccacgcccctgctccccaccgagaacggggagggccggctgcgcgtgatcgtcgggcgggaggccgactccagctccgaggcctgcgtgggcctggagcccccgcaggacgtgaccgagaccagctggcagatcgagatcaacgaggccaagcgcaagctcatggagaacatcctgctgtacaaggaggagaaggtcgactccatcgagctgttcggcccctga

SEQ ID NO: 8741 - RNA, 1878 nt, synthetic construct
  misc_feature 1..1878: note = derived and/or modified sequence opt2 fromIRAK2__Homo_sapiens__AAI25185
  source 1..1878: mol_type = other RNA
atggcctgctacatctaccagctcccctcctgggtcctcgacgacctctgccgcaacatggacgccctctccgagtgggactggatggagttcgcctcctacgtcatcaccgacctcacccagctccgcaagatcaagtccatggagcgcgtccagggcgtctccatcacccgcgagctcctctggtggtggggcatgcgccaggccaccgtccagcagctcgtcgacctcctctgccgcctcgagctctaccgcgccgcccagatcatcctcaactggaagcccgcccccgagatccgctgccccatccccgccttccccgactccgtcaagcccgagaagcccctcgccgcctccgtccgcaaggccgaggacgagcaggaggagggccagcccgtccgcatggccaccttccccggccccggctcctcccccgcccgcgcccaccagcccgccttcctccagccccccgaggaggacgccccccactccctccgctccgacctccccacctcctccgactccaaggacttctccacctccatccccaagcaggagaagctcctctccctcgccggcgactccctcttctggtccgaggccgacgtcgtccaggccaccgacgacttcaaccagaaccgcaagatctcccagggcaccttcgccgacgtctaccgcggccaccgccacggcaagcccttcgtcttcaagaagctccgcgagaccgcctgctcctcccccggctccatcgagcgcttcttccaggccgagctccagatctgcctccgctgctgccaccccaacgtcctccccgtcctcggcttctgcgccgcccgccagttccactccttcatctacccctacatggccaacggctccctccaggaccgcctccagggccagggcggctccgaccccctcccctggccccagcgcgtctccatctgctccggcctcctctgcgccgtcgagtacctccacggcctcgagatcatccactccaacgtcaagtcctccaacgtcctcctcgaccagaacctcacccccaagctcgcccaccccatggcccacctctgccccgtcaacaagcgctccaagtacaccatgatgaagacccacctcctccgcacctccgccgcctacctccccgaggacttcatccgcgtcggccagctcaccaagcgcgtcgacatcttctcctgcggcatcgtcctcgccgaggtcctcaccggcatccccgccatggacaacaaccgctcccccgtctacctcaaggacctcctcctctccgacatcccctcctccaccgcctccctctgctcccgcaagaccggcgtcgagaacgtcatggccaaggagatctgccagaagtacctcgagaagggcgccggccgcctccccgaggactgcgccgaggccctcgccaccgccgcctgcctctgcctccgccgccgcaacacctccctccaggaggtctgcggctccgtcgccgccgtcgaggagcgcctccgcggccgcgagaccctcctcccctggtccggcctctccgagggcaccggctcctcctccaacacccccgaggagaccgacgacgtcgacaactcctccctcgacgcctcctcctccatgtccgtcgccccctgggccggcgccgccacccccctcctccccaccgagaacggcgagggccgcctccgcgtcatcgtcggccgcgaggccgactcctcctccgaggcctgcgtcggcctcgagcccccccaggacgtcaccgagacctcctggcagatcgagatcaacgaggccaagcgcaagctcatggagaacatcctcctctacaaggaggagaaggtcgactccatcgagctcttcggcccctga

SEQ ID NO: 8742 - RNA, 1878 nt, synthetic construct
  misc_feature 1..1878: note = derived and/or modified sequence opt3 fromIRAK2__Homo_sapiens__AAI25185
  source 1..1878: mol_type = other RNA
atggcctgctacatctatcagctgcccagctgggtgctcgacgatctttgtagaaacatggacgctctgtccgagtgggattggatggaatttgcatcttacgtcattaccgacttgacacaattaaggaagataaaatcaatggagcgggttcagggcgtgagtatcactcgcgaactgctatggtggtgggggatgcgacaggccacggtacagcaactcgtggatctgctttgccgtctggagttgtatagagcggctcagattatcctcaattggaagcctgccccagaaattaggtgtccgatccccgcatttcctgacagcgtcaaaccagagaagcccctggccgcttccgtgcggaaagcagaggatgaacaggaggaaggacagcctgttcgcatggccaccttcccaggtcccgggtcttcgcctgctagagcccaccaaccagcgtttctgcagccgcccgaggaggacgcacctcattcactcaggagcgatttaccaacaagttccgactctaaggatttcagcacttccatacccaagcaggaaaaactgctttcattggccggcgacagtctgttttggagcgaggctgatgtggtccaggccaccgacgacttcaaccaaaatcggaagatctctcagggaacatttgcagatgtgtaccgcggccaccgacatggtaaacctttcgtatttaagaaactaagagaaaccgcttgctcctcaccagggagcattgagaggttctttcaggccgaactccaaatctgtctgcggtgctgtcaccccaacgttcttccggtgctgggattctgcgcggcccgtcagtttcatagtttcatttatccttacatggcaaatggctctttgcaggaccgcctccagggccaagggggatccgatcccctgccatggcctcagagagtcagcatctgttcgggtttactgtgcgctgtggagtatctccacggccttgagataattcactctaacgtgaagtcctcaaatgtcctgttggaccagaacctaactcccaagctggcccatccaatggctcacctctgtcccgttaataaaaggagtaagtacacaatgatgaaaacccatctgcttcggacgagcgccgcatacctgcctgaagatttcatccgagtggggcagttgactaagcgcgtagacattttctcctgcggaatcgtgctcgccgaggtcctgaccggcatcccagctatggataacaatagatctccggtgtatttaaaagacctgctactcagcgatattccctcaagtacagcgtccctgtgcagcaggaagactggtgttgaaaacgtgatggcaaaagagatatgtcaaaagtaccttgaaaagggggccggacggttgcctgaggactgcgctgaggccctggcaaccgccgcttgtctctgcctgcgcagaaggaatacatctcttcaggaagtctgtggctcagtggccgcagtagaggaacgtctgcggggccgagagaccttgctcccatggagtgggctgagcgaaggaacgggttcctcttcgaacactcccgaggagacagatgacgttgacaatagctccttagatgcgtcaagttctatgagcgtggctccttgggccggcgcagccaccccactgctacccactgaaaacggggagggaagactcagggtcatcgtgggccgcgaagctgactcctcaagcgaggcctgcgtcggtctggagccgcctcaggatgtgacagaaacctcttggcagattgagatcaacgaagcaaaacggaagctcatggagaatatattgctgtataaagaagagaaggttgactccattgagcttttcgggccatga

SEQ ID NO: 8743 - RNA, 1878 nt, synthetic construct
  misc_feature 1..1878: note = derived and/or modified sequence opt4 fromIRAK2__Homo_sapiens__AAI25185
  source 1..1878: mol_type = other RNA
atggcctgctacatctaccagctgcccagctgggtgctggacgacctgtgcagaaacatggacgccctgagcgagtgggactggatggagttcgccagctacgtgatcaccgacctgacccagctgagaaagatcaagagcatggagagagtgcagggcgtgagcatcaccagagagctgctgtggtggtggggcatgagacaggccaccgtgcagcagctggtggacctgctgtgcagactggagctgtacagagccgcccagatcatcctgaactggaagcccgcccccgagatcagatgccccatccccgccttccccgacagcgtgaagcccgagaagcccctggccgccagcgtgagaaaggccgaggacgagcaggaggagggccagcccgtgagaatggccaccttccccggccccggcagcagccccgccagagcccaccagcccgccttcctgcagccccccgaggaggacgccccccacagcctgagaagcgacctgcccaccagcagcgacagcaaggacttcagcaccagcatccccaagcaggagaagctgctgagcctggccggcgacagcctgttctggagcgaggccgacgtggtgcaggccaccgacgacttcaaccagaacagaaagatcagccagggcaccttcgccgacgtgtacagaggccacagacacggcaagcccttcgtgttcaagaagctgagagagaccgcctgcagcagccccggcagcatcgagagattcttccaggccgagctgcagatctgcctgagatgctgccaccccaacgtgctgcccgtgctgggcttctgcgccgccagacagttccacagcttcatctacccctacatggccaacggcagcctgcaggacagactgcagggccagggcggcagcgaccccctgccctggccccagagagtgagcatctgcagcggcctgctgtgcgccgtggagtacctgcacggcctggagatcatccacagcaacgtgaagagcagcaacgtgctgctggaccagaacctgacccccaagctggcccaccccatggcccacctgtgccccgtgaacaagagaagcaagtacaccatgatgaagacccacctgctgagaaccagcgccgcctacctgcccgaggacttcatcagagtgggccagctgaccaagagagtggacatcttcagctgcggcatcgtgctggccgaggtgctgaccggcatccccgccatggacaacaacagaagccccgtgtacctgaaggacctgctgctgagcgacatccccagcagcaccgccagcctgtgcagcagaaagaccggcgtggagaacgtgatggccaaggagatctgccagaagtacctggagaagggcgccggcagactgcccgaggactgcgccgaggccctggccaccgccgcctgcctgtgcctgagaagaagaaacaccagcctgcaggaggtgtgcggcagcgtggccgccgtggaggagagactgagaggcagagagaccctgctgccctggagcggcctgagcgagggcaccggcagcagcagcaacacccccgaggagaccgacgacgtggacaacagcagcctggacgccagcagcagcatgagcgtggccccctgggccggcgccgccacccccctgctgcccaccgagaacggcgagggcagactgagagtgatcgtgggcagagaggccgacagcagcagcgaggcctgcgtgggcctggagcccccccaggacgtgaccgagaccagctggcagatcgagatcaacgaggccaagagaaagctgatggagaacatcctgctgtacaaggaggagaaggtggacagcatcgagctgttcggcccctga

SEQ ID NO: 8744 - RNA, 1878 nt, synthetic construct
  misc_feature 1..1878: note = derived and/or modified sequence opt5 fromIRAK2__Homo_sapiens__AAI25185
  source 1..1878: mol_type = other RNA
atggcctgctacatctatcagctgcccagctgggtgctcgacgatctgtgtagaaacatggacgctctttccgagtgggattggatggagttcgcctcttacgtcattaccgacctgacacaactccggaagatcaaaagcatggaacgcgttcagggcgtgtccattacgagagaactgctttggtggtgggggatgcggcaggcgaccgtgcagcaactggtcgatctcctgtgccgcctggagctctatagagctgcccagatcattctgaattggaagcctgccccggaaatccggtgtcccatccctgcttttcccgactctgtgaaacctgagaagccccttgccgctagcgttcgcaaagccgaggatgaacaggaggaaggacagcctgtgagaatggcgacattcccgggccccgggtcctctcctgcccgggctcaccaacccgcctttctgcagcctcccgaggaggacgctccgcatagcctccgctccgatctgcctaccagctctgactccaaggatttcagcacatctattcccaagcaggaaaaacttctgtccctcgccggagacagcctgttttggtctgaggcggatgtcgtgcaggccaccgacgacttcaaccaaaatagaaagatctcccagggcacatttgctgatgtttaccgggggcaccgccatggaaaacctttcgtgtttaagaaactgagagaaaccgcctgcagctcccccggctctattgagcggttctttcaggctgaactccaaatctgtctgcgctgctgtcaccccaacgtccttcctgtgctgggcttctgcgccgccagacagtttcatagcttcatttatccgtacatggctaatgggtccctccaggaccggctgcagggacaaggcgggagcgatccccttccttggccccagagagtgtctatctgttccggactgctctgcgcggtcgagtatctgcacggcctggagattatccacagcaacgttaagtctagcaatgtgctcctggaccagaaccttacgcctaagctggcccatcccatggctcacctctgtccggtgaataaacgctccaagtacaccatgatgaaaacacatctgcttcggacctctgccgcctacctgcctgaagatttcatcagagtcgggcagctcacaaagcgcgtggacatttttagctgcggaatcgttctggctgaggtgctgaccggcattcccgccatggataacaatcggtcccctgtctatctcaaagacctgcttctgagcgatatcccctcttccacggcgagcctctgctctagaaagacaggcgtggaaaacgttatggctaaagagatttgtcaaaagtacctggaaaagggggccggacgcctgcctgaggactgcgccgaggctcttgccaccgctgcctgtctctgcctgcggagacgcaatacatccctgcaggaagtgtgtggcagcgtcgcggccgtggaggaacggctcagagggcgcgagaccctgcttccctggtccggactgtctgaaggcaccgggagctcctctaacacaccggaggagacggatgacgtcgacaatagctccctcgatgcttctagctccatgagcgtggccccttgggctggagccgcgacacccctgctgcccaccgaaaacggcgagggccggcttagagttatcgtggggcgggaagccgactcttccagcgaggcttgcgtcggactcgagcctccgcaggatgtgaccgaaacatcttggcagatcgagattaacgaagccaaacgcaagctgatggagaatatcctgctctataaagaagagaaggttgacagcattgagctgttcggcccctga

SEQ ID NO: 8745 - protein, 460 aa, synthetic construct
  REGION 1..460: note = IRAK4__Homo_sapiens__Q69FE3
MNKPITPSTYVRCLNVGLIRKLSDFIDPQEGWKKLAVAIKKPSGDDRYNQFHIRRFEALLQTGKSPTSELLFDWGTTNCTVGDLVDLLIQNEFFAPASLLLPDAVPKTANTLPSKEAITVQQKQMPFCDKDRTLMTPVQNLEQSYMPPDSSSPENKSLEVSDTRFHSFSFYELKNVTNNFDERPISVGGNKMGEGGFGVVYKGYVNNTTVAVKKLAAMVDITTEELKQQFDQEIKVMAKCQHENLVELLGFSSDGDDLCLVYVYMPNGSLLDRLSCLDGTPPLSWHMRCKIAQGAANGINFLHENHHIHRDIKSANILLDEAFTAKISDFGLARASEKFAQTVMTSRIVGTTAYMAPEALRGEITPKSDIYSFGVVLLEIITGLPAVDEHREPQLLLDIKEEIEDEEKTIEDYIDKKMNDADSTSVEAMYSVASQCLHEKKNKRPDIKKVQQLLQEMTAS

SEQ ID NO: 8746 - RNA, 1383 nt, synthetic construct
  misc_feature 1..1383: note = IRAK4__Homo_sapiens__AAR02358
  source 1..1383: mol_type = other RNA
atgaacaaacccataacaccatcaacatatgtgcgctgcctcaatgttggactaattaggaagctgtcagattttattgatcctcaagaaggatggaagaagttagctgtagctattaaaaaaccatctggtgatgatagatacaatcagtttcacataaggagatttgaagcattacttcaaactggaaaaagtcccacttctgaattactgtttgactggggcaccacaaattgcacagttggtgatcttgtggatcttttgatccaaaatgaattttttgctcctgcgagtcttttgctcccagatgctgttcccaaaactgctaatacactaccttctaaagaagctataacagttcagcaaaaacagatgcctttctgtgacaaagacaggacattgatgacacctgtgcagaatcttgaacaaagctatatgccacctgactcctcaagtccagaaaataaaagtttagaagttagtgatacacgttttcacagtttttcattttatgaattgaagaatgtcacaaataactttgatgaacgacccatttctgttggtggtaataaaatgggagagggaggatttggagttgtatataaaggctacgtaaataacacaactgtggcagtgaagaagcttgcagcaatggttgacattactactgaagaactgaaacagcagtttgatcaagaaataaaagtaatggcaaagtgtcaacatgaaaacttagtagaactacttggtttctcaagtgatggagatgacctctgcttagtatatgtttacatgcctaatggttcattgctagacagactctcttgcttggatggtactccaccactttcttggcacatgagatgcaagattgctcagggtgcagctaatggcatcaattttctacatgaaaatcatcatattcatagagatattaaaagtgcaaatatcttactggatgaagcttttactgctaaaatatctgactttggccttgcacgggcttctgagaagtttgcccagacagtcatgactagcagaattgtgggaacaacagcttatatggcaccagaagctttgcgtggagaaataacacccaaatctgatatttacagctttggtgtggttttactagaaataataactggacttccagctgtggatgaacaccgtgaacctcagttattgctagatattaaagaagaaattgaagatgaagaaaagacaattgaagattatattgataaaaagatgaatgatgctgattccacttcagttgaagctatgtactctgttgctagtcaatgtctgcatgaaaagaaaaataagagaccagacattaagaaggttcaacagctgctgcaagagatgacagcttcttaa

SEQ ID NO: 8747 - RNA, 1383 nt, synthetic construct
  misc_feature 1..1383: note = derived and/or modified sequence opt1 fromIRAK4__Homo_sapiens__AAR02358
  source 1..1383: mol_type = other RNA
atgaacaagcccatcaccccgagcacctacgtgcgctgcctgaacgtcggcctcatccggaagctgtccgacttcatcgacccccaggaggggtggaagaagctggccgtggccatcaagaagcccagcggcgacgaccgctacaaccagttccacatccggcgcttcgaggcgctcctgcagacggggaagtcccccaccagcgagctcctgttcgactggggcaccaccaactgcacggtgggggacctggtcgacctgctcatccagaacgagttcttcgccccggcctccctgctgctccccgacgccgtgcccaagaccgccaacaccctgcccagcaaggaggcgatcaccgtgcagcagaagcagatgccgttctgcgacaaggaccggacgctgatgacccccgtccagaacctcgagcagtcctacatgccgcccgacagctccagccccgagaacaagtccctggaggtgagcgacacccgcttccactccttcagcttctacgagctgaagaacgtgaccaacaacttcgacgagcggcccatctccgtcggcggcaacaagatgggggagggcgggttcggcgtggtgtacaaggggtacgtcaacaacacgaccgtggccgtgaagaagctcgccgccatggtcgacatcaccaccgaggagctgaagcagcagttcgaccaggagatcaaggtgatggcgaagtgccagcacgagaacctggtggagctcctgggcttcagctccgacggcgacgacctgtgcctcgtctacgtgtacatgcccaacgggagcctgctggaccgcctctcctgcctggacggcacgcccccgctgagctggcacatgcggtgcaagatcgcccagggggccgccaacggcatcaacttcctccacgagaaccaccacatccaccgcgacatcaagagcgccaacatcctgctggacgaggcgttcaccgccaagatctccgacttcggcctcgcccgggccagcgagaagttcgcccagaccgtgatgacctcccgcatcgtcgggacgaccgcgtacatggcccccgaggccctgcggggcgagatcacccccaagagcgacatctactccttcggggtggtgctgctcgagatcatcaccggcctgcccgccgtcgacgagcaccgcgagccgcagctgctcctggacatcaaggaggagatcgaggacgaggagaagacgatcgaggactacatcgacaagaagatgaacgacgccgacagcacctccgtggaggcgatgtacagcgtcgcctcccagtgcctgcacgagaagaagaacaagcggcccgacatcaagaaggtgcagcagctcctgcaggagatgaccgccagctga

SEQ ID NO: 8748 - RNA, 1383 nt, synthetic construct
  misc_feature 1..1383: note = derived and/or modified sequence opt2 fromIRAK4__Homo_sapiens__AAR02358
  source 1..1383: mol_type = other RNA
atgaacaagcccatcaccccctccacctacgtccgctgcctcaacgtcggcctcatccgcaagctctccgacttcatcgacccccaggagggctggaagaagctcgccgtcgccatcaagaagccctccggcgacgaccgctacaaccagttccacatccgccgcttcgaggccctcctccagaccggcaagtcccccacctccgagctcctcttcgactggggcaccaccaactgcaccgtcggcgacctcgtcgacctcctcatccagaacgagttcttcgcccccgcctccctcctcctccccgacgccgtccccaagaccgccaacaccctcccctccaaggaggccatcaccgtccagcagaagcagatgcccttctgcgacaaggaccgcaccctcatgacccccgtccagaacctcgagcagtcctacatgccccccgactcctcctcccccgagaacaagtccctcgaggtctccgacacccgcttccactccttctccttctacgagctcaagaacgtcaccaacaacttcgacgagcgccccatctccgtcggcggcaacaagatgggcgagggcggcttcggcgtcgtctacaagggctacgtcaacaacaccaccgtcgccgtcaagaagctcgccgccatggtcgacatcaccaccgaggagctcaagcagcagttcgaccaggagatcaaggtcatggccaagtgccagcacgagaacctcgtcgagctcctcggcttctcctccgacggcgacgacctctgcctcgtctacgtctacatgcccaacggctccctcctcgaccgcctctcctgcctcgacggcaccccccccctctcctggcacatgcgctgcaagatcgcccagggcgccgccaacggcatcaacttcctccacgagaaccaccacatccaccgcgacatcaagtccgccaacatcctcctcgacgaggccttcaccgccaagatctccgacttcggcctcgcccgcgcctccgagaagttcgcccagaccgtcatgacctcccgcatcgtcggcaccaccgcctacatggcccccgaggccctccgcggcgagatcacccccaagtccgacatctactccttcggcgtcgtcctcctcgagatcatcaccggcctccccgccgtcgacgagcaccgcgagccccagctcctcctcgacatcaaggaggagatcgaggacgaggagaagaccatcgaggactacatcgacaagaagatgaacgacgccgactccacctccgtcgaggccatgtactccgtcgcctcccagtgcctccacgagaagaagaacaagcgccccgacatcaagaaggtccagcagctcctccaggagatgaccgcctcctga

SEQ ID NO: 8749 - RNA, 1383 nt, synthetic construct
  misc_feature 1..1383: note = derived and/or modified sequence opt3 fromIRAK4__Homo_sapiens__AAR02358
  source 1..1383: mol_type = other RNA
atgaacaagcccatcacccctagcacatacgtgagatgcctgaatgtcggcctcattaggaaactttccgacttcatagatccacaggaggggtggaagaaactggccgttgctatcaagaaaccgtctggagacgatcggtataaccaatttcacattcgccgattcgaagcattgttacagactggtaagtcacccacgagtgagctgctatttgactggggcaccacaaattgtactgtgggggatctcgtagacctgcttatccagaacgagttctttgcccctgcgagcctgttgctcccagatgctgtgcccaagaccgccaatacactgccttccaaagaagcaattaccgtccagcaaaagcagatgccattctgcgacaaagatcgtactctgatgacacccgtgcagaacctcgaacagtcttacatgcctccagactcgtcaagcccggagaataagagtttagaggtttccgataccagatttcattctttcagcttttatgaactgaaaaacgtgacgaataacttcgacgagaggcccatctccgtcggaggcaataagatgggtgaagggggatttggcgtggtatacaagggctatgttaacaatactaccgtggccgtcaaaaagttggctgcaatggtggatataacaactgaggagcttaaacaacagttcgaccaggaaatcaaggtgatggccaaatgtcagcacgagaacctggtcgaactactcgggttttcaagtgacggagatgacctgtgccttgtttacgtgtatatgcctaatggtagcctgttggatcggctctcttgtctggacggcaccccacccttatcctggcatatgcgctgcaagattgctcaaggggccgcgaacggaatcaacttcctgcacgagaatcatcacattcacagagatatcaaatcagcaaacatactccttgacgaagccttcacagctaagattagcgattttggcctggccagggcaagtgagaagttcgctcagaccgtaatgacgtctcggatcgtgggtactacagcctacatggcgcctgaggccttgcgcggggaaattaccccaaaatccgacatctacagctttggagtcgtgctactggagatcattactggcctccccgcagttgatgaacatcgagagccgcagctgcttctggacataaaggaagagatcgaggatgaagagaaaacaattgaagactatatcgacaagaaaatgaatgatgctgactcgacctctgtggaggccatgtactccgtcgcttcacaatgtttgcacgaaaagaagaacaaaagacctgatataaagaaagtgcagcagctcctgcaggagatgacggccagttga

SEQ ID NO: 8750 - RNA, 1383 nt, synthetic construct
  misc_feature 1..1383: note = derived and/or modified sequence opt4 fromIRAK4__Homo_sapiens__AAR02358
  source 1..1383: mol_type = other RNA
atgaacaagcccatcacccccagcacctacgtgagatgcctgaacgtgggcctgatcagaaagctgagcgacttcatcgacccccaggagggctggaagaagctggccgtggccatcaagaagcccagcggcgacgacagatacaaccagttccacatcagaagattcgaggccctgctgcagaccggcaagagccccaccagcgagctgctgttcgactggggcaccaccaactgcaccgtgggcgacctggtggacctgctgatccagaacgagttcttcgcccccgccagcctgctgctgcccgacgccgtgcccaagaccgccaacaccctgcccagcaaggaggccatcaccgtgcagcagaagcagatgcccttctgcgacaaggacagaaccctgatgacccccgtgcagaacctggagcagagctacatgccccccgacagcagcagccccgagaacaagagcctggaggtgagcgacaccagattccacagcttcagcttctacgagctgaagaacgtgaccaacaacttcgacgagagacccatcagcgtgggcggcaacaagatgggcgagggcggcttcggcgtggtgtacaagggctacgtgaacaacaccaccgtggccgtgaagaagctggccgccatggtggacatcaccaccgaggagctgaagcagcagttcgaccaggagatcaaggtgatggccaagtgccagcacgagaacctggtggagctgctgggcttcagcagcgacggcgacgacctgtgcctggtgtacgtgtacatgcccaacggcagcctgctggacagactgagctgcctggacggcaccccccccctgagctggcacatgagatgcaagatcgcccagggcgccgccaacggcatcaacttcctgcacgagaaccaccacatccacagagacatcaagagcgccaacatcctgctggacgaggccttcaccgccaagatcagcgacttcggcctggccagagccagcgagaagttcgcccagaccgtgatgaccagcagaatcgtgggcaccaccgcctacatggcccccgaggccctgagaggcgagatcacccccaagagcgacatctacagcttcggcgtggtgctgctggagatcatcaccggcctgcccgccgtggacgagcacagagagccccagctgctgctggacatcaaggaggagatcgaggacgaggagaagaccatcgaggactacatcgacaagaagatgaacgacgccgacagcaccagcgtggaggccatgtacagcgtggccagccagtgcctgcacgagaagaagaacaagagacccgacatcaagaaggtgcagcagctgctgcaggagatgaccgccagctga

SEQ ID NO: 8751 - RNA, 1383 nt, synthetic construct
  misc_feature 1..1383: note = derived and/or modified sequence opt5 fromIRAK4__Homo_sapiens__AAR02358
  source 1..1383: mol_type = other RNA
atgaacaagcccatcacccctagcacatacgtgagatgcctgaatgtcggcctcattcggaaactgtccgacttcatcgatccgcaggaggggtggaagaaacttgccgttgctattaagaaaccctctggagacgatcgctataaccaatttcacatcagacggttcgaagccctgctccagacgggcaagagccctacctccgagctgctttttgactgggggacaaccaattgtacagtgggagatctggtggacctcctgattcagaacgagttctttgcgcccgcttctctgctcctgcctgatgccgtccccaagaccgccaatacacttcctagcaaagaagctatcaccgtgcagcaaaagcagatgccgttctgcgacaaagatcgcacgctgatgacccccgttcagaacctcgaacagtcctacatgcctcccgactctagctcccctgagaataagagcctggaggtgtctgatacaagatttcattccttcagcttttatgaacttaaaaacgtcaccaataacttcgacgagcggcccatctctgtgggcgggaataagatgggagaaggcggctttggggttgtgtacaagggatatgtcaacaatacaaccgtggccgtgaaaaagctggctgccatggtcgatattacgacagaggagctcaaacaacagttcgaccaggaaatcaaggttatggcgaaatgtcagcacgagaacctggtggaactgctcggcttttccagcgacggggatgacctgtgccttgtgtacgtctatatgccgaatggatctctgctcgatcgcctgtcctgtcttgacggcacccctcccctgagctggcatatgagatgcaagattgcccaaggggctgccaacggaatcaacttcctccacgagaatcatcacattcaccgggatatcaaatccgctaacattctgctggacgaagccttcacagcgaagatctctgattttggcctcgcccgcgctagcgagaagttcgcccagaccgtgatgacctccagaatcgttggcacaacggcttacatggcccctgaggccctgcgcggggaaattacccccaaaagcgacatctactcttttggagtggtccttctggagattatcacaggcctccccgctgtggatgaacatcgggagcctcagctgcttctggacattaaggaagagatcgaggatgaagagaaaaccatcgaagactatattgacaagaaaatgaatgatgcggactccacaagcgttgaggccatgtactctgtggctagccaatgtctccacgaaaagaagaacaaaagaccggatatcaagaaagtccagcagctgctgcaggagatgaccgcctcctga

SEQ ID NO: 8752 - protein, 218 aa, synthetic construct [sequence omitted]

SEQ ID NO: 8753 - RNA, 657 nt, synthetic construct
  misc_feature 1..657: note = IRAK4__Homo_sapiens__AAP57090
  source 1..657: mol_type = other RNA
atgaacaaacccataacaccatcaacatatgtgcgctgcctcaatgttggactaattaggaagctgtcagattttattgatcctcaagaaggatggaagaagttagctgtagctattaaaaaaccatctggtgatgatagatacaatcagtttcacataaggagatttgaagcattacttcaaactggaaaaagtcccacttctgaattactgtttgactggggcaccacaaattgcacagctggtgatcttgtggatcttttgatccaaaatgaattttttgctcctgcgagtcttttgctcccagatgctgttcccaaaactgctaatacactaccttctaaagaagctataacagttcagcaaaaacagatgcctttctgtgacaaagacaggacattgatgacacctgtgcagaatcttgaacaaagctatatgccacctgactcctcaagtccagaaaataaaagtttagaagttagtgatacacgttttcacagtttttcattttatgaattgaagaatgtcacaaataactttgatgaacgacccatttctgttggtggtaataaaatgggagagggaggatttggagttgtatataaaggctacgtaaataacaactgtggcagtgaagaagcttgcagcaatggttga

SEQ ID NO: 8754 - RNA, 657 nt, synthetic construct
  misc_feature 1..657: note = derived and/or modified sequence opt1 fromIRAK4__Homo_sapiens__AAP57090
  source 1..657: mol_type = other RNA
atgaacaagcccatcaccccgagcacctacgtgcgctgcctgaacgtcggcctcatccggaagctgtccgacttcatcgacccccaggaggggtggaagaagctggccgtggccatcaagaagcccagcggcgacgaccgctacaaccagttccacatccggcgcttcgaggcgctcctgcagacggggaagtcccccaccagcgagctcctgttcgactggggcaccaccaactgcacggccggggacctggtggacctgctcatccagaacgagttcttcgccccggcctccctgctgctccccgacgccgtccccaagaccgcgaacaccctgcccagcaaggaggccatcaccgtgcagcagaagcagatgccgttctgcgacaaggaccggacgctgatgacccccgtgcagaacctcgagcagtcctacatgccgcccgacagctccagccccgagaacaagtccctggaggtcagcgacacccgcttccactccttcagcttctacgagctgaagaacgtgaccaacaacttcgacgagcggcccatctccgtgggcggcaacaagatgggggagggcgggttcggcgtcgtgtacaaggggtacgtgaacaacaactgcggcagcgaggaggcctgctccaacggctga

SEQ ID NO: 8755 - RNA, 657 nt, synthetic construct
  misc_feature 1..657: note = derived and/or modified sequence opt2 fromIRAK4__Homo_sapiens__AAP57090
  source 1..657: mol_type = other RNA
atgaacaagcccatcaccccctccacctacgtccgctgcctcaacgtcggcctcatccgcaagctctccgacttcatcgacccccaggagggctggaagaagctcgccgtcgccatcaagaagccctccggcgacgaccgctacaaccagttccacatccgccgcttcgaggccctcctccagaccggcaagtcccccacctccgagctcctcttcgactggggcaccaccaactgcaccgccggcgacctcgtcgacctcctcatccagaacgagttcttcgcccccgcctccctcctcctccccgacgccgtccccaagaccgccaacaccctcccctccaaggaggccatcaccgtccagcagaagcagatgcccttctgcgacaaggaccgcaccctcatgacccccgtccagaacctcgagcagtcctacatgccccccgactcctcctcccccgagaacaagtccctcgaggtctccgacacccgcttccactccttctccttctacgagctcaagaacgtcaccaacaacttcgacgagcgccccatctccgtcggcggcaacaagatgggcgagggcggcttcggcgtcgtctacaagggctacgtcaacaacaactgcggctccgaggaggcctgctccaacggctga

SEQ ID NO: 8756 - RNA, 657 nt, synthetic construct
  misc_feature 1..657: note = derived and/or modified sequence opt3 fromIRAK4__Homo_sapiens__AAP57090
  source 1..657: mol_type = other RNA
atgaacaagcccatcacccctagcacatacgtgagatgcctgaatgtcggcctcattaggaaactttccgacttcatagatccacaggaggggtggaagaaactggccgttgctatcaagaaaccgtctggagacgatcggtataaccaatttcacattcgccgattcgaagcattgttacagactggtaagtcacccacgagtgagctgctatttgactggggcaccacaaattgtactgccggggatctcgtggacctgcttatccagaacgagttctttgcgcctgctagcctgttgctcccagatgccgtacccaagaccgcaaatacactgccttccaaagaagccattaccgtgcagcaaaagcagatgccattctgcgacaaagatcgtactctgatgacacccgtccagaacctcgaacagtcttacatgcctccagactcgtcaagcccggagaataagagtttagaggtgtccgataccagatttcattctttcagcttttatgaactgaaaaacgttacgaataacttcgacgagaggcccatctccgtgggaggcaataagatgggtgaagggggatttggcgtcgtgtacaagggctatgtaaacaataactgtgggtcagaggaggcttgcagtaatggatga

SEQ ID NO: 8757 - RNA, 657 nt, synthetic construct
  misc_feature 1..657: note = derived and/or modified sequence opt4 fromIRAK4__Homo_sapiens__AAP57090
  source 1..657: mol_type = other RNA
atgaacaagcccatcacccccagcacctacgtgagatgcctgaacgtgggcctgatcagaaagctgagcgacttcatcgacccccaggagggctggaagaagctggccgtggccatcaagaagcccagcggcgacgacagatacaaccagttccacatcagaagattcgaggccctgctgcagaccggcaagagccccaccagcgagctgctgttcgactggggcaccaccaactgcaccgccggcgacctggtggacctgctgatccagaacgagttcttcgcccccgccagcctgctgctgcccgacgccgtgcccaagaccgccaacaccctgcccagcaaggaggccatcaccgtgcagcagaagcagatgcccttctgcgacaaggacagaaccctgatgacccccgtgcagaacctggagcagagctacatgccccccgacagcagcagccccgagaacaagagcctggaggtgagcgacaccagattccacagcttcagcttctacgagctgaagaacgtgaccaacaacttcgacgagagacccatcagcgtgggcggcaacaagatgggcgagggcggcttcggcgtggtgtacaagggctacgtgaacaacaactgcggcagcgaggaggcctgcagcaacggctga

SEQ ID NO: 8758 - RNA, 657 nt, synthetic construct
  misc_feature 1..657: note = derived and/or modified sequence opt5 fromIRAK4__Homo_sapiens__AAP57090
  source 1..657: mol_type = other RNA
atgaacaagcccatcacccctagcacatacgtgagatgcctgaatgtcggcctcattcggaaactgtccgacttcatcgatccgcaggaggggtggaagaaacttgccgttgctattaagaaaccctctggagacgatcgctataaccaatttcacatcagacggttcgaagccctgctccagacgggcaagagccctacctccgagctgctttttgactgggggacaaccaattgtacagcgggagatctggtggacctcctgattcagaacgagttctttgctcccgcctctctgctcctgcctgatgccgtgcccaagaccgctaatacacttcctagcaaagaagccatcaccgtccagcaaaagcagatgccgttctgcgacaaagatcgcacgctgatgacccccgtgcagaacctcgaacagtcctacatgcctcccgactctagctcccctgagaataagagcctggaggtttctgatacaagatttcattccttcagcttttatgaacttaaaaacgtgaccaataacttcgacgagcggcccatctctgtcggcgggaataagatgggagaaggcggctttggggtggtttacaagggatatgtgaacaataactgtggctccgaggaggcttgcagcaatgggtga

SEQ ID NO: 8759 - protein, 292 aa, synthetic construct [sequence omitted]

SEQ ID NO: 8760 - RNA, 879 nt, synthetic construct
  misc_feature 1..879: note = IRAK4__Homo_sapiens__AAP57089
  source 1..879: mol_type = other RNA
atgaacaaacccataacaccatcaacatatgtgcgctgcctcaatgttggactaattaggaagctgtcagattttattgatcctcaagaaggatggaagaagttagctgtagctattaaaaaaccatctggtgatgatagatacaatcagtttcacataaggagatttgaagcattacttcaaactggaaaaagtcccacttctgaattactgtttgactggggcaccacaaattgcacagctggtgatcttgtggatcttttgatccaaaatgaattttttgctcctgcgagtcttttgctcccagatgctgttcccaaaactgctaatacactaccttctaaagaagctataacagttcagcaaaaacagatgcctttctgtgacaaagacaggacattgatgacacctgtgcagaatcttgaacaaagctatatgccacctgactcctcaagtccagaaaataaaagtttagaagttagtgatacacgttttcacagtttttcattttatgaattgaagaatgtcacaaataactttgatgaacgacccatttctgttggtggtaataaaatgggagagggaggatttggagttgtatataaaggctacgtaaataacacaactgtggcagtgaagaagcttgcagcaatggttgacattactactgaagaactgaaacagcagtttgatcaagaaataaaagtaatggcaaagtgtcaacatgaaaacttagtagaactacttggtttctcaagtgatggagatgacctctgcttagtatatgtttacatgcctaatggttcattgctagacagactctcttgcttggatggtactccaccactttcttggcacatgagatgcaagattgcttag

SEQ ID NO: 8761 - RNA, 879 nt, synthetic construct
  misc_feature 1..879: note = derived and/or modified sequence opt1 fromIRAK4__Homo_sapiens__AAP57089
  source 1..879: mol_type = other RNA
atgaacaagcccatcaccccgagcacctacgtgcgctgcctgaacgtcggcctcatccggaagctgtccgacttcatcgacccccaggaggggtggaagaagctggccgtggccatcaagaagcccagcggcgacgaccgctacaaccagttccacatccggcgcttcgaggcgctcctgcagacggggaagtcccccaccagcgagctcctgttcgactggggcaccaccaactgcacggccggggacctggtggacctgctcatccagaacgagttcttcgccccggcctccctgctgctccccgacgccgtccccaagaccgcgaacaccctgcccagcaaggaggccatcaccgtgcagcagaagcagatgccgttctgcgacaaggaccggacgctgatgacccccgtgcagaacctcgagcagtcctacatgccgcccgacagctccagccccgagaacaagtccctggaggtcagcgacacccgcttccactccttcagcttctacgagctgaagaacgtgaccaacaacttcgacgagcggcccatctccgtgggcggcaacaagatgggggagggcgggttcggcgtcgtgtacaaggggtacgtgaacaacacgaccgtcgccgtgaagaagctcgccgcgatggtggacatcaccaccgaggagctgaagcagcagttcgaccaggagatcaaggtcatggccaagtgccagcacgagaacctggtggagctcctgggcttcagctccgacggcgacgacctgtgcctcgtgtacgtctacatgcccaacgggagcctgctggaccgcctctcctgcctggacggcacgcccccgctgagctggcacatgcggtgcaagatcgcctga

SEQ ID NO: 8762 - RNA, 879 nt, synthetic construct
  misc_feature 1..879: note = derived and/or modified sequence opt2 fromIRAK4__Homo_sapiens__AAP57089
  source 1..879: mol_type = other RNA
atgaacaagcccatcaccccctccacctacgtccgctgcctcaacgtcggcctcatccgcaagctctccgacttcatcgacccccaggagggctggaagaagctcgccgtcgccatcaagaagccctccggcgacgaccgctacaaccagttccacatccgccgcttcgaggccctcctccagaccggcaagtcccccacctccgagctcctcttcgactggggcaccaccaactgcaccgccggcgacctcgtcgacctcctcatccagaacgagttcttcgcccccgcctccctcctcctccccgacgccgtccccaagaccgccaacaccctcccctccaaggaggccatcaccgtccagcagaagcagatgcccttctgcgacaaggaccgcaccctcatgacccccgtccagaacctcgagcagtcctacatgccccccgactcctcctcccccgagaacaagtccctcgaggtctccgacacccgcttccactccttctccttctacgagctcaagaacgtcaccaacaacttcgacgagcgccccatctccgtcggcggcaacaagatgggcgagggcggcttcggcgtcgtctacaagggctacgtcaacaacaccaccgtcgccgtcaagaagctcgccgccatggtcgacatcaccaccgaggagctcaagcagcagttcgaccaggagatcaaggtcatggccaagtgccagcacgagaacctcgtcgagctcctcggcttctcctccgacggcgacgacctctgcctcgtctacgtctacatgcccaacggctccctcctcgaccgcctctcctgcctcgacggcaccccccccctctcctggcacatgcgctgcaagatcgcctga

SEQ ID NO: 8763 - RNA, 879 nt, synthetic construct
  misc_feature 1..879: note = derived and/or modified sequence opt3 fromIRAK4__Homo_sapiens__AAP57089
  source 1..879: mol_type = other RNA
atgaacaagcccatcacccctagcacatacgtgagatgcctgaatgtcggcctcattaggaaactttccgacttcatagatccacaggaggggtggaagaaactggccgttgctatcaagaaaccgtctggagacgatcggtataaccaatttcacattcgccgattcgaagcattgttacagactggtaagtcacccacgagtgagctgctatttgactggggcaccacaaattgtactgccggggatctcgtggacctgcttatccagaacgagttctttgcgcctgctagcctgttgctcccagatgccgtacccaagaccgcaaatacactgccttccaaagaagccattaccgtgcagcaaaagcagatgccattctgcgacaaagatcgtactctgatgacacccgtccagaacctcgaacagtcttacatgcctccagactcgtcaagcccggagaataagagtttagaggtgtccgataccagatttcattctttcagcttttatgaactgaaaaacgttacgaataacttcgacgagaggcccatctccgtgggaggcaataagatgggtgaagggggatttggcgtcgtgtacaagggctatgtaaacaatactaccgttgctgtgaaaaagttggcagccatggtcgatataacaactgaggagcttaaacaacagttcgaccaggaaatcaaggtgatggctaaatgtcagcacgagaacctggtggaactactcgggttttcaagtgacggagatgacctgtgccttgtctacgtttatatgcctaatggtagcctgttggatcggctctcttgtctggacggcaccccacccttatcctggcatatgcgctgcaagattgcctga

SEQ ID NO: 8764 - RNA, 879 nt, synthetic construct
  misc_feature 1..879: note = derived and/or modified sequence opt4 fromIRAK4__Homo_sapiens__AAP57089
  source 1..879: mol_type = other RNA
atgaacaagcccatcacccccagcacctacgtgagatgcctgaacgtgggcctgatcagaaagctgagcgacttcatcgacccccaggagggctggaagaagctggccgtggccatcaagaagcccagcggcgacgacagatacaaccagttccacatcagaagattcgaggccctgctgcagaccggcaagagccccaccagcgagctgctgttcgactggggcaccaccaactgcaccgccggcgacctggtggacctgctgatccagaacgagttcttcgcccccgccagcctgctgctgcccgacgccgtgcccaagaccgccaacaccctgcccagcaaggaggccatcaccgtgcagcagaagcagatgcccttctgcgacaaggacagaaccctgatgacccccgtgcagaacctggagcagagctacatgccccccgacagcagcagccccgagaacaagagcctggaggtgagcgacaccagattccacagcttcagcttctacgagctgaagaacgtgaccaacaacttcgacgagagacccatcagcgtgggcggcaacaagatgggcgagggcggcttcggcgtggtgtacaagggctacgtgaacaacaccaccgtggccgtgaagaagctggccgccatggtggacatcaccaccgaggagctgaagcagcagttcgaccaggagatcaaggtgatggccaagtgccagcacgagaacctggtggagctgctgggcttcagcagcgacggcgacgacctgtgcctggtgtacgtgtacatgcccaacggcagcctgctggacagactgagctgcctggacggcaccccccccctgagctggcacatgagatgcaagatcgcctga

SEQ ID NO: 8765 - RNA, 879 nt, synthetic construct
  misc_feature 1..879: note = derived and/or modified sequence opt5 fromIRAK4__Homo_sapiens__AAP57089
  source 1..879: mol_type = other RNA
atgaacaagcccatcacccctagcacatacgtgagatgcctgaatgtcggcctcattcggaaactgtccgacttcatcgatccgcaggaggggtggaagaaacttgccgttgctattaagaaaccctctggagacgatcgctataaccaatttcacatcagacggttcgaagccctgctccagacgggcaagagccctacctccgagctgctttttgactgggggacaaccaattgtacagcgggagatctggtggacctcctgattcagaacgagttctttgctcccgcctctctgctcctgcctgatgccgtgcccaagaccgctaatacacttcctagcaaagaagccatcaccgtccagcaaaagcagatgccgttctgcgacaaagatcgcacgctgatgacccccgtgcagaacctcgaacagtcctacatgcctcccgactctagctcccctgagaataagagcctggaggtttctgatacaagatttcattccttcagcttttatgaacttaaaaacgtgaccaataacttcgacgagcggcccatctctgtcggcgggaataagatgggagaaggcggctttggggtggtttacaagggatatgtgaacaatacaaccgtcgctgtgaaaaagctggccgcgatggtggatattacgacagaggagctcaaacaacagttcgaccaggaaatcaaggtcatggccaaatgtcagcacgagaacctggttgaactgctcggcttttccagcgacggggatgacctgtgccttgtgtacgtgtatatgccgaatggatctctgctcgatcgcctgtcctgtcttgacggcacccctcccctgagctggcatatgagatgcaagattgcttga

SEQ ID NO: 8766 - protein, 460 aa, synthetic construct; identical to SEQ ID NO: 8745
  REGION 1..460: note = IRAK4__Homo_sapiens__Q9NWZ3

SEQ ID NO: 8767 - RNA, 1383 nt, synthetic construct
  misc_feature 1..1383: note = IRAK4__Homo_sapiens__AAH13316
  source 1..1383: mol_type = other RNA
atgaacaaacccataacaccatcaacatatgtgcgctgcctcaatgttggactaattaggaagctgtcagattttattgatcctcaagaaggatggaagaagttagctgtagctattaaaaaaccatctggtgatgatagatacaatcagtttcacataaggagatttgaagcattacttcaaactggaaaaagtcccacttctgaattactgtttgactggggcaccacaaattgcacagttggtgatcttgtggatcttttgatccaaaatgaattttttgctcctgcaagtcttttgctcccagatgctgttcccaaaactgctaatacactaccttctaaagaagctataacagttcagcaaaaacagatgcctttctgtgacaaagacaggacattgatgacacctgtgcagaatcttgaacaaagctatatgccacctgactcctcaagtccagaaaataaaagtttagaagttagtgatacacgttttcacagtttttcattttatgaattgaagaatgtcacaaataactttgatgaacgacccatttctgttggtggtaataaaatgggagagggaggatttggagttgtatataaaggctacgtaaataacacaactgtggcagtgaagaagcttgcagcaatggttgacattactactgaagaactgaaacagcagtttgatcaagaaataaaagtaatggcaaagtgtcaacatgaaaacttagtagaactacttggtttctcaagtgatggagatgacctctgcttagtatatgtttacatgcctaatggttcattgctagacagactctcttgcttggatggtactccaccactttcttggcacatgagatgcaagattgctcagggtgcagctaatggcatcaattttctacatgaaaatcatcatattcatagagatattaaaagtgcaaatatcttactggatgaagcttttactgctaaaatatctgactttggccttgcacgggcttctgagaagtttgcccagacagtcatgactagcagaattgtgggaacaacagcttatatggcaccagaagctttgcgtggagaaataacacccaaatctgatatttacagctttggtgtggttttactagaaataataactggacttccagctgtggatgaacaccgtgaacctcagttattgctagatattaaagaagaaattgaagatgaagaaaagacaattgaagattatattgataaaaagatgaatgatgctgattccacttcagttgaagctatgtactctgttgctagtcaatgtctgcatgaaaagaaaaataagagaccagacattaagaaggttcaacagctgctgcaagagatgacagcttcttaa

SEQ ID NO: 8768 - RNA, 1383 nt, synthetic construct; identical to SEQ ID NO: 8747
  misc_feature 1..1383: note = derived and/or modified sequence opt1 fromIRAK4__Homo_sapiens__AAH13316
  source 1..1383: mol_type = other RNA

SEQ ID NO: 8769 - RNA, 1383 nt, synthetic construct; identical to SEQ ID NO: 8748
  misc_feature 1..1383: note = derived and/or modified sequence opt2 fromIRAK4__Homo_sapiens__AAH13316
  source 1..1383: mol_type = other RNA

SEQ ID NO: 8770 - RNA, 1383 nt, synthetic construct; identical to SEQ ID NO: 8749
  misc_feature 1..1383: note = derived and/or modified sequence opt3 fromIRAK4__Homo_sapiens__AAH13316
  source 1..1383: mol_type = other RNA

SEQ ID NO: 8771 - RNA, 1383 nt, synthetic construct; identical to SEQ ID NO: 8750
  misc_feature 1..1383: note = derived and/or modified sequence opt4 fromIRAK4__Homo_sapiens__AAH13316
  source 1..1383: mol_type = other RNA

SEQ ID NO: 8772 - RNA, 1383 nt, synthetic construct; identical to SEQ ID NO: 8751
  misc_feature 1..1383: note = derived and/or modified sequence opt5 fromIRAK4__Homo_sapiens__AAH13316
  source 1..1383: mol_type = other RNA

SEQ ID NO: 8773 - protein, 427 aa, synthetic construct
  REGION 1..427: note = IRF3__Homo_sapiens__A0A024QZE1
MGTPKPRILPWLVSQLDLGQLEGVAWVNKSRTRFRIPWKHGLRQDAQQEDFGIFQAWAEATGAYVPGRDKPDLPTWKRNFRSALNRKEGLRLAEDRSKDPHDPHKIYEFVNSGVGDFSQPDTSPDTNGGGSTSDTQEDILDELLGNMVLAPLPDPGPPSLAVAPEPCPQPLRSPSLDNPTPFPNLGPSENPLKRLLVPGEEWEFEVTAFYRGRQVFQQTISCPEGLRLVGSEVGDRTLPGWPVTLPDPGMSLTDRGVMSYVRHVLSCLGGGLALWRAGQWLWAQRLGHCHTYWAVSEELLPNSGHGPDGEVPKDKEGGVFDLGPFIVDLITFTEGSGRSPRYALWFCVGESWPQDQPWTKRLVMVKVVPTCLRALVEMARVGGASSLENTVDLHISNSHPLSLTSDQYKAYLQDLVEGMDFQGPGET

SEQ ID NO: 8774 - RNA, 1284 nt, synthetic construct
  misc_feature 1..1284: note = IRF3__Homo_sapiens__EAW52513
  source 1..1284: mol_type = other RNA
atgggaaccccaaagccacggatcctgccctggctggtgtcgcagctggacctggggcaactggagggcgtggcctgggtgaacaagagccgcacgcgcttccgcatcccttggaagcacggcctacggcaggatgcacagcaggaggatttcggaatcttccaggcctgggccgaggccactggtgcatatgttcccgggagggataagccagacctgccaacctggaagaggaatttccgctctgccctcaaccgcaaagaagggttgcgtttagcagaggaccggagcaaggaccctcacgacccacataaaatctacgagtttgtgaactcaggagttggggacttttcccagccagacacctctccggacaccaatggtggaggcagtacttctgatacccaggaagacattctggatgagttactgggtaacatggtgttggccccactcccagatccgggacccccaagcctggctgtagcccctgagccctgccctcagcccctgcggagccccagcttggacaatcccactcccttcccaaacctggggccctctgagaacccactgaagcggctgttggtgccgggggaagagtgggagttcgaggtgacagccttctaccggggccgccaagtcttccagcagaccatctcctgcccggagggcctgcggctggtggggtccgaagtgggagacaggacgctgcctggatggccagtcacactgccagaccctggcatgtccctgacagacaggggagtgatgagctacgtgaggcatgtgctgagctgcctgggtgggggactggctctctggcgggccgggcagtggctctgggcccagcggctggggcactgccacacatactgggcagtgagcgaggagctgctccccaacagcgggcatgggcctgatggcgaggtccccaaggacaaggaaggaggcgtgtttgacctggggcccttcattgtagatctgattaccttcacggaaggaagcggacgctcaccacgctatgccctctggttctgtgtgggggagtcatggccccaggaccagccgtggaccaagaggctcgtgatggtcaaggttgtgcccacgtgcctcagggccttggtagaaatggcccgggtagggggtgcctcctccctggagaatactgtggacctgcacatttccaacagccacccactctccctcacctccgaccagtacaaggcctacctgcaggacttggtggagggcatggatttccagggccctggggagacctga

SEQ ID NO: 8775 - RNA, 1284 nt, synthetic construct
  misc_feature 1..1284: note = derived and/or modified sequence opt1 fromIRF3__Homo_sapiens__EAW52513
  source 1..1284: mol_type = other RNA
atgggcacccccaagccgcgcatcctgccctggctcgtgagccagctggacctggggcagctcgagggcgtcgcctgggtgaacaagtcccggacccgcttccggatcccctggaagcacgggctgcgccaggacgcccagcaggaggacttcggcatcttccaggcgtgggccgaggccacgggggcctacgtgcccggccgggacaagccggacctgcccacctggaagcgcaacttccggagcgccctcaaccgcaaggagggcctgcggctggcggaggaccgctccaaggacccccacgacccccacaagatctacgagttcgtcaacagcggggtgggcgacttctcccagccggacaccagccccgacaccaacgggggcgggtccacgagcgacacccaggaggacatcctcgacgagctgctgggcaacatggtgctcgcgcccctgcccgacccgggcccgccctccctggccgtcgcccccgagccctgcccccagcccctccggagcccctccctggacaacccgacccccttccccaacctggggcccagcgagaacccgctcaagcgcctgctggtgcccggcgaggagtgggagttcgaggtgaccgccttctaccgggggcgccaggtcttccagcagacgatctcctgccccgagggcctccggctggtgggcagcgaggtgggggaccgcaccctgcccggctggccggtcaccctccccgaccccgggatgtccctgaccgaccggggcgtgatgagctacgtgcgccacgtcctgtcctgcctcgggggcggcctggccctgtggcgggccgggcagtggctctgggcccagcgcctgggccactgccacacgtactgggccgtgagcgaggagctgctcccgaactccgggcacggccccgacggggaggtgcccaaggacaaggagggcggcgtcttcgacctggggcccttcatcgtggacctgatcaccttcaccgagggcagcgggcggagcccgcgctacgcgctctggttctgcgtgggcgagtcctggccccaggaccagccctggaccaagcgcctggtcatggtgaaggtggtccccacgtgcctgcgggccctcgtggagatggcccgcgtcgggggcgccagctccctggagaacaccgtggacctgcacatcagcaactcccacccgctcagcctgacctccgaccagtacaaggcctacctgcaggacctcgtggagggcatggacttccaggggcccggcgagacctga

SEQ ID NO: 8776 - RNA, 1284 nt, synthetic construct
  misc_feature 1..1284: note = derived and/or modified sequence opt2 fromIRF3__Homo_sapiens__EAW52513
  source 1..1284: mol_type = other RNA
atgggcacccccaagccccgcatcctcccctggctcgtctcccagctcgacctcggccagctcgagggcgtcgcctgggtcaacaagtcccgcacccgcttccgcatcccctggaagcacggcctccgccaggacgcccagcaggaggacttcggcatcttccaggcctgggccgaggccaccggcgcctacgtccccggccgcgacaagcccgacctccccacctggaagcgcaacttccgctccgccctcaaccgcaaggagggcctccgcctcgccgaggaccgctccaaggacccccacgacccccacaagatctacgagttcgtcaactccggcgtcggcgacttctcccagcccgacacctcccccgacaccaacggcggcggctccacctccgacacccaggaggacatcctcgacgagctcctcggcaacatggtcctcgcccccctccccgaccccggccccccctccctcgccgtcgcccccgagccctgcccccagcccctccgctccccctccctcgacaaccccacccccttccccaacctcggcccctccgagaaccccctcaagcgcctcctcgtccccggcgaggagtgggagttcgaggtcaccgccttctaccgcggccgccaggtcttccagcagaccatctcctgccccgagggcctccgcctcgtcggctccgaggtcggcgaccgcaccctccccggctggcccgtcaccctccccgaccccggcatgtccctcaccgaccgcggcgtcatgtcctacgtccgccacgtcctctcctgcctcggcggcggcctcgccctctggcgcgccggccagtggctctgggcccagcgcctcggccactgccacacctactgggccgtctccgaggagctcctccccaactccggccacggccccgacggcgaggtccccaaggacaaggagggcggcgtcttcgacctcggccccttcatcgtcgacctcatcaccttcaccgagggctccggccgctccccccgctacgccctctggttctgcgtcggcgagtcctggccccaggaccagccctggaccaagcgcctcgtcatggtcaaggtcgtccccacctgcctccgcgccctcgtcgagatggcccgcgtcggcggcgcctcctccctcgagaacaccgtcgacctccacatctccaactcccaccccctctccctcacctccgaccagtacaaggcctacctccaggacctcgtcgagggcatggacttccagggccccggcgagacctga

SEQ ID NO: 8777 - RNA, 1284 nt, synthetic construct
  misc_feature 1..1284: note = derived and/or modified sequence opt3 fromIRF3__Homo_sapiens__EAW52513
  source 1..1284: mol_type = other RNA
atgggcacccccaagcctagaatcctgccatggctcgtgagccagcttgacctggggcaattggagggagtcgcctgggttaacaaatccaggacacggttccgcattccgtggaagcacggtttacgacaggatgctcagcaggaagactttggcatattccaagcatgggccgaggcgactggggcttacgtgcccggacgtgataaacctgacctgccaacgtggaagagaaattttaggtctgccctaaaccggaaagaaggcctccgcctggcagaggatagatcaaaggacccccatgatcctcacaagatctatgagttcgtaaatagtggtgtgggggactttagccagccagatacctcccccgacacaaacggaggcggctctacttcggatacccaggaagacattcttgatgagctgttggggaatatggtcctcgcccctctgccagacccgggacccccttcactggctgtggcaccagaaccctgccctcagccactcaggagccccagtttagacaacccgacacctttccccaatctgggtccatccgagaaccctcttaaacggttgctggttcccggcgaagagtgggagtttgaagtgaccgccttctaccgcgggcgacaagtctttcagcagactatctcttgtccagagggactaagactcgtgggcagcgaagtaggtgataggacactgcccgggtggcctgttacccttccagacccgggaatgtccctgacggatcggggcgtgatgtcatatgtccgtcatgtgttgagttgcctcggcgggggactggctttatggcgcgccggtcagtggctgtgggcgcaaagactcggccactgtcatacttactgggcagtgagcgaggaacttctgcccaattctgggcacggacctgacggcgaggtcccaaaggataaagagggtggggttttcgacttgggcccctttattgtggatctaatcaccttcacagaaggatccggcaggtcacctcggtatgccctgtggttttgcgtaggggagagctggccacaggaccagccctggactaagcgactcgtgatggtcaaagtggttccgacctgtctgcgcgctcttgtggaaatggccagagtcggaggtgcaagttctctggagaacacagtggatttgcacatatccaatagccatcctctctcgctgacctctgaccaatacaaggcttatttacaggatctggtagaaggcatggacttccaggggccaggagagacgtga

SEQ ID NO: 8778 - RNA, 1284 nt, synthetic construct
  misc_feature 1..1284: note = derived and/or modified sequence opt4 fromIRF3__Homo_sapiens__EAW52513
  source 1..1284: mol_type = other RNA
atgggcacccccaagcccagaatcctgccctggctggtgagccagctggacctgggccagctggagggcgtggcctgggtgaacaagagcagaaccagattcagaatcccctggaagcacggcctgagacaggacgcccagcaggaggacttcggcatcttccaggcctgggccgaggccaccggcgcctacgtgcccggcagagacaagcccgacctgcccacctggaagagaaacttcagaagcgccctgaacagaaaggagggcctgagactggccgaggacagaagcaaggacccccacgacccccacaagatctacgagttcgtgaacagcggcgtgggcgacttcagccagcccgacaccagccccgacaccaacggcggcggcagcaccagcgacacccaggaggacatcctggacgagctgctgggcaacatggtgctggcccccctgcccgaccccggcccccccagcctggccgtggcccccgagccctgcccccagcccctgagaagccccagcctggacaaccccacccccttccccaacctgggccccagcgagaaccccctgaagagactgctggtgcccggcgaggagtgggagttcgaggtgaccgccttctacagaggcagacaggtgttccagcagaccatcagctgccccgagggcctgagactggtgggcagcgaggtgggcgacagaaccctgcccggctggcccgtgaccctgcccgaccccggcatgagcctgaccgacagaggcgtgatgagctacgtgagacacgtgctgagctgcctgggcggcggcctggccctgtggagagccggccagtggctgtgggcccagagactgggccactgccacacctactgggccgtgagcgaggagctgctgcccaacagcggccacggccccgacggcgaggtgcccaaggacaaggagggcggcgtgttcgacctgggccccttcatcgtggacctgatcaccttcaccgagggcagcggcagaagccccagatacgccctgtggttctgcgtgggcgagagctggccccaggaccagccctggaccaagagactggtgatggtgaaggtggtgcccacctgcctgagagccctggtggagatggccagagtgggcggcgccagcagcctggagaacaccgtggacctgcacatcagcaacagccaccccctgagcctgaccagcgaccagtacaaggcctacctgcaggacctggtggagggcatggacttccagggccccggcgagacctga

SEQ ID NO: 8779 - RNA, 1284 nt, synthetic construct
  misc_feature 1..1284: note = derived and/or modified sequence opt5 fromIRF3__Homo_sapiens__EAW52513
  source 1..1284: mol_type = other RNA
atgggcacccccaagcctagaatcctgccgtggctcgtgagccagctggaccttgggcaactggagggagtcgcctgggttaacaaatcccggacacgcttccggattccctggaagcacggcctcagacaggatgctcagcaggaagactttgggatcttccaagcctgggcggaggctacgggagcctacgtgcctggccgcgataaacccgacctgcctacctggaagagaaattttcggtctgcccttaaccgcaaagaagggctgagactcgctgaggatcggagcaaggacccccatgatcctcacaagatttatgagttcgtcaattccggagtgggcgacttttctcagccggatacaagccccgacaccaacggcgggggatccacatctgatacccaggaagacatcctggatgagctgctcggcaatatggtgctggcccctcttcccgaccctgggcccccgagcctggctgttgcccctgaaccctgccctcagcccctccgctcccccagcctggacaaccctacaccgttccccaatcttggaccttctgagaaccccctgaaaagactcctggtgcctggcgaagagtgggagtttgaagtcaccgcgttctaccgggggcgccaagtgtttcagcagacgatttcctgtcccgagggactgagactcgttggcagcgaagtgggcgatcggaccctgccggggtggcctgtcacacttcccgaccctggaatgtctctgaccgatcgcggcgtgatgtcctatgtgagacatgtcctcagctgccttgggggaggcctggccctgtggcgggctgggcagtggctctgggcccaaagactgggacactgtcatacatactgggctgtttctgaggaactgctccccaattccggccacggccctgacggggaggtgcccaaggataaagagggaggcgtgttcgacctggggccgtttatcgtcgatcttatcaccttcacggaaggaagcggccgctcccctcggtatgccctgtggttttgcgtgggggagtcttggccccaggaccagccctggacaaagagactcgttatggtgaaagtcgtgcctacctgtctgcgcgcgcttgttgaaatggcccgggtgggcggagctagctccctggagaacacagtcgatctccacattagcaattctcatccgctgtccctgaccagcgaccaatacaaggcctatctccaggatctggtggaaggcatggacttccaggggcccggagagacctga

SEQ ID NO: 8780 - protein, 392 aa, synthetic construct [sequence omitted]

SEQ ID NO: 8781 - RNA, 1179 nt, synthetic construct
  misc_feature 1..1179: note = IRF3__Homo_sapiens__ADN86147
  source 1..1179: mol_type = other RNA
atggtggggcgcaagcagggttggagctgcaggcttacgggaataaaaccgggaaagccggcctgggccgaggccactggtgcatatgttcccgggagggataagccagacctgccaacctggaagaggaatttccgctctgccctcaaccgcaaagaagggttgcgtttagcagaggaccggagcaaggaccctcacgacccacataaaatctacgagtttgtgaactcaggagttggggacttttcccagccagacacctctccggacaccaatggtggaggcagtacttctgatacccaggaagacattctggatgagttactgggtaacatggtgttggccccactcccagatccgggacccccaagcctggctgtagcccctgagccctgccctcagcccctgcggagccccagcttggacaatcccactcccttcccaaacctggggccctctgagaacccactgaagcggctgttggtgccgggggaagagtgggagttcgaggtgacagccttctaccggggccgccaagtcttccagcagaccatctcctgcccggagggcctgcggctggtggggtccgaagtgggagacaggacgctgcctggatggccagtcacactgccagaccctggcatgtccctgacagacaggggagtgatgagctacgtgaggcatgtgccgagctgcctgggtgggggactggctctctggcgggccgggcagtggctctgggcccagcggctggggcactgccacacatactgggcagtgagcgaggagctgctccccaacagcgggcatgggcctgatggcgaggtccccaaggacaaggaaggaggcgtgtttgacctggggcccttcattgtagatctgattaccttcacggaaggaagcggacgctcaccacgctatgccctctggttctgtgtgggggagtcatggccccaggaccagccgtggaccaagaggctcgtgatggtcaaggttgtgcccacgtgcctcagggccttggtagaaatggcccgggtagggggtgcctcctccctggagaatactgtggacctgcacatttccaacagccacccactctccctcacctccgaccagtacaaggcctacctgcaggacttggtggagggcatggatttccagggccctggggagacctga

SEQ ID NO: 8782 - RNA, 1179 nt, synthetic construct
  misc_feature 1..1179: note = derived and/or modified sequence opt1 fromIRF3__Homo_sapiens__ADN86147
  source 1..1179: mol_type = other RNA
atggtgggccgcaagcaggggtggagctgccggctgaccggcatcaagcccgggaagccggcctgggccgaggcgaccggcgcctacgtccccgggcgcgacaagcccgacctccccacgtggaagcggaacttccgctccgccctgaaccggaaggagggcctgcgcctcgccgaggaccggagcaaggacccgcacgacccccacaagatctacgagttcgtgaactccggcgtgggggacttcagccagcccgacacctcccccgacaccaacggcgggggcagcacctccgacacgcaggaggacatcctggacgagctgctcgggaacatggtcctggccccgctgcccgaccccgggcccccgagcctcgcggtggcccccgagccctgcccccagccgctgcgctcccccagcctggacaaccccacccccttcccgaacctcggcccctccgagaaccccctgaagcggctgctcgtgcccggggaggagtgggagttcgaggtcaccgccttctaccgcggccgccaggtgttccagcagaccatcagctgcccggaggggctgcggctggtgggctccgaggtcggcgaccggacgctccccgggtggcccgtgaccctgcccgacccgggcatgagcctgaccgaccgcggggtgatgtcctacgtccggcacgtgcccagctgcctcggcgggggcctggccctgtggcgcgcgggccagtggctctgggcccagcggctggggcactgccacacctactgggccgtgtccgaggagctgctccccaacagcggccacgggccggacggcgaggtccccaaggacaaggagggcggcgtgttcgacctgggccccttcatcgtggacctgatcacgttcaccgaggggtccggccgcagcccccggtacgccctctggttctgcgtcggggagagctggccgcaggaccagccctggaccaagcgcctggtgatggtgaaggtcgtgccgacctgcctgcgggccctcgtggagatggcgcgcgtcggcggggcctccagcctggagaacacggtggacctgcacatctccaacagccaccccctctccctgaccagcgaccagtacaaggcctacctgcaggacctcgtcgagggcatggacttccagggccccggggagacctga

SEQ ID NO: 8783 - RNA, 1179 nt, synthetic construct
  misc_feature 1..1179: note = derived and/or modified sequence opt2 fromIRF3__Homo_sapiens__ADN86147
  source 1..1179: mol_type = other RNA
atggtcggccgcaagcagggctggtcctgccgcctcaccggcatcaagcccggcaagcccgcctgggccgaggccaccggcgcctacgtccccggccgcgacaagcccgacctccccacctggaagcgcaacttccgctccgccctcaaccgcaaggagggcctccgcctcgccgaggaccgctccaaggacccccacgacccccacaagatctacgagttcgtcaactccggcgtcggcgacttctcccagcccgacacctcccccgacaccaacggcggcggctccacctccgacacccaggaggacatcctcgacgagctcctcggcaacatggtcctcgcccccctccccgaccccggccccccctccctcgccgtcgcccccgagccctgcccccagcccctccgctccccctccctcgacaaccccacccccttccccaacctcggcccctccgagaaccccctcaagcgcctcctcgtccccggcgaggagtgggagttcgaggtcaccgccttctaccgcggccgccaggtcttccagcagaccatctcctgccccgagggcctccgcctcgtcggctccgaggtcggcgaccgcaccctccccggctggcccgtcaccctccccgaccccggcatgtccctcaccgaccgcggcgtcatgtcctacgtccgccacgtcccctcctgcctcggcggcggcctcgccctctggcgcgccggccagtggctctgggcccagcgcctcggccactgccacacctactgggccgtctccgaggagctcctccccaactccggccacggccccgacggcgaggtccccaaggacaaggagggcggcgtcttcgacctcggccccttcatcgtcgacctcatcaccttcaccgagggctccggccgctccccccgctacgccctctggttctgcgtcggcgagtcctggccccaggaccagccctggaccaagcgcctcgtcatggtcaaggtcgtccccacctgcctccgcgccctcgtcgagatggcccgcgtcggcggcgcctcctccctcgagaacaccgtcgacctccacatctccaactcccaccccctctccctcacctccgaccagtacaaggcctacctccaggacctcgtcgagggcatggacttccagggccccggcgagacctga

SEQ ID NO: 8784 - RNA, 1179 nt, synthetic construct
  misc_feature 1..1179: note = derived and/or modified sequence opt3 fromIRF3__Homo_sapiens__ADN86147
  source 1..1179: mol_type = other RNA
atggtgggcagaaagcaggggtggagctgcaggctgaccggaatcaaacccggtaagcctgcctgggctgaggcaacaggcgcctacgtcccagggcgggacaaaccggatctccccacttggaagcgcaacttccgatccgcgcttaatcgtaaagaaggactgagattggctgaggacaggtctaaggatcctcacgacccacataagatttatgaatttgttaactcaggcgtgggtgatttcagtcaacccgacacgagccctgataccaatgggggaggctccacatctgacactcaggaggatatattagacgaactgctaggcaacatggtactcgccccactgcccgatcctgggccaccgtcgcttgcagtggcccccgagccttgtccacagcccctgcggtcacctagcttggacaatccaaccccctttccgaacctcggacctagtgagaatcccctgaaacgcctgctcgtcccaggtgaagagtgggagttcgaagtgacagctttttacagaggcaggcaggttttccaacagaccatctcctgccctgaggggttacggctggtgggatctgaagtcggcgatcgcactcttcccggttggccagtgacattgcccgaccctgggatgagcctgaccgaccgaggagtaatgtcctatgttagacacgtgccatcatgtctaggcggcgggctcgcactgtggagggccggacagtggctttgggctcagcggctgggtcattgccacacgtactgggccgtcagtgaggaattgctcccgaacagcggccatgggcccgatggagaggtgcctaaggacaaagaaggcggtgtgtttgatctggggccattcattgtcgacttaatcacttttaccgagggctctggacgttcaccccgctatgcgctgtggttctgtgttggcgagtcctggcctcaagatcagccatggacaaagagactcgtgatggtaaaagtggtccccacttgccttagggcactggtggaaatggcccgggttgggggagctagcagtttggagaataccgtggacctacacatttctaactcccacccgctgagcctcacatcggatcagtacaaggcctatctgcaggaccttgtcgaaggtatggattttcaaggccctggggagacctga

SEQ ID NO: 8785 - RNA, 1179 nt, synthetic construct
  misc_feature 1..1179: note = derived and/or modified sequence opt4 fromIRF3__Homo_sapiens__ADN86147
  source 1..1179: mol_type = other RNA
atggtgggcagaaagcagggctggagctgcagactgaccggcatcaagcccggcaagcccgcctgggccgaggccaccggcgcctacgtgcccggcagagacaagcccgacctgcccacctggaagagaaacttcagaagcgccctgaacagaaaggagggcctgagactggccgaggacagaagcaaggacccccacgacccccacaagatctacgagttcgtgaacagcggcgtgggcgacttcagccagcccgacaccagccccgacaccaacggcggcggcagcaccagcgacacccaggaggacatcctggacgagctgctgggcaacatggtgctggcccccctgcccgaccccggcccccccagcctggccgtggcccccgagccctgcccccagcccctgagaagccccagcctggacaaccccacccccttccccaacctgggccccagcgagaaccccctgaagagactgctggtgcccggcgaggagtgggagttcgaggtgaccgccttctacagaggcagacaggtgttccagcagaccatcagctgccccgagggcctgagactggtgggcagcgaggtgggcgacagaaccctgcccggctggcccgtgaccctgcccgaccccggcatgagcctgaccgacagaggcgtgatgagctacgtgagacacgtgcccagctgcctgggcggcggcctggccctgtggagagccggccagtggctgtgggcccagagactgggccactgccacacctactgggccgtgagcgaggagctgctgcccaacagcggccacggccccgacggcgaggtgcccaaggacaaggagggcggcgtgttcgacctgggccccttcatcgtggacctgatcaccttcaccgagggcagcggcagaagccccagatacgccctgtggttctgcgtgggcgagagctggccccaggaccagccctggaccaagagactggtgatggtgaaggtggtgcccacctgcctgagagccctggtggagatggccagagtgggcggcgccagcagcctggagaacaccgtggacctgcacatcagcaacagccaccccctgagcctgaccagcgaccagtacaaggcctacctgcaggacctggtggagggcatggacttccagggccccggcgagacctga

SEQ ID NO: 8786 - RNA, 1179 nt, synthetic construct
  misc_feature 1..1179: note = derived and/or modified sequence opt5 fromIRF3__Homo_sapiens__ADN86147
  source 1..1179: mol_type = other RNA
atggtgggcagaaagcaggggtggagctgccggctgaccggaatcaaacccggcaagcctgcctgggctgaggccacaggggcgtacgtcccgggacgcgacaaacccgatctccctacgtggaagagaaacttccggtccgctctgaatcgcaaagaaggccttagactggccgaggaccggtctaaggatccccacgaccctcataagatttatgaatttgttaacagcggggtgggagatttctcccaacccgacacctctcctgatacaaatggcggcgggagcacctccgacacacaggaggatatcctcgacgaactgcttggaaacatggtgctggccccgctccccgatcctgggcccccttctctggctgtcgcccccgagccgtgtcctcagcccctgcgcagcccttccctcgacaatcccaccccctttcctaacctggggccgagcgagaatccccttaaaagactgctcgtgcctggagaagagtgggagttcgaagttacagctttttaccggggccgccaggtgttccaacagaccatttcttgccccgaggggctgagacttgtcggatccgaagtgggcgatcggacgctgcctggctggcccgttaccctcccggaccctgggatgagcctgacagaccgcggagtgatgtcttatgtcagacacgtgccctcctgtctgggcgggggactcgccctgtggcgggcgggccagtggctttgggcccagcgcctggggcattgccacacctactgggctgtgagcgaggaactcctgcctaactctggacatggccccgatggcgaggtccctaaggacaaagaagggggagtttttgatcttggccccttcatcgtggacctgattacatttaccgaggggtccggaagaagcccgcggtatgccctctggttctgtgtgggcgagtcctggcctcaagatcagccctggacgaagagactggtcatggtgaaagttgtgcccacatgcctgcgcgctctcgtcgaaatggcccgggtgggcggcgcgtctagcctggagaataccgttgaccttcacatctccaacagccaccctctgtctctcacatccgatcagtacaaggcctatctgcaggaccttgtggaaggaatggattttcaaggcccgggggagacctga

SEQ ID NO: 8787 - protein, 154 aa, synthetic construct [sequence omitted]

SEQ ID NO: 8788 - RNA, 465 nt, synthetic construct
  misc_feature 1..465: note = IRF3__Homo_sapiens__ADN86148
  source 1..465: mol_type = other RNA
atggtgttggccccactcccagatccgggacccccaagcctggctgtagcccctgagccctgccctcagcccctgcggagccccagcttggacaatcccactcccttcccaaacctggggccctctgagaacccactgaagcggctgttggtgccgggggaagatctgattaccttcacggaaggaagcggacgctcaccacgctatgccctctggttctgtgtgggggagtcatggccccaggaccagccgtggaccaagaggctcgtgatggtcaaggttgtgcccacgtgcctcagggccttggtagaaatggcccgggtagggggtgcctcctccctggagaatactgtggacctgcacatttccaacagccacccactctccctcacctccgaccagcacaaggcctacctgcaggacttggtggagggcatggatttccagggccctggggagacctga

SEQ ID NO: 8789 - RNA, 465 nt, synthetic construct
  misc_feature 1..465: note = derived and/or modified sequence opt1 fromIRF3__Homo_sapiens__ADN86148
  source 1..465: mol_type = other RNA
atggtgctggcgcccctcccggaccccggcccgcccagcctggccgtcgcccccgagccctgcccccagcccctgcgctccccgagcctcgacaaccccacccccttccccaacctggggccgtccgagaaccccctgaagcggctcctggtgcccggcgaggacctgatcaccttcacggaggggagcggccgcagcccccggtacgccctctggttctgcgtgggggagtcctggccgcaggaccagccctggaccaagcgcctggtcatggtgaaggtggtcccgacctgcctgcgggccctcgtggagatggcccgcgtgggcggcgcctccagcctggagaacaccgtcgacctgcacatctccaacagccaccccctctccctgacgagcgaccagcacaaggcgtacctgcaggacctcgtggaggggatggacttccagggccccggggagacctga

SEQ ID NO: 8790 - RNA, 465 nt, synthetic construct
  misc_feature 1..465: note = derived and/or modified sequence opt2 fromIRF3__Homo_sapiens__ADN86148
  source 1..465: mol_type = other RNA
atggtcctcgcccccctccccgaccccggccccccctccctcgccgtcgcccccgagccctgcccccagcccctccgctccccctccctcgacaaccccacccccttccccaacctcggcccctccgagaaccccctcaagcgcctcctcgtccccggcgaggacctcatcaccttcaccgagggctccggccgctccccccgctacgccctctggttctgcgtcggcgagtcctggccccaggaccagccctggaccaagcgcctcgtcatggtcaaggtcgtccccacctgcctccgcgccctcgtcgagatggcccgcgtcggcggcgcctcctccctcgagaacaccgtcgacctccacatctccaactcccaccccctctccctcacctccgaccagcacaaggcctacctccaggacctcgtcgagggcatggacttccagggccccggcgagacctga

SEQ ID NO: 8791 - RNA, 465 nt, synthetic construct
  misc_feature 1..465: note = derived and/or modified sequence opt3 fromIRF3__Homo_sapiens__ADN86148
  source 1..465: mol_type = other RNA
atggtgctggctcccctccctgacccaggcccgcccagccttgccgtcgcacctgagccatgcccccagcctctgagatccccatctttggataaccccacccctttcccaaatttagggccgtcagaaaaccccctgaagaggctactcgttcctggagaggacctgatcacatttactgaaggtagtggccggagcccacgctacgccctttggttctgtgtgggggagtcctggccccaagatcagccttggacgaaacgactggtaatggtgaaggtcgtgccaacctgcttgcgtgcgctcgttgaaatggctagagtgggaggcgcctcttcgctggagaatacagtcgacctgcacatttcaaacagccatcccctcagtttaacttccgatcagcacaaagcatatctgcaggaccttgtggagggtatggattttcaagggccgggagaaacctga

SEQ ID NO: 8792 - RNA, 465 nt, synthetic construct
  misc_feature 1..465: note = derived and/or modified sequence opt4 fromIRF3__Homo_sapiens__ADN86148
  source 1..465: mol_type = other RNA
atggtgctggcccccctgcccgaccccggcccccccagcctggccgtggcccccgagccctgcccccagcccctgagaagccccagcctggacaaccccacccccttccccaacctgggccccagcgagaaccccctgaagagactgctggtgcccggcgaggacctgatcaccttcaccgagggcagcggcagaagccccagatacgccctgtggttctgcgtgggcgagagctggccccaggaccagccctggaccaagagactggtgatggtgaaggtggtgcccacctgcctgagagccctggtggagatggccagagtgggcggcgccagcagcctggagaacaccgtggacctgcacatcagcaacagccaccccctgagcctgaccagcgaccagcacaaggcctacctgcaggacctggtggagggcatggacttccagggccccggcgagacctga

SEQ ID NO: 8793 - RNA, 465 nt, synthetic construct
  misc_feature 1..465: note = derived and/or modified sequence opt5 fromIRF3__Homo_sapiens__ADN86148
  source 1..465: mol_type = other RNA
atggtgctggctcccctccctgacccggggccccctagcctggctgtcgcccccgagccttgcccccagcctcttagatccccgtctctggataaccccacccctttccccaatctcggccctagcgaaaaccccctgaagcggcttctggttccgggagaggacctcatcacatttacggaaggctccgggcgctctcctagatacgcgctgtggttctgtgtgggagagagctggccccaagatcagccttggaccaaacggctggtgatggtcaaggtggttcccacatgcctccgcgctctggtggaaatggccagagtcggcggggcctcctctcttgagaataccgtggacctgcacattagcaactcccatcccctcagcctgacatctgatcagcacaaagcctatcttcaggacctggttgagggaatggattttcaaggccctggcgaaacctga

SEQ ID NO: 8794 - protein, 281 aa, synthetic construct
  REGION 1..281: note = IRF3__Homo_sapiens__E2GIM7
MVLAPLPDPGPPSLAVAPEPCPQPLRSPSLDNPTPFPNLGPSENPLKRLLVPGEEWEFEVTAFYRGRQVFQQTISCPEGLRLVGSEVGDRTLPGWPVTLPDPGMSLTDRGVMSYVRHVLSCLGGGLALWRAGQWLWAQRLGHCHTYWAVSEELLPNSGHGPDGEVPKDKEGGVFDLGPFIVDLITFTEGSGRSPRYALWFCVGESWPQDQPWTKRLVMVKVVPTCLRALVEMARVGGASSLENTVDLHISNSHPLSLTSDQYKAYLQDLVEGMDFQGPGET

SEQ ID NO: 8795 - RNA, 846 nt, synthetic construct
  misc_feature 1..846: note = IRF3__Homo_sapiens__ADN86149
  source 1..846: mol_type = other RNA
atggtgttggccccactcccagatccgggacccccaagcctggctgtagcccctgagccctgccctcagcccctgcggagccccagcttggacaatcccactcccttcccaaacctggggccctctgagaacccactgaagcggctgttggtgccgggggaagagtgggagttcgaggtgacagccttctaccggggccgccaagtcttccagcagaccatctcctgcccggagggcctgcggctggtggggtccgaagtgggagacaggacgctgcctggatggccagtcacactgccagaccctggcatgtccctgacagacaggggagtgatgagctacgtgaggcatgtgctgagctgcctgggtgggggactggctctctggcgggccgggcagtggctctgggcccagcggctggggcactgccacacatactgggcagtgagcgaggagctgctccccaacagcgggcatgggcctgatggcgaggtccccaaggacaaggaaggaggcgtgtttgacctggggcccttcattgtagatctgattaccttcacggaaggaagcggacgctcaccacgctatgccctctggttctgtgtgggggagtcatggccccaggaccagccgtggaccaagaggctcgtgatggtcaaggttgtgcccacgtgcctcagggccttggtagaaatggcccgggtagggggtgcctcctccctggagaatactgtggacctgcacatttccaacagccacccactctccctcacctccgaccagtacaaggcctacctgcaggacttggtggagggcatggatttccagggccctggggagacctga

SEQ ID NO: 8796 - RNA, 846 nt, synthetic construct
  misc_feature 1..846: note = derived and/or modified sequence opt1 fromIRF3__Homo_sapiens__ADN86149
  source 1..846: mol_type = other RNA
atggtgctggcgcccctcccggaccccggcccgcccagcctggccgtcgcccccgagccctgcccccagcccctgcgctccccgagcctcgacaaccccacccccttccccaacctggggccgtccgagaaccccctgaagcggctcctggtgcccggcgaggagtgggagttcgaggtgaccgccttctaccgcgggcggcaggtcttccagcagacgatcagctgccccgagggcctgcgcctcgtggggtccgaggtgggcgaccggaccctgccgggctggcccgtcaccctgcccgaccccgggatgagcctcaccgaccgcggcgtgatgtcctacgtgcggcacgtcctgagctgcctcgggggcgggctggccctgtggcgcgccggccagtggctgtgggcccagcggctcggccactgccacacgtactgggcggtgtccgaggagctgctgccgaacagcgggcacggccccgacggggaggtgcccaaggacaaggagggcggcgtcttcgacctcgggcccttcatcgtggacctgatcaccttcaccgagggctccgggcgcagcccgcggtacgccctgtggttctgcgtgggcgagtcctggccccaggaccagccctggaccaagcgcctcgtcatggtgaaggtggtccccacgtgcctgcgggccctggtggagatggcccgcgtcgggggcgcgagctccctcgagaacaccgtggacctgcacatcagcaactcccacccgctgagcctcacctccgaccagtacaaggcctacctgcaggacctggtggagggcatggacttccaggggcccggcgagacctga

SEQ ID NO: 8797 - RNA, 846 nt, synthetic construct
  misc_feature 1..846: note = derived and/or modified sequence opt2 fromIRF3__Homo_sapiens__ADN86149
  source 1..846: mol_type = other RNA
atggtcctcgcccccctccccgaccccggccccccctccctcgccgtcgcccccgagccctgcccccagcccctccgctccccctccctcgacaaccccacccccttccccaacctcggcccctccgagaaccccctcaagcgcctcctcgtccccggcgaggagtgggagttcgaggtcaccgccttctaccgcggccgccaggtcttccagcagaccatctcctgccccgagggcctccgcctcgtcggctccgaggtcggcgaccgcaccctccccggctggcccgtcaccctccccgaccccggcatgtccctcaccgaccgcggcgtcatgtcctacgtccgccacgtcctctcctgcctcggcggcggcctcgccctctggcgcgccggccagtggctctgggcccagcgcctcggccactgccacacctactgggccgtctccgaggagctcctccccaactccggccacggccccgacggcgaggtccccaaggacaaggagggcggcgtcttcgacctcggccccttcatcgtcgacctcatcaccttcaccgagggctccggccgctccccccgctacgccctctggttctgcgtcggcgagtcctggccccaggaccagccctggaccaagcgcctcgtcatggtcaaggtcgtccccacctgcctccgcgccctcgtcgagatggcccgcgtcggcggcgcctcctccctcgagaacaccgtcgacctccacatctccaactcccaccccctctccctcacctccgaccagtacaaggcctacctccaggacctcgtcgagggcatggacttccagggccccggcgagacctga

SEQ ID NO: 8798 - RNA, 846 nt, synthetic construct
  misc_feature 1..846: note = derived and/or modified sequence opt3 fromIRF3__Homo_sapiens__ADN86149
  source 1..846: mol_type = other RNA
atggtgctggctcccctccctgacccaggcccgcccagccttgctgtcgcacctgagccatgcccccagcctctgagatccccatctttggataaccccacccctttcccaaatttagggccgtcagaaaaccccctgaagaggctactcgttcctggagaggaatgggagtttgaagtgacagccttctaccggggtcgccaagtatttcagcagactatcagttgtccagagggcctgcgacttgtggggagcgaggtcggagaccgtacgctgcccggctggcctgtgaccttgccagatcccggtatgtccctcacagacagaggggttatgtcttatgtgaggcacgtcctgtcgtgcctgggaggcggcctcgcgttatggcgggctgggcagtggctgtgggcccaacgccttggacattgtcacacttactgggcagtgtcagaagagttgctgccgaatagcggtcatggccctgatggggaagtacccaaagacaaggagggaggcgttttcgatctaggtccatttattgtggacctcataaccttcacagaggggagtggaagatcccctaggtatgccctgtggttttgcgtcggcgaatcttggccccaggatcagccatggaccaaacggcttgtgatggtgaaggtcgttcccacttgtctgcgcgctttggtggagatggcacgagtaggcggggccagctccctcgaaaacacagtggacctgcacatctcaaatagtcatcctttaagcctgacctctgatcagtacaaagcctatctccaagaccttgtcgagggaatggatttccagggtccaggcgaaacgtga

SEQ ID NO: 8799 - RNA, 846 nt, synthetic construct
  misc_feature 1..846: note = derived and/or modified sequence opt4 fromIRF3__Homo_sapiens__ADN86149
  source 1..846: mol_type = other RNA
atggtgctggcccccctgcccgaccccggcccccccagcctggccgtggcccccgagccctgcccccagcccctgagaagccccagcctggacaaccccacccccttccccaacctgggccccagcgagaaccccctgaagagactgctggtgcccggcgaggagtgggagttcgaggtgaccgccttctacagaggcagacaggtgttccagcagaccatcagctgccccgagggcctgagactggtgggcagcgaggtgggcgacagaaccctgcccggctggcccgtgaccctgcccgaccccggcatgagcctgaccgacagaggcgtgatgagctacgtgagacacgtgctgagctgcctgggcggcggcctggccctgtggagagccggccagtggctgtgggcccagagactgggccactgccacacctactgggccgtgagcgaggagctgctgcccaacagcggccacggccccgacggcgaggtgcccaaggacaaggagggcggcgtgttcgacctgggccccttcatcgtggacctgatcaccttcaccgagggcagcggcagaagccccagatacgccctgtggttctgcgtgggcgagagctggccccaggaccagccctggaccaagagactggtgatggtgaaggtggtgcccacctgcctgagagccctggtggagatggccagagtgggcggcgccagcagcctggagaacaccgtggacctgcacatcagcaacagccaccccctgagcctgaccagcgaccagtacaaggcctacctgcaggacctggtggagggcatggacttccagggccccggcgagacctga

SEQ ID NO: 8800 - RNA, 846 nt, synthetic construct
  misc_feature 1..846: note = derived and/or modified sequence opt5 fromIRF3__Homo_sapiens__ADN86149
  source 1..846: mol_type = other RNA
atggtgctggctcccctccctgacccggggccccctagcctggccgtcgcccccgagccttgcccccagcctcttagatccccgtctctggataaccccacccctttccccaatctcgggcctagcgaaaaccccctgaagcggcttctggttccgggagaggaatgggagtttgaagtgacagcgttctaccgcggcagacaagtgtttcagcagacgatctcctgtcctgaggggctccggctggtcggatctgaggtgggcgaccgcaccctgcccgggtggcctgttacactccccgatcccggaatgagcctgaccgacagaggcgtgatgtcctatgtccggcacgtgctttcttgcctgggcgggggactcgctctgtggcgcgccggccagtggctttgggcccaaagactggggcattgtcacacatactgggctgttagcgaggaactcctgcctaattccggacatggcccggatggggaagtgcccaaagacaaggagggaggcgtcttcgatctgggcccttttattgtggacctcatcaccttcacagaggggagcggacggtctccccgctatgccctgtggttttgcgtgggcgaatcctggcctcaggatcagccctggaccaaaagacttgtcatggttaaggtggtgccgacgtgtctgcgggctctcgtcgagatggcccgcgtgggcggagcgagctctctggaaaacaccgttgaccttcacatttccaatagccatcctctgtctctcacatccgatcagtacaaagcctatctgcaagacctggtggagggcatggatttccaggggcccggagaaacctga

SEQ ID NO: 8801 - protein, 154 aa, synthetic construct [sequence omitted]

SEQ ID NO: 8802 - RNA, 465 nt, synthetic construct
  misc_feature 1..465: note = IRF3__Homo_sapiens__ADN86150
  source 1..465: mol_type = other RNA
atggtgttggccccactcccagatccgggacccccaagcctggctgtagcccctgagccctgccctcagcccctgcggagccccagcttggacaatcccactcccttcccaaacctggggccctctgagaacccactgaagcggctgttggtgccgggggaagatctgattaccttcacggaaggaagcggacgctcaccacgctatgccctctggttctgtgtgggggagtcatggccccaggaccagccgtggaccaagaggctcgtgatggtcaaggttgtgcccacgtgcctcagggccttggtagaaatggcccgggtagggggtgcctcctccctggagaatactgtggacctgcacatttccaacagccacccactctccctcacctccgaccagtacaaggcctacctgcaggacttggtggagggcatggatttccagggccctggggagacctga

SEQ ID NO: 8803 - RNA, 465 nt, synthetic construct
  misc_feature 1..465: note = derived and/or modified sequence opt1 fromIRF3__Homo_sapiens__ADN86150
  source 1..465: mol_type = other RNA
atggtgctggcgcccctcccggaccccggcccgcccagcctggccgtcgcccccgagccctgcccccagcccctgcgctccccgagcctcgacaaccccacccccttccccaacctggggccgtccgagaaccccctgaagcggctcctggtgcccggcgaggacctgatcaccttcacggaggggagcggccgcagcccccggtacgccctctggttctgcgtgggggagtcctggccgcaggaccagccctggaccaagcgcctggtcatggtgaaggtggtcccgacctgcctgcgggccctcgtggagatggcccgcgtgggcggcgcctccagcctggagaacaccgtcgacctgcacatctccaacagccaccccctctccctgacgagcgaccagtacaaggcgtacctgcaggacctcgtggaggggatggacttccagggccccggggagacctga

SEQ ID NO: 8804 - RNA, 465 nt, synthetic construct
  misc_feature 1..465: note = derived and/or modified sequence opt2 fromIRF3__Homo_sapiens__ADN86150
  source 1..465: mol_type = other RNA
atggtcctcgcccccctccccgaccccggccccccctccctcgccgtcgcccccgagccctgcccccagcccctccgctccccctccctcgacaaccccacccccttccccaacctcggcccctccgagaaccccctcaagcgcctcctcgtccccggcgaggacctcatcaccttcaccgagggctccggccgctccccccgctacgccctctggttctgcgtcggcgagtcctggccccaggaccagccctggaccaagcgcctcgtcatggtcaaggtcgtccccacctgcctccgcgccctcgtcgagatggcccgcgtcggcggcgcctcctccctcgagaacaccgtcgacctccacatctccaactcccaccccctctccctcacctccgaccagtacaaggcctacctccaggacctcgtcgagggcatggacttccagggccccggcgagacctga

SEQ ID NO: 8805 - RNA, 465 nt, synthetic construct
  misc_feature 1..465: note = derived and/or modified sequence opt3 fromIRF3__Homo_sapiens__ADN86150
  source 1..465: mol_type = other RNA
atggtgctggctcccctccctgacccaggcccgcccagccttgccgtcgcacctgagccatgcccccagcctctgagatccccatctttggataaccccacccctttcccaaatttagggccgtcagaaaaccccctgaagaggctactcgttcctggagaggacctgatcacatttactgaaggtagtggccggagcccacgctacgccctttggttctgtgtgggggagtcctggccccaagatcagccttggacgaaacgactggtaatggtgaaggtcgtgccaacctgcttgcgtgcgctcgttgaaatggctagagtgggaggcgcctcttcgctggagaatacagtcgacctgcacatttcaaacagccatcccctcagtttaacttccgatcagtataaagcatacctgcaggaccttgtggagggtatggattttcaagggccgggagaaacctga

SEQ ID NO: 8806 - RNA, 465 nt, synthetic construct
  misc_feature 1..465: note = derived and/or modified sequence opt4 fromIRF3__Homo_sapiens__ADN86150
  source 1..465: mol_type = other RNA
atggtgctggcccccctgcccgaccccggcccccccagcctggccgtggcccccgagccctgcccccagcccctgagaagccccagcctggacaaccccacccccttccccaacctgggccccagcgagaaccccctgaagagactgctggtgcccggcgaggacctgatcaccttcaccgagggcagcggcagaagccccagatacgccctgtggttctgcgtgggcgagagctggccccaggaccagccctggaccaagagactggtgatggtgaaggtggtgcccacctgcctgagagccctggtggagatggccagagtgggcggcgccagcagcctggagaacaccgtggacctgcacatcagcaacagccaccccctgagcctgaccagcgaccagtacaaggcctacctgcaggacctggtggagggcatggacttccagggccccggcgagacctga

SEQ ID NO: 8807 - RNA, 465 nt, synthetic construct
  misc_feature 1..465: note = derived and/or modified sequence opt5 fromIRF3__Homo_sapiens__ADN86150
  source 1..465: mol_type = other RNA
atggtgctggctcccctccctgacccggggccccctagcctggctgtcgcccccgagccttgcccccagcctcttagatccccgtctctggataaccccacccctttccccaatctcggccctagcgaaaaccccctgaagcggcttctggttccgggagaggacctcatcacatttacggaaggctccgggcgctctcctagatacgcgctgtggttctgtgtgggagagagctggccccaagatcagccttggaccaaacggctggtgatggtcaaggtggttcccacatgcctccgcgctctggtggaaatggccagagtcggcggggcctcctctcttgagaataccgtggacctgcacattagcaactcccatcccctcagcctgacatctgatcagtataaagcctaccttcaggacctggttgagggaatggattttcaaggccctggcgaaacctga

SEQ ID NO: 8808 - protein, 300 aa, synthetic construct [sequence omitted]

SEQ ID NO: 8809 - RNA, 903 nt, synthetic construct
  misc_feature 1..903: note = IRF3__Homo_sapiens__ADN86151
  source 1..903: mol_type = other RNA
atgggaaccccaaagccacggatcctgccctggctggtgtcgcagctggacctggggcaactggagggcgtggcctgggtgaacaagagccgcacgcgcttccgcatcccttggaagcacggcctacggcaggatgcacagcaggaggatttcggaatcttccaggcctgggccgaggccactggtgcatatgttcccgggagggataagccagacctgccaacctggaagaggaatttccgctctgccctcaaccgcaaagaagggttgcgtttagcagaggaccggagcaaggaccctcacgacccacataaaatctacgagtttgtgaactcaggagttggggacttttcccagccagacacctctccggacaccaatggtggaggcagtacttctgatacccaggaagacattctggacgagttactgggtaacatggtgttggccccactcccagatccgggacccccaagcctggctgtagcccctgagccctgccctcagcccctgcggagccccagcttggacaatcccactcccttcccaaacctggggccctctgagaacccactgaagcggctgttggtgccgggggaagatctgattaccttcacggaaggaagcggacgttcaccacgctatgccctctggttctgtgtgggggagtcatggccccaggaccagccgtggaccaagaggctcgtgatggtcaaggttgtgcccacgtgcctcagggccttggtagaaatggcccgggtagggggtgcctcctccctggagaatactgtggacctgcacatttccaacagccacccactctccctcacctccgaccagtacaaggcctacctgcaggacttggtggagggcatggatttccagggccctggggagacctga

SEQ ID NO: 8810 - RNA, 903 nt, synthetic construct
  misc_feature 1..903: note = derived and/or modified sequence opt1 fromIRF3__Homo_sapiens__ADN86151
  source 1..903: mol_type = other RNA
atgggcacccccaagccgcgcatcctgccctggctcgtgagccagctggacctggggcagctcgagggcgtcgcctgggtgaacaagtcccggacccgcttccggatcccctggaagcacgggctgcgccaggacgcccagcaggaggacttcggcatcttccaggcgtgggccgaggccacgggggcctacgtgcccggccgggacaagccggacctgcccacctggaagcgcaacttccggagcgccctcaaccgcaaggagggcctgcggctggcggaggaccgctccaaggacccccacgacccccacaagatctacgagttcgtcaacagcggggtgggcgacttctcccagccggacaccagccccgacaccaacgggggcgggtccacgagcgacacccaggaggacatcctcgacgagctgctgggcaacatggtgctcgcgcccctgcccgacccgggcccgccctccctggccgtcgcccccgagccctgcccccagcccctccggagcccctccctggacaacccgacccccttccccaacctggggcccagcgagaacccgctcaagcgcctgctggtgcccggcgaggacctcatcaccttcacggaggggtccggccggagcccccgctacgccctgtggttctgcgtgggcgagtcctggccccaggaccagccgtggaccaagcggctggtcatggtgaaggtggtcccgacctgcctccgcgccctggtggagatggcccgggtcgggggcgccagctccctggagaacaccgtggacctccacatcagcaactcccaccccctgagcctgacgagcgaccagtacaaggcctacctccaggacctggtggaggggatggacttccagggccccggggagacctga

SEQ ID NO: 8811 - RNA, 903 nt, synthetic construct
  misc_feature 1..903: note = derived and/or modified sequence opt2 fromIRF3__Homo_sapiens__ADN86151
  source 1..903: mol_type = other RNA
atgggcacccccaagccccgcatcctcccctggctcgtctcccagctcgacctcggccagctcgagggcgtcgcctgggtcaacaagtcccgcacccgcttccgcatcccctggaagcacggcctccgccaggacgcccagcaggaggacttcggcatcttccaggcctgggccgaggccaccggcgcctacgtccccggccgcgacaagcccgacctccccacctggaagcgcaacttccgctccgccctcaaccgcaaggagggcctccgcctcgccgaggaccgctccaaggacccccacgacccccacaagatctacgagttcgtcaactccggcgtcggcgacttctcccagcccgacacctcccccgacaccaacggcggcggctccacctccgacacccaggaggacatcctcgacgagctcctcggcaacatggtcctcgcccccctccccgaccccggccccccctccctcgccgtcgcccccgagccctgcccccagcccctccgctccccctccctcgacaaccccacccccttccccaacctcggcccctccgagaaccccctcaagcgcctcctcgtccccggcgaggacctcatcaccttcaccgagggctccggccgctccccccgctacgccctctggttctgcgtcggcgagtcctggccccaggaccagccctggaccaagcgcctcgtcatggtcaaggtcgtccccacctgcctccgcgccctcgtcgagatggcccgcgtcggcggcgcctcctccctcgagaacaccgtcgacctccacatctccaactcccaccccctctccctcacctccgaccagtacaaggcctacctccaggacctcgtcgagggcatggacttccagggccccggcgagacctga

SEQ ID NO: 8812 - RNA, 903 nt, synthetic construct
  misc_feature 1..903: note = derived and/or modified sequence opt3 fromIRF3__Homo_sapiens__ADN86151
  source 1..903: mol_type = other RNA
atgggcacccccaagcctagaatcctgccatggctcgtgagccagcttgacctggggcaattggagggagtcgcctgggttaacaaatccaggacacggttccgcattccgtggaagcacggtttacgacaggatgctcagcaggaagactttggcatattccaagcatgggccgaggcgactggggcttacgtgcccggacgtgataaacctgacctgccaacgtggaagagaaattttaggtctgccctaaaccggaaagaaggcctccgcctggcagaggatagatcaaaggacccccatgatcctcacaagatctatgagttcgtaaatagtggtgtgggggactttagccagccagatacctcccccgacacaaacggaggcggctctacttcggatacccaggaagacattcttgatgagctgttggggaatatggtcctcgcccctctgccagacccgggacccccttcactggctgtggcaccagaaccctgccctcagccactcaggagccccagtttagacaacccgacacctttccccaatctgggtccatccgagaaccctcttaaacggttgctggttcccggcgaagatctaatcacctttactgaggggtctggacgcagcccacgatacgccctctggttctgtgtgggcgagtcctggccccaagaccagccttggacaaagagactggtcatggtgaaagtagttccaacctgccttagggctctggtggaaatggcccgggtcggtggggcgtcaagtttggagaatacggtggatctccatattagcaactctcacccgctgtccttaacttcagaccagtataaggcatacctgcaggatctcgtggaaggaatggactttcaaggccccggcgagacctga

SEQ ID NO: 8813 - RNA, 903 nt, synthetic construct
  misc_feature 1..903: note = derived and/or modified sequence opt4 fromIRF3__Homo_sapiens__ADN86151
  source 1..903: mol_type = other RNA
atgggcacccccaagcccagaatcctgccctggctggtgagccagctggacctgggccagctggagggcgtggcctgggtgaacaagagcagaaccagattcagaatcccctggaagcacggcctgagacaggacgcccagcaggaggacttcggcatcttccaggcctgggccgaggccaccggcgcctacgtgcccggcagagacaagcccgacctgcccacctggaagagaaacttcagaagcgccctgaacagaaaggagggcctgagactggccgaggacagaagcaaggacccccacgacccccacaagatctacgagttcgtgaacagcggcgtgggcgacttcagccagcccgacaccagccccgacaccaacggcggcggcagcaccagcgacacccaggaggacatcctggacgagctgctgggcaacatggtgctggcccccctgcccgaccccggcccccccagcctggccgtggcccccgagccctgcccccagcccctgagaagccccagcctggacaaccccacccccttccccaacctgggccccagcgagaaccccctgaagagactgctggtgcccggcgaggacctgatcaccttcaccgagggcagcggcagaagccccagatacgccctgtggttctgcgtgggcgagagctggccccaggaccagccctggaccaagagactggtgatggtgaaggtggtgcccacctgcctgagagccctggtggagatggccagagtgggcggcgccagcagcctggagaacaccgtggacctgcacatcagcaacagccaccccctgagcctgaccagcgaccagtacaaggcctacctgcaggacctggtggagggcatggacttccagggccccggcgagacctga

SEQ ID NO: 8814 - RNA, 903 nt, synthetic construct
  misc_feature 1..903: note = derived and/or modified sequence opt5 fromIRF3__Homo_sapiens__ADN86151
  source 1..903: mol_type = other RNA
atgggcacccccaagcctagaatcctgccgtggctcgtgagccagctggaccttgggcaactggagggagtcgcctgggttaacaaatcccggacacgcttccggattccctggaagcacggcctcagacaggatgctcagcaggaagactttgggatcttccaagcctgggcggaggctacgggagcctacgtgcctggccgcgataaacccgacctgcctacctggaagagaaattttcggtctgcccttaaccgcaaagaagggctgagactcgctgaggatcggagcaaggacccccatgatcctcacaagatttatgagttcgtcaattccggagtgggcgacttttctcagccggatacaagccccgacaccaacggcgggggatccacatctgatacccaggaagacatcctggatgagctgctcggcaatatggtgctggcccctcttcccgaccctgggcccccgagcctggctgttgcccctgaaccctgccctcagcccctccgctcccccagcctggacaaccctacaccgttccccaatcttggaccttctgagaaccccctgaaaagactcctggtgcctggcgaagatctgattacctttacggaggggtccggacggagcccccgctacgcgctctggttctgtgtcggcgagtcttggccgcaagaccagccttggaccaagagactggtgatggttaaagtggtccccacatgccttcgggccctggtggaaatggctcgcgtgggcggggcctccagcctcgagaataccgtcgatctgcatatctctaactcccaccctcttagcctgacatccgaccagtataaggcttacctccaggatctggttgaaggaatggactttcaaggccccggggagacctga

SEQ ID NO: 8815 - protein, 427 aa, synthetic construct
  REGION 1..427: note = IRF3__Homo_sapiens__Q14653
MGTPKPRILPWLVSQLDLGQLEGVAWVNKSRTRFRIPWKHGLRQDAQQEDFGIFQAWAEATGAYVPGRDKPDLPTWKRNFRSALNRKEGLRLAEDRSKDPHDPHKIYEFVNSGVGDFSQPDTSPDTNGGGSTSDTQEDILDELLGNMVLAPLPDPGPPSLAVAPEPCPQPLRSPSLDNPTPFPNLGPSENPLKRLLVPGEEWEFEVTAFYRGRQVFQQTISCPEGLRLVGSEVGDRTLPGWPVTLPDPGMSLTDRGVMSYVRHVLSCLGGGLALWRAGQWLWAQRLGHCHTYWAVSEELLPNSGHGPDGEVPKDKEGGVFDLGPFIVDLITFTEGSGRSPRYALWFCVGESWPQDQPWTKRLVMVKVVPTCLRALVEMARVGGASSLENTVDLHISNSHPLSLTSDQYKAYLQDLVEGMDFQGPGES

SEQ ID NO: 8816 - RNA, 1284 nt, synthetic construct
  misc_feature 1..1284: note = IRF3__Homo_sapiens__AAH71721
  source 1..1284: mol_type = other RNA
atgggaaccccaaagccacggatcctgccctggctggtgtcgcagctggacctggggcaactggagggcgtggcctgggtgaacaagagccgcacgcgcttccgcatcccttggaagcacggcctacggcaggatgcacagcaggaggatttcggaatcttccaggcctgggccgaggccactggtgcatatgttcccgggagggataagccagacctgccaacctggaagaggaatttccgctctgccctcaaccgcaaagaagggttgcgtttagcagaggaccggagcaaggaccctcacgacccacataaaatctacgagtttgtgaactcaggagttggggacttttcccagccagacacctctccggacaccaatggtggaggcagtacttctgatacccaggaagacattctggatgagttactgggtaacatggtgttggccccactcccagatccgggacccccaagcctggctgtagcccctgagccctgccctcagcccctgcggagccccagcttggacaatcccactcccttcccaaacctggggccctctgagaacccactgaagcggctgttggtgccgggggaagagtgggagttcgaggtgacagccttctaccggggccgccaagtcttccagcagaccatctcctgcccggagggcctgcggctggtggggtccgaagtgggagacaggacgctgcctggatggccagtcacactgccagaccctggcatgtccctgacagacaggggagtgatgagctacgtgaggcatgtgctgagctgcctgggtgggggactggctctctggcgggccgggcagtggctctgggcccagcggctggggcactgccacacatactgggcagtgagcgaggagctgctccccaacagcgggcatgggcctgatggcgaggtccccaaggacaaggaaggaggcgtgtttgacctggggcccttcattgtagatctgattaccttcacggaaggaagcggacgctcaccacgctatgccctctggttctgtgtgggggagtcatggccccaggaccagccgtggaccaagaggctcgtgatggtcaaggttgtgcccacgtgcctcagggccttggtagaaatggcccgggtagggggtgcctcctccctggagaatactgtggacctgcacatttccaacagccacccactctccctcacctccgaccagtacaaggcctacctgcaggacttggtggagggcatggatttccagggccctggggagagctga

SEQ ID NO: 8817 - RNA, 1284 nt, synthetic construct
  misc_feature 1..1284: note = derived and/or modified sequence opt1 fromIRF3__Homo_sapiens__AAH71721
  source 1..1284: mol_type = other RNA
atgggcacccccaagccgcgcatcctgccctggctcgtgagccagctggacctggggcagctcgagggcgtcgcctgggtgaacaagtcccggacccgcttccggatcccctggaagcacgggctgcgccaggacgcccagcaggaggacttcggcatcttccaggcgtgggccgaggccacgggggcctacgtgcccggccgggacaagccggacctgcccacctggaagcgcaacttccggagcgccctcaaccgcaaggagggcctgcggctggcggaggaccgctccaaggacccccacgacccccacaagatctacgagttcgtcaacagcggggtgggcgacttctcccagccggacaccagccccgacaccaacgggggcgggtccacgagcgacacccaggaggacatcctcgacgagctgctgggcaacatggtgctcgcgcccctgcccgacccgggcccgccctccctggccgtcgcccccgagccctgcccccagcccctccggagcccctccctggacaacccgacccccttccccaacctggggcccagcgagaacccgctcaagcgcctgctggtgcccggcgaggagtgggagttcgaggtgaccgccttctaccgggggcgccaggtcttccagcagacgatctcctgccccgagggcctccggctggtgggcagcgaggtgggggaccgcaccctgcccggctggccggtcaccctccccgaccccgggatgtccctgaccgaccggggcgtgatgagctacgtgcgccacgtcctgtcctgcctcgggggcggcctggccctgtggcgggccgggcagtggctctgggcccagcgcctgggccactgccacacgtactgggccgtgagcgaggagctgctcccgaactccgggcacggccccgacggggaggtgcccaaggacaaggagggcggcgtcttcgacctggggcccttcatcgtggacctgatcaccttcaccgagggcagcgggcggagcccgcgctacgcgctctggttctgcgtgggcgagtcctggccccaggaccagccctggaccaagcgcctggtcatggtgaaggtggtccccacgtgcctgcgggccctcgtggagatggcccgcgtcgggggcgccagctccctggagaacaccgtggacctgcacatcagcaactcccacccgctcagcctgacctccgaccagtacaaggcctacctgcaggacctcgtggagggcatggacttccaggggcccggcgagagctga

SEQ ID NO: 8818 - RNA, 1284 nt, synthetic construct
  misc_feature 1..1284: note = derived and/or modified sequence opt2 fromIRF3__Homo_sapiens__AAH71721
  source 1..1284: mol_type = other RNA
atgggcacccccaagccccgcatcctcccctggctcgtctcccagctcgacctcggccagctcgagggcgtcgcctgggtcaacaagtcccgcacccgcttccgcatcccctggaagcacggcctccgccaggacgcccagcaggaggacttcggcatcttccaggcctgggccgaggccaccggcgcctacgtccccggccgcgacaagcccgacctccccacctggaagcgcaacttccgctccgccctcaaccgcaaggagggcctccgcctcgccgaggaccgctccaaggacccccacgacccccacaagatctacgagttcgtcaactccggcgtcggcgacttctcccagcccgacacctcccccgacaccaacggcggcggctccacctccgacacccaggaggacatcctcgacgagctcctcggcaacatggtcctcgcccccctccccgaccccggccccccctccctcgccgtcgcccccgagccctgcccccagcccctccgctccccctccctcgacaaccccacccccttccccaacctcggcccctccgagaaccccctcaagcgcctcctcgtccccggcgaggagtgggagttcgaggtcaccgccttctaccgcggccgccaggtcttccagcagaccatctcctgccccgagggcctccgcctcgtcggctccgaggtcggcgaccgcaccctccccggctggcccgtcaccctccccgaccccggcatgtccctcaccgaccgcggcgtcatgtcctacgtccgccacgtcctctcctgcctcggcggcggcctcgccctctggcgcgccggccagtggctctgggcccagcgcctcggccactgccacacctactgggccgtctccgaggagctcctccccaactccggccacggccccgacggcgaggtccccaaggacaaggagggcggcgtcttcgacctcggccccttcatcgtcgacctcatcaccttcaccgagggctccggccgctccccccgctacgccctctggttctgcgtcggcgagtcctggccccaggaccagccctggaccaagcgcctcgtcatggtcaaggtcgtccccacctgcctccgcgccctcgtcgagatggcccgcgtcggcggcgcctcctccctcgagaacaccgtcgacctccacatctccaactcccaccccctctccctcacctccgaccagtacaaggcctacctccaggacctcgtcgagggcatggacttccagggccccggcgagtcctga

SEQ ID NO: 8819 - RNA, 1284 nt, synthetic construct
  misc_feature 1..1284: note = derived and/or modified sequence opt3 fromIRF3__Homo_sapiens__AAH71721
  source 1..1284: mol_type = other RNA
atgggcacccccaagcctagaatcctgccatggctcgtgagccagcttgacctggggcaattggagggagtcgcctgggttaacaaatccaggacacggttccgcattccgtggaagcacggtttacgacaggatgctcagcaggaagactttggcatattccaagcatgggccgaggcgactggggcttacgtgcccggacgtgataaacctgacctgccaacgtggaagagaaattttaggtctgccctaaaccggaaagaaggcctccgcctggcagaggatagatcaaaggacccccatgatcctcacaagatctatgagttcgtaaatagtggtgtgggggactttagccagccagatacctcccccgacacaaacggaggcggctctacttcggatacccaggaagacattcttgatgagctgttggggaatatggtcctcgcccctctgccagacccgggacccccttcactggctgtggcaccagaaccctgccctcagccactcaggagccccagtttagacaacccgacacctttccccaatctgggtccatccgagaaccctcttaaacggttgctggttcccggcgaagagtgggagtttgaagtgaccgccttctaccgcgggcgacaagtctttcagcagactatctcttgtccagagggactaagactcgtgggcagcgaagtaggtgataggacactgcccgggtggcctgttacccttccagacccgggaatgtccctgacggatcggggcgtgatgtcatatgtccgtcatgtgttgagttgcctcggcgggggactggctttatggcgcgccggtcagtggctgtgggcgcaaagactcggccactgtcatacttactgggcagtgagcgaggaacttctgcccaattctgggcacggacctgacggcgaggtcccaaaggataaagagggtggggttttcgacttgggcccctttattgtggatctaatcaccttcacagaaggatccggcaggtcacctcggtatgccctgtggttttgcgtaggggagagctggccacaggaccagccctggactaagcgactcgtgatggtcaaagtggttccgacctgtctgcgcgctcttgtggaaatggccagagtcggaggtgcaagttctctggagaacacagtggatttgcacatatccaatagccatcctctctcgctgacctctgaccaatacaaggcttatttacaggatctggtagaaggcatggacttccaggggccaggagagtcctga

SEQ ID NO: 8820 - RNA, 1284 nt, synthetic construct
  misc_feature 1..1284: note = derived and/or modified sequence opt4 fromIRF3__Homo_sapiens__AAH71721
  source 1..1284: mol_type = other RNA
atgggcacccccaagcccagaatcctgccctggctggtgagccagctggacctgggccagctggagggcgtggcctgggtgaacaagagcagaaccagattcagaatcccctggaagcacggcctgagacaggacgcccagcaggaggacttcggcatcttccaggcctgggccgaggccaccggcgcctacgtgcccggcagagacaagcccgacctgcccacctggaagagaaacttcagaagcgccctgaacagaaaggagggcctgagactggccgaggacagaagcaaggacccccacgacccccacaagatctacgagttcgtgaacagcggcgtgggcgacttcagccagcccgacaccagccccgacaccaacggcggcggcagcaccagcgacacccaggaggacatcctggacgagctgctgggcaacatggtgctggcccccctgcccgaccccggcccccccagcctggccgtggcccccgagccctgcccccagcccctgagaagccccagcctggacaaccccacccccttccccaacctgggccccagcgagaaccccctgaagagactgctggtgcccggcgaggagtgggagttcgaggtgaccgccttctacagaggcagacaggtgttccagcagaccatcagctgccccgagggcctgagactggtgggcagcgaggtgggcgacagaaccctgcccggctggcccgtgaccctgcccgaccccggcatgagcctgaccgacagaggcgtgatgagctacgtgagacacgtgctgagctgcctgggcggcggcctggccctgtggagagccggccagtggctgtgggcccagagactgggccactgccacacctactgggccgtgagcgaggagctgctgcccaacagcggccacggccccgacggcgaggtgcccaaggacaaggagggcggcgtgttcgacctgggccccttcatcgtggacctgatcaccttcaccgagggcagcggcagaagccccagatacgccctgtggttctgcgtgggcgagagctggccccaggaccagccctggaccaagagactggtgatggtgaaggtggtgcccacctgcctgagagccctggtggagatggccagagtgggcggcgccagcagcctggagaacaccgtggacctgcacatcagcaacagccaccccctgagcctgaccagcgaccagtacaaggcctacctgcaggacctggtggagggcatggacttccagggccccggcgagagctga

SEQ ID NO: 8821 - RNA, 1284 nt, synthetic construct
  misc_feature 1..1284: note = derived and/or modified sequence opt5 fromIRF3__Homo_sapiens__AAH71721
  source 1..1284: mol_type = other RNA
atgggcacccccaagcctagaatcctgccgtggctcgtgagccagctggaccttgggcaactggagggagtcgcctgggttaacaaatcccggacacgcttccggattccctggaagcacggcctcagacaggatgctcagcaggaagactttgggatcttccaagcctgggcggaggctacgggagcctacgtgcctggccgcgataaacccgacctgcctacctggaagagaaattttcggtctgcccttaaccgcaaagaagggctgagactcgctgaggatcggagcaaggacccccatgatcctcacaagatttatgagttcgtcaattccggagtgggcgacttttctcagccggatacaagccccgacaccaacggcgggggatccacatctgatacccaggaagacatcctggatgagctgctcggcaatatggtgctggcccctcttcccgaccctgggcccccgagcctggctgttgcccctgaaccctgccctcagcccctccgctcccccagcctggacaaccctacaccgttccccaatcttggaccttctgagaaccccctgaaaagactcctggtgcctggcgaagagtgggagtttgaagtcaccgcgttctaccgggggcgccaagtgtttcagcagacgatttcctgtcccgagggactgagactcgttggcagcgaagtgggcgatcggaccctgccggggtggcctgtcacacttcccgaccctggaatgtctctgaccgatcgcggcgtgatgtcctatgtgagacatgtcctcagctgccttgggggaggcctggccctgtggcgggctgggcagtggctctgggcccaaagactgggacactgtcatacatactgggctgtttctgaggaactgctccccaattccggccacggccctgacggggaggtgcccaaggataaagagggaggcgtgttcgacctggggccgtttatcgtcgatcttatcaccttcacggaaggaagcggccgctcccctcggtatgccctgtggttttgcgtgggggagtcttggccccaggaccagccctggacaaagagactcgttatggtgaaagtcgtgcctacctgtctgcgcgcgcttgttgaaatggcccgggtgggcggagctagctccctggagaacacagtcgatctccacattagcaattctcatccgctgtccctgaccagcgaccaatacaaggcctatctccaggatctggtggaaggcatggacttccaggggcccggagagtcttga

SEQ ID NO: 8822 - protein, 452 aa, synthetic construct
  REGION 1..452: note = IRF3__Homo_sapiens__Q96GL3
MGTPKPRILPWLVSQLDLGQLEGVAWVNKSRTRFRIPWKHGLRQDAQQEDFGIFQAWAEATGAYVPGRDKPDLPTWKRNFRSALNRKEGLRLAEDRSKDPHDPHKIYEFVNSGVGDFSQPDTSPDTNGGGSTSDTQEDILDELLGNMVLAPLPDPGPPSLAVAPEPCPQPLRSPSLDNPTPFPNLGPSENPLKRLLVPGEEWEFEVTAFYRGRQVFQQTISCPEGLRLVGSEVGDRTLPGWPVTLPDPGMSLTDRGVMSYVRHVLSCLGGGLALWRAGQWLWAQRLGHCHTYWAVSEELLPNSGHGPDGEVPKDKEGGVFDLGPFIVGSWAPRSDYLHGRKRTLTTLCPLVLCGGVMAPGPAVDQEARDGQGCAHVPQGLGRNGPGRGCLLPGEYCGPAHFQQPPTLPHLRPVQGLPAGLGGGHGFPGPWGDLSPRSSWCASNPPVPHHLNQ

SEQ ID NO: 8823 - RNA, 1359 nt, synthetic construct
  misc_feature 1..1359: note = IRF3__Homo_sapiens__AAH09395
  source 1..1359: mol_type = other RNA
atgggaaccccaaagccacggatcctgccctggctggtgtcgcagctggacctggggcaactggagggcgtggcctgggtgaacaagagccgcacgcgcttccgcatcccttggaagcacggcctacggcaggatgcacagcaggaggatttcggaatcttccaggcctgggccgaggccactggtgcatatgttcccgggagggataagccagacctgccaacctggaagaggaatttccgctctgccctcaaccgcaaagaagggttgcgtttagcagaggaccggagcaaggaccctcacgacccacataaaatctacgagtttgtgaactcaggagttggggacttttcccagccagacacctctccggacaccaatggtggaggcagtacttctgatacccaggaagacattctggatgagttactgggtaacatggtgttggccccactcccagatccgggacccccaagcctggctgtagcccctgagccctgccctcagcccctgcggagccccagcttggacaatcccactcccttcccaaacctggggccctctgagaacccactgaagcggctgttggtgccgggggaagagtgggagttcgaggtgacagccttctaccggggccgccaagtcttccagcagaccatctcctgcccggagggcctgcggctggtggggtccgaagtgggagacaggacgctgcctggatggccagtcacactgccagaccctggcatgtccctgacagacaggggagtgatgagctacgtgaggcatgtgctgagctgcctgggtgggggactggctctctggcgggccgggcagtggctctgggcccagcggctggggcactgccacacatactgggcagtgagcgaggagctgctccccaacagcgggcatgggcctgatggcgaggtccccaaggacaaggaaggaggcgtgtttgacctggggcccttcattgtaggctcctgggcccccagatctgattaccttcacggaaggaagcggacgctcaccacgctatgccctctggttctgtgtgggggagtcatggccccaggaccagccgtggaccaagaggctcgtgatggtcaaggttgtgcccacgtgcctcagggccttggtagaaatggcccgggtagggggtgcctcctccctggagaatactgtggacctgcacatttccaacagccacccactctccctcacctccgaccagtacaaggcctacctgcaggacttggtggagggcatggatttccagggccctggggagacctgagccctcgctcctcatggtgtgcctccaacccccctgttccccaccacctcaaccaataa

SEQ ID NO: 8824 - RNA, 1359 nt, synthetic construct
  misc_feature 1..1359: note = derived and/or modified sequence opt1 fromIRF3__Homo_sapiens__AAH09395
  source 1..1359: mol_type = other RNA
atgggcacccccaagccgcgcatcctgccctggctcgtgagccagctggacctggggcagctcgagggcgtcgcctgggtgaacaagtcccggacccgcttccggatcccctggaagcacgggctgcgccaggacgcccagcaggaggacttcggcatcttccaggcgtgggccgaggccacgggggcctacgtgcccggccgggacaagccggacctgcccacctggaagcgcaacttccggagcgccctcaaccgcaaggagggcctgcggctggcggaggaccgctccaaggacccccacgacccccacaagatctacgagttcgtcaacagcggggtgggcgacttctcccagccggacaccagccccgacaccaacgggggcgggtccacgagcgacacccaggaggacatcctcgacgagctgctgggcaacatggtgctcgcgcccctgcccgacccgggcccgccctccctggccgtcgcccccgagccctgcccccagcccctccggagcccctccctggacaacccgacccccttccccaacctggggcccagcgagaacccgctcaagcgcctgctggtgcccggcgaggagtgggagttcgaggtgaccgccttctaccgggggcgccaggtcttccagcagacgatctcctgccccgagggcctccggctggtgggcagcgaggtgggggaccgcaccctgcccggctggccggtcaccctccccgaccccgggatgtccctgaccgaccggggcgtgatgagctacgtgcgccacgtcctgtcctgcctcgggggcggcctggccctgtggcgggccgggcagtggctctgggcccagcgcctgggccactgccacacgtactgggccgtgagcgaggagctgctcccgaactccgggcacggccccgacggggaggtgcccaaggacaaggagggcggcgtcttcgacctggggcccttcatcgtgggcagctgggcgccgcggagcgactacctgcacgggcgcaagcgcaccctcaccaccctgtgccccctggtgctctgcggcggggtcatggcccccggccccgccgtggaccaggaggcccgggacggccaggggtgcgcccacgtgccgcagggcctggggcgcaacggccccggccgggggtgcctgctccccggcgagtactgcgggcccgcgcacttccagcagccgcccacgctgccccacctccgccccgtccagggcctgccggccgggctgggcggcgggcacggcttccccgggccctggggcgacctgagcccccggtcctcctggtgcgccagcaacccgcccgtgccccaccacctcaaccagtga

SEQ ID NO: 8825 - RNA, 1359 nt, synthetic construct
  misc_feature 1..1359: note = derived and/or modified sequence opt2 fromIRF3__Homo_sapiens__AAH09395
  source 1..1359: mol_type = other RNA
atgggcacccccaagccccgcatcctcccctggctcgtctcccagctcgacctcggccagctcgagggcgtcgcctgggtcaacaagtcccgcacccgcttccgcatcccctggaagcacggcctccgccaggacgcccagcaggaggacttcggcatcttccaggcctgggccgaggccaccggcgcctacgtccccggccgcgacaagcccgacctccccacctggaagcgcaacttccgctccgccctcaaccgcaaggagggcctccgcctcgccgaggaccgctccaaggacccccacgacccccacaagatctacgagttcgtcaactccggcgtcggcgacttctcccagcccgacacctcccccgacaccaacggcggcggctccacctccgacacccaggaggacatcctcgacgagctcctcggcaacatggtcctcgcccccctccccgaccccggccccccctccctcgccgtcgcccccgagccctgcccccagcccctccgctccccctccctcgacaaccccacccccttccccaacctcggcccctccgagaaccccctcaagcgcctcctcgtccccggcgaggagtgggagttcgaggtcaccgccttctaccgcggccgccaggtcttccagcagaccatctcctgccccgagggcctccgcctcgtcggctccgaggtcggcgaccgcaccctccccggctggcccgtcaccctccccgaccccggcatgtccctcaccgaccgcggcgtcatgtcctacgtccgccacgtcctctcctgcctcggcggcggcctcgccctctggcgcgccggccagtggctctgggcccagcgcctcggccactgccacacctactgggccgtctccgaggagctcctccccaactccggccacggccccgacggcgaggtccccaaggacaaggagggcggcgtcttcgacctcggccccttcatcgtcggctcctgggccccccgctccgactacctccacggccgcaagcgcaccctcaccaccctctgccccctcgtcctctgcggcggcgtcatggcccccggccccgccgtcgaccaggaggcccgcgacggccagggctgcgcccacgtcccccagggcctcggccgcaacggccccggccgcggctgcctcctccccggcgagtactgcggccccgcccacttccagcagccccccaccctcccccacctccgccccgtccagggcctccccgccggcctcggcggcggccacggcttccccggcccctggggcgacctctccccccgctcctcctggtgcgcctccaacccccccgtcccccaccacctcaaccagtga

SEQ ID NO: 8826 - RNA, 1359 nt, synthetic construct
  misc_feature 1..1359: note = derived and/or modified sequence opt3 fromIRF3__Homo_sapiens__AAH09395
  source 1..1359: mol_type = other RNA
atgggcacccccaagcctagaatcctgccatggctcgtgagccagcttgacctggggcaattggagggagtcgcctgggttaacaaatccaggacacggttccgcattccgtggaagcacggtttacgacaggatgctcagcaggaagactttggcatattccaagcatgggccgaggcgactggggcttacgtgcccggacgtgataaacctgacctgccaacgtggaagagaaattttaggtctgccctaaaccggaaagaaggcctccgcctggcagaggatagatcaaaggacccccatgatcctcacaagatctatgagttcgtaaatagtggtgtgggggactttagccagccagatacctcccccgacacaaacggaggcggctctacttcggatacccaggaagacattcttgatgagctgttggggaatatggtcctcgcccctctgccagacccgggacccccttcactggctgtggcaccagaaccctgccctcagccactcaggagccccagtttagacaacccgacacctttccccaatctgggtccatccgagaaccctcttaaacggttgctggttcccggcgaagagtgggagtttgaagtgaccgccttctaccgcgggcgacaagtctttcagcagactatctcttgtccagagggactaagactcgtgggcagcgaagtaggtgataggacactgcccgggtggcctgttacccttccagacccgggaatgtccctgacggatcggggcgtgatgtcatatgtccgtcatgtgttgagttgcctcggcgggggactggctttatggcgcgccggtcagtggctgtgggcgcaaagactcggccactgtcatacttactgggcagtgagcgaggaacttctgcccaattctgggcacggacctgacggcgaggtcccaaaggataaagagggtggggttttcgacttgggcccctttattgtgggatcctgggcccctaggtcagattatctacacggccggaagcgaaccctgacaactctctgcccactggtactttgtgggggagtgatggctcccggtccggccgtcgaccaggaagcacgcgatggccaggggtgcgctcatgtgcctcaaggactgggcagaaacggtccagggaggggctgtttgctccccggagagtactgcggccctgcccacttccagcagcccccaaccctgcctcatttacggcccgttcaggggctgccagcgggactaggtggcgggcacggatttccgggcccttggggtgacctcagcccccgcagttcttggtgtgcctccaatccacccgtgcctcaccatctgaaccaatga

SEQ ID NO: 8827 - RNA, 1359 nt, synthetic construct
  misc_feature 1..1359: note = derived and/or modified sequence opt4 fromIRF3__Homo_sapiens__AAH09395
  source 1..1359: mol_type = other RNA
atgggcacccccaagcccagaatcctgccctggctggtgagccagctggacctgggccagctggagggcgtggcctgggtgaacaagagcagaaccagattcagaatcccctggaagcacggcctgagacaggacgcccagcaggaggacttcggcatcttccaggcctgggccgaggccaccggcgcctacgtgcccggcagagacaagcccgacctgcccacctggaagagaaacttcagaagcgccctgaacagaaaggagggcctgagactggccgaggacagaagcaaggacccccacgacccccacaagatctacgagttcgtgaacagcggcgtgggcgacttcagccagcccgacaccagccccgacaccaacggcggcggcagcaccagcgacacccaggaggacatcctggacgagctgctgggcaacatggtgctggcccccctgcccgaccccggcccccccagcctggccgtggcccccgagccctgcccccagcccctgagaagccccagcctggacaaccccacccccttccccaacctgggccccagcgagaaccccctgaagagactgctggtgcccggcgaggagtgggagttcgaggtgaccgccttctacagaggcagacaggtgttccagcagaccatcagctgccccgagggcctgagactggtgggcagcgaggtgggcgacagaaccctgcccggctggcccgtgaccctgcccgaccccggcatgagcctgaccgacagaggcgtgatgagctacgtgagacacgtgctgagctgcctgggcggcggcctggccctgtggagagccggccagtggctgtgggcccagagactgggccactgccacacctactgggccgtgagcgaggagctgctgcccaacagcggccacggccccgacggcgaggtgcccaaggacaaggagggcggcgtgttcgacctgggccccttcatcgtgggcagctgggcccccagaagcgactacctgcacggcagaaagagaaccctgaccaccctgtgccccctggtgctgtgcggcggcgtgatggcccccggccccgccgtggaccaggaggccagagacggccagggctgcgcccacgtgccccagggcctgggcagaaacggccccggcagaggctgcctgctgcccggcgagtactgcggccccgcccacttccagcagccccccaccctgccccacctgagacccgtgcagggcctgcccgccggcctgggcggcggccacggcttccccggcccctggggcgacctgagccccagaagcagctggtgcgccagcaacccccccgtgccccaccacctgaaccagtga

SEQ ID NO: 8828 - RNA, 1359 nt, synthetic construct
  misc_feature 1..1359: note = derived and/or modified sequence opt5 fromIRF3__Homo_sapiens__AAH09395
  source 1..1359: mol_type = other RNA
atgggcacccccaagcctagaatcctgccgtggctcgtgagccagctggaccttgggcaactggagggagtcgcctgggttaacaaatcccggacacgcttccggattccctggaagcacggcctcagacaggatgctcagcaggaagactttgggatcttccaagcctgggcggaggctacgggagcctacgtgcctggccgcgataaacccgacctgcctacctggaagagaaattttcggtctgcccttaaccgcaaagaagggctgagactcgctgaggatcggagcaaggacccccatgatcctcacaagatttatgagttcgtcaattccggagtgggcgacttttctcagccggatacaagccccgacaccaacggcgggggatccacatctgatacccaggaagacatcctggatgagctgctcggcaatatggtgctggcccctcttcccgaccctgggcccccgagcctggctgttgcccctgaaccctgccctcagcccctccgctcccccagcctggacaaccctacaccgttccccaatcttggaccttctgagaaccccctgaaaagactcctggtgcctggcgaagagtgggagtttgaagtcaccgcgttctaccgggggcgccaagtgtttcagcagacgatttcctgtcccgagggactgagactcgttggcagcgaagtgggcgatcggaccctgccggggtggcctgtcacacttcccgaccctggaatgtctctgaccgatcgcggcgtgatgtcctatgtgagacatgtcctcagctgccttgggggaggcctggccctgtggcgggctgggcagtggctctgggcccaaagactgggacactgtcatacatactgggctgtttctgaggaactgctccccaattccggccacggccctgacggggaggtgcccaaggataaagagggaggcgtgttcgacctggggccgtttatcgtcggaagctgggcccctcgctccgattatcttcacggccggaagagaaccctgacgacactctgccccctggtgctttgtgggggcgttatggcgcccggacctgccgtggaccaggaagctcgcgatggccaggggtgcgcccatgtcccgcaaggactgggccggaacgggcccggaagaggctgtctcctgcctggggagtactgcggccccgctcacttccagcagcctcccaccctgcctcatctccgccccgtgcagggactgccggccggccttgggggaggccacgggtttcctggaccctggggcgacctgtctcctcggagctcctggtgtgccagcaatcccccggttcctcaccatctcaaccaatga

SEQ ID NO: 8829 - protein, 503 aa, synthetic construct
  REGION 1..503: note = IRF-7__Homo_sapiens__Q92985
MALAPERAAPRVLFGEWLLGEISSGCYEGLQWLDEARTCFRVPWKHFARKDLSEADARIFKAWAVARGRWPPSSRGGGPPPEAETAERAGWKTNFRCALRSTRRFVMLRDNSGDPADPHKVYALSRELCWREGPGTDQTEAEAPAAVPPPQGGPPGPFLAHTHAGLQAPGPLPAPAGDKGDLLLQAVQQSCLADHLLTASWGADPVPTKAPGEGQEGLPLTGACAGGPGLPAGELYGWAVETTPSPGPQPAALTTGEAAAPESPHQAEPYLSPSPSACTAVQEPSPGALDVTIMYKGRTVLQKVVGHPSCTFLYGPPDPAVRATDPQQVAFPSPAELPDQKQLRYTEELLRHVAPGLHLELRGPQLWARRMGKCKVYWEVGGPPGSASPSTPACLLPRNCDTPIFDFRVFFQELVEFRARQRRGSPRYTIYLGFGQDLSAGRPKEKSLVLVKLEPWLCRVHLEGTQREGVSSLDSSSLSLCLSSANSLYDDIECFLMELEQPA

SEQ ID NO: 8830 - RNA, 1512 nt, synthetic construct
  misc_feature 1..1512: note = IRF-7__Homo_sapiens__AAB80686
  source 1..1512: mol_type = other RNA
atggccttggctcctgagagggcagccccacgcgtgctgttcggagagtggctccttggagagatcagcagcggctgctatgaggggctgcagtggctggacgaggcccgcacctgtttccgcgtgccctggaagcacttcgcgcgcaaggacctgagcgaggccgacgcgcgcatcttcaaggcctgggctgtggcccgcggcaggtggccgcctagcagcaggggaggtggcccgccccccgaggctgagactgcggagcgcgccggctggaaaaccaacttccgctgcgcactgcgcagcacgcgtcgcttcgtgatgctgcgggataactcgggggacccggccgacccgcacaaggtgtacgcgctcagccgggagctgtgctggcgagaaggcccaggcacggaccagactgaggcagaggcccccgcagctgtcccaccaccacagggtgggcccccagggccattcttggcacacacacatgctggactccaagccccaggccccctccctgccccagctggtgacaagggggacctcctgctccaggcagtgcaacagagctgcctggcagaccatctgctgacagcgtcatggggggcagatccagtcccaaccaaggctcctggagagggacaagaagggcttcccctgactggggcctgtgctggaggcccagggctccctgctggggagctgtacgggtgggcagtagagacgacccccagccccgggccccagcccgcggcactaacgacaggcgaggccgcggccccagagtccccgcaccaggcagagccgtacctgtcaccctccccaagcgcctgcaccgcggtgcaagagcccagcccaggggcgctggacgtgaccatcatgtacaagggccgcacggtgctgcagaaggtggtgggacacccgagctgcacgttcctatacggccccccagacccagctgtccgggccacagacccccagcaggtagcattccccagccctgccgagctcccggaccagaagcagctgcgctacacggaggaactgctgcggcacgtggcccctgggttgcacctggagcttcgggggccacagctgtgggcccggcgcatgggcaagtgcaaggtgtactgggaggtgggcggacccccaggctccgccagcccctccaccccagcctgcctgctgcctcggaactgtgacacccccatcttcgacttcagagtcttcttccaagagctggtggaattccgggcacggcagcgccgtggctccccacgctataccatctacctgggcttcgggcaggacctgtcagctgggaggcccaaggagaagagcctggtcctggtgaagctggaaccctggctgtgccgagtgcacctagagggcacgcagcgtgagggtgtgtcttccctggatagcagcagcctcagcctctgcctgtccagcgccaacagcctctatgacgacatcgagtgcttccttatggagctggagcagcccgcctag

SEQ ID NO: 8831 - RNA, 1512 nt, synthetic construct
  misc_feature 1..1512: note = derived and/or modified sequence opt1 fromIRF-7__Homo_sapiens__AAB80686
  source 1..1512: mol_type = other RNA
atggccctggcccccgagcgcgcggccccgcgggtcctcttcggcgagtggctgctgggggagatcagctccggctgctacgaggggctccagtggctggacgaggcccggacctgcttccgcgtgccctggaagcacttcgcccgcaaggacctgagcgaggccgacgcgcggatcttcaaggcctgggccgtggcccgcggccggtggccgccctccagccgcgggggcgggcccccgcccgaggcggagaccgccgagcgggccggctggaagacgaacttccgctgcgccctccggtccacccgccggttcgtgatgctgcgcgacaacagcggcgaccccgccgacccccacaaggtctacgcgctgtcccgggagctctgctggcgcgaggggcccggcaccgaccagaccgaggccgaggcccccgccgccgtgcccccgccccagggcgggccgcccggccccttcctggcgcacacgcacgccgggctgcaggcccccggccccctccccgccccggccggggacaagggcgacctgctgctccaggcggtgcagcagagctgcctggccgaccacctcctgaccgcctcctggggcgccgaccccgtccccaccaaggcccccggggagggccaggaggggctgccgctgaccggcgcgtgcgccgggggccccggcctccccgccggggagctgtacggctgggccgtggagacgacccccagcccggggccccagcccgcggccctgaccaccggcgaggccgccgccccggagagcccccaccaggcggagccctacctcagcccctccccgagcgcctgcacggccgtgcaggagccctcccccggggccctggacgtcaccatcatgtacaagggccggaccgtgctgcagaaggtggtcggccaccccagctgcaccttcctctacgggccgcccgaccccgccgtgcgcgcgacggacccccagcaggtcgccttcccgtcccccgccgagctgcccgaccagaagcagctgcggtacaccgaggagctcctgcgccacgtggcccccggcctgcacctcgagctgcgggggccgcagctgtgggcccgccgcatgggcaagtgcaaggtgtactgggaggtcgggggcccgcccggcagcgcgtcccccagcacccccgcctgcctcctgccccggaactgcgacacccccatcttcgacttccgcgtgttcttccaggagctggtggagttccgggcccgccagcggcgcgggagcccccggtacacgatctacctcggcttcgggcaggacctgtccgccggccgcccgaaggagaagtccctggtgctcgtcaagctggagccctggctgtgccgggtgcacctcgagggcacccagcgcgagggggtgtccagcctggactccagctccctgagcctctgcctgtccagcgcgaactccctgtacgacgacatcgagtgcttcctgatggagctcgagcagcccgcctga

SEQ ID NO: 8832 - RNA, 1512 nt, synthetic construct
  misc_feature 1..1512: note = derived and/or modified sequence opt2 fromIRF-7__Homo_sapiens__AAB80686
  source 1..1512: mol_type = other RNA
atggccctcgcccccgagcgcgccgccccccgcgtcctcttcggcgagtggctcctcggcgagatctcctccggctgctacgagggcctccagtggctcgacgaggcccgcacctgcttccgcgtcccctggaagcacttcgcccgcaaggacctctccgaggccgacgcccgcatcttcaaggcctgggccgtcgcccgcggccgctggcccccctcctcccgcggcggcggccccccccccgaggccgagaccgccgagcgcgccggctggaagaccaacttccgctgcgccctccgctccacccgccgcttcgtcatgctccgcgacaactccggcgaccccgccgacccccacaaggtctacgccctctcccgcgagctctgctggcgcgagggccccggcaccgaccagaccgaggccgaggcccccgccgccgtcccccccccccagggcggcccccccggccccttcctcgcccacacccacgccggcctccaggcccccggccccctccccgcccccgccggcgacaagggcgacctcctcctccaggccgtccagcagtcctgcctcgccgaccacctcctcaccgcctcctggggcgccgaccccgtccccaccaaggcccccggcgagggccaggagggcctccccctcaccggcgcctgcgccggcggccccggcctccccgccggcgagctctacggctgggccgtcgagaccaccccctcccccggcccccagcccgccgccctcaccaccggcgaggccgccgcccccgagtccccccaccaggccgagccctacctctccccctccccctccgcctgcaccgccgtccaggagccctcccccggcgccctcgacgtcaccatcatgtacaagggccgcaccgtcctccagaaggtcgtcggccacccctcctgcaccttcctctacggcccccccgaccccgccgtccgcgccaccgacccccagcaggtcgccttcccctcccccgccgagctccccgaccagaagcagctccgctacaccgaggagctcctccgccacgtcgcccccggcctccacctcgagctccgcggcccccagctctgggcccgccgcatgggcaagtgcaaggtctactgggaggtcggcggcccccccggctccgcctccccctccacccccgcctgcctcctcccccgcaactgcgacacccccatcttcgacttccgcgtcttcttccaggagctcgtcgagttccgcgcccgccagcgccgcggctccccccgctacaccatctacctcggcttcggccaggacctctccgccggccgccccaaggagaagtccctcgtcctcgtcaagctcgagccctggctctgccgcgtccacctcgagggcacccagcgcgagggcgtctcctccctcgactcctcctccctctccctctgcctctcctccgccaactccctctacgacgacatcgagtgcttcctcatggagctcgagcagcccgcctga

SEQ ID NO: 8833 - RNA, 1512 nt, synthetic construct
  misc_feature 1..1512: note = derived and/or modified sequence opt3 fromIRF-7__Homo_sapiens__AAB80686
  source 1..1512: mol_type = other RNA
atggccctggctcccgagagagcagcccctagggttctcttcggcgaatggcttctgggggagatcagctccggatgctacgaaggtttgcagtggttagacgaggcgcggacctgttttcgcgtcccatggaagcacttcgctcgaaaagatctgtctgaagccgacgcacgtatttttaaggcctgggctgttgcaagagggaggtggccgccctcaagtcggggcggaggccctccacccgaggccgagacagctgaacgcgccggttggaaaactaacttcagatgcgcgctaaggagcacgcggcgctttgtgatgctccgagataattccggggaccctgcagatccacataaggtatatgccctgtctagagagctttgttggagggaaggacccggcaccgaccaaacagaggctgaggcccctgcagctgtgccaccgccccagggcgggcctccaggacccttcctggcccacactcatgcgggtttgcaggcccctggcccactccccgcaccggctggggataaaggagacctgctgctccaggccgtccaacagtcgtgcttagctgatcatctgcttaccgcctcatggggcgcagaccctgtgcccacaaaggccccaggtgaagggcaggagggattgcctctgaccggcgcttgtgcgggcgggcccggactaccagccggtgaactctacggctgggcagttgagactacacccagccctgggccacagccggctgccctgaccacgggagaagcagccgctcccgagagtcctcaccaagccgagccatatctttccccctctcctagcgcatgcactgcggtgcaggaaccatcccccggcgctctggatgtcaccataatgtacaagggtcggacagtgttgcagaaagtagttgggcacccgtcatgtacttttctctatggccctccagaccccgccgtgcgtgcaaccgatcctcagcaagtcgccttccccagtccagctgagctgcctgaccagaagcagttacgctacacagaggaactgctcagacacgtggcccccggacttcatctggaattgaggggcccacaactatgggcacggcgaatggggaaatgcaaggtgtattgggaggtcggaggtccgcctggcagcgcttctccctccaccccagcctgtctgctcccccgcaactgcgacacgcctatctttgatttcagagtgtttttccaggagctggtggaatttagggcgcggcagcgcagagggtcaccaaggtacactatttaccttggattcggccaggacctgagcgccggtcgtcccaaagagaagagtttggtactcgtgaagctggaaccttggttatgtcgggtccacctggaggggacacaacgagaaggcgtgtcttccctagatagctcgtctctctccctgtgcctttcaagtgctaatagcttgtatgacgatatcgagtgcttcctgatggagctcgaacagccggcatga

SEQ ID NO: 8834 - RNA, 1512 nt, synthetic construct
  misc_feature 1..1512: note = derived and/or modified sequence opt4 fromIRF-7__Homo_sapiens__AAB80686
  source 1..1512: mol_type = other RNA
atggccctggcccccgagagagccgcccccagagtgctgttcggcgagtggctgctgggcgagatcagcagcggctgctacgagggcctgcagtggctggacgaggccagaacctgcttcagagtgccctggaagcacttcgccagaaaggacctgagcgaggccgacgccagaatcttcaaggcctgggccgtggccagaggcagatggccccccagcagcagaggcggcggccccccccccgaggccgagaccgccgagagagccggctggaagaccaacttcagatgcgccctgagaagcaccagaagattcgtgatgctgagagacaacagcggcgaccccgccgacccccacaaggtgtacgccctgagcagagagctgtgctggagagagggccccggcaccgaccagaccgaggccgaggcccccgccgccgtgccccccccccagggcggcccccccggccccttcctggcccacacccacgccggcctgcaggcccccggccccctgcccgcccccgccggcgacaagggcgacctgctgctgcaggccgtgcagcagagctgcctggccgaccacctgctgaccgccagctggggcgccgaccccgtgcccaccaaggcccccggcgagggccaggagggcctgcccctgaccggcgcctgcgccggcggccccggcctgcccgccggcgagctgtacggctgggccgtggagaccacccccagccccggcccccagcccgccgccctgaccaccggcgaggccgccgcccccgagagcccccaccaggccgagccctacctgagccccagccccagcgcctgcaccgccgtgcaggagcccagccccggcgccctggacgtgaccatcatgtacaagggcagaaccgtgctgcagaaggtggtgggccaccccagctgcaccttcctgtacggcccccccgaccccgccgtgagagccaccgacccccagcaggtggccttccccagccccgccgagctgcccgaccagaagcagctgagatacaccgaggagctgctgagacacgtggcccccggcctgcacctggagctgagaggcccccagctgtgggccagaagaatgggcaagtgcaaggtgtactgggaggtgggcggcccccccggcagcgccagccccagcacccccgcctgcctgctgcccagaaactgcgacacccccatcttcgacttcagagtgttcttccaggagctggtggagttcagagccagacagagaagaggcagccccagatacaccatctacctgggcttcggccaggacctgagcgccggcagacccaaggagaagagcctggtgctggtgaagctggagccctggctgtgcagagtgcacctggagggcacccagagagagggcgtgagcagcctggacagcagcagcctgagcctgtgcctgagcagcgccaacagcctgtacgacgacatcgagtgcttcctgatggagctggagcagcccgcctga

SEQ ID NO: 8835 - RNA, 1512 nt, synthetic construct
  misc_feature 1..1512: note = derived and/or modified sequence opt5 fromIRF-7__Homo_sapiens__AAB80686
  source 1..1512: mol_type = other RNA
atggccctggctcccgagagagccgcgcctcgggtcctcttcggcgaatggctgcttggggagatcagctccggatgctacgaaggcctgcagtggctcgacgaggctcgcacctgttttagagtcccgtggaagcacttcgcccggaaagatctgtctgaagccgacgctcgcatttttaaggcctgggctgttgccagagggcggtggccccctagctcccgcggaggcgggccccctcccgaggcggagacagccgaaagagctggatggaaaacgaacttccggtgcgcccttcgctctaccagacggtttgtgatgctgcgcgataatagcggcgaccctgctgatccgcataaggtgtatgccctctccagagagctgtgttggcgggaaggccccgggacagaccaaaccgaggcggaggcccctgctgccgtgccccctccccagggaggcccgcctgggcccttcctggctcacacacatgccggactccaggcccctggccccctgcccgctcctgcgggggataaaggagaccttctgctccaggccgtgcaacagtcttgcctggctgatcaccttctgaccgccagctggggcgccgacccggttcccacaaaggctcctggcgaagggcaggagggactccccctgaccggcgcctgtgctgggggacctggcctgcccgcgggggaactctacggatgggccgtggagacgaccccgtcccctggcccccagcctgccgctctgacaaccggcgaagccgctgcccccgagagccctcatcaagcggagccctatctttctccgtcccctagcgcctgcacagctgtccaggaaccctctcccggggccctggatgtgaccatcatgtacaagggacgcacggttctccagaaagtggtcggccacccttcctgtacatttctgtatgggccgcccgaccctgctgtgagagccaccgatccccagcaagtggcgttccctagccccgccgagcttcctgaccagaagcagctgcggtacacagaggagctcctgagacacgtcgctcccggactgcatctcgaactgcgcggcccgcaactttgggcccggagaatggggaaatgcaaggtttattgggaggtgggcggacctcccggctctgcttcccctagcacccccgcctgtctgctcccgcgcaactgcgacacccctatttttgatttccgggtgtttttccaggagctggtcgaatttagagcccgccagcggagagggtctccccgctacacaatctaccttggattcggccaggacctgtccgctgggcggcctaaagaaaagagcctcgtgctggttaagctggaaccctggctctgtagagtgcacctggagggaacgcaacgcgaaggcgtctccagccttgattcttccagcctgtctctctgcctgagctccgccaattctctgtatgacgatattgagtgcttccttatggagctcgaacagcccgcgtga

SEQ ID NO: 8836 - protein, 320 aa, synthetic construct
  REGION 1..320: note = JNK__Homo_sapiens__B4DU99
MISPDPRPSPGLARWAESYEAKCERRQEIRESRRCRPNVTTCRQVGKTLRIQQRELEEKGKAQHPQAREQGPSRRPGQVTVLKEPLSCARRISSPREQVTGTSSEVFPAQHPPPSGICRDLSDHLSSQAGGLPPQDTPIKKPPKHHRGTQTKAEGPTIKNDASQQTNYGVAVLDKEIIQLSDYLKEALQRELVLKQKMVILQDLLSTLIQASDSSWKGQLNEDKLKGKLRSLENQLYTCTQKYSPWGMKKVLLEMEDQKNSYEQKAKESLQKVLEEKMNAEQQLQSTQVWGCHIDMGLGTPGSLGNKGSQLHNSLEPSPL

SEQ ID NO: 8837 - RNA, 963 nt, synthetic construct
  misc_feature 1..963: note = JNK__Homo_sapiens__BAG62261
  source 1..963: mol_type = other RNA
atgatcagcccagaccccaggccctcccctggcttggcccggtgggctgagagctatgaggccaagtgtgagcgcaggcaagagatccgtgaaagccgccgctgccgtcccaatgtgaccacttgccgccaggtggggaagacgctgaggatccaacagagagagctagaggagaagggcaaagcgcagcatccccaggccagggagcaagggccctccaggcggccaggacaggtgactgtcctcaaggaacccttgtcttgtgccagaaggatttcttctcccagagagcaggtgacaggcaccagctctgaagtctttccagcccagcatcctcctccctcaggcatctgcagggatctgtctgaccacctctcctcacaggctgggggccttcctccacaggacactcccatcaagaagccacccaaacaccaccgtggtactcagacaaaggcagaaggaccaacaattaagaacgatgccagtcagcaaaccaattacggagttgcagttctggataaggaaatcatccagctttctgattacctcaaagaggccctacaaagggagctggtcctaaaacagaaaatggtgattctccaagacctactgtccactctgattcaggcctctgacagctcttggaagggacagcttaatgaagacaaactaaaggggaaactgagatccttagaaaaccagctatacacctgtacccagaaatactccccttggggaatgaaaaaagtactactggagatggaagaccagaaaaacagctatgagcagaaggccaaggagtcactgcagaaagtgctggaggagaaaatgaatgcagagcagcaactacagagcacacaggtatggggatgccacatagacatggggctggggactccaggcagcttggggaacaaggggagccagctgcacaactccctggagccctctcctctctga

SEQ ID NO: 8838 - RNA, 963 nt, synthetic construct
  misc_feature 1..963: note = derived and/or modified sequence opt1 fromJNK__Homo_sapiens__BAG62261
  source 1..963: mol_type = other RNA
atgatctcccccgacccccgcccctcccccggcctggcccggtgggccgagagctacgaggcgaagtgcgagcgccggcaggagatccgcgagtcccggcgctgccggcccaacgtgacgacctgccgccaggtcgggaagaccctccggatccagcagcgcgagctggaggagaagggcaaggcccagcacccgcaggcccgggagcaggggcccagccgccggcccggccaggtgaccgtgctgaaggagcccctctcctgcgcccgccggatcagctccccgcgcgagcaggtcaccgggaccagctccgaggtgttccccgcccagcacccgccgcccagcggcatctgccgggacctgtccgaccacctgagctcccaggcgggcgggctcccgccccaggacacgcccatcaagaagccgcccaagcaccaccgcggcacccagaccaaggccgaggggcccaccatcaagaacgacgccagccagcagacgaactacggcgtggccgtcctggacaaggagatcatccagctgtccgactacctcaaggaggcgctgcagcgggagctggtgctcaagcagaagatggtgatcctgcaggacctgctcagcaccctgatccaggcctccgacagctcctggaaggggcagctgaacgaggacaagctcaagggcaagctgcgcagcctggagaaccagctctacacgtgcacccagaagtacagcccctggggcatgaagaaggtcctgctggagatggaggaccagaagaactcctacgagcagaaggccaaggagagcctccagaaggtgctggaggagaagatgaacgccgagcagcagctgcagtccacccaggtgtgggggtgccacatcgacatgggcctcgggacccccggcagcctgggcaacaaggggtcccagctgcacaacagcctcgagcccagccccctgtga

SEQ ID NO: 8839 - RNA, 963 nt, synthetic construct
  misc_feature 1..963: note = derived and/or modified sequence opt2 fromJNK__Homo_sapiens__BAG62261
  source 1..963: mol_type = other RNA
atgatctcccccgacccccgcccctcccccggcctcgcccgctgggccgagtcctacgaggccaagtgcgagcgccgccaggagatccgcgagtcccgccgctgccgccccaacgtcaccacctgccgccaggtcggcaagaccctccgcatccagcagcgcgagctcgaggagaagggcaaggcccagcacccccaggcccgcgagcagggcccctcccgccgccccggccaggtcaccgtcctcaaggagcccctctcctgcgcccgccgcatctcctccccccgcgagcaggtcaccggcacctcctccgaggtcttccccgcccagcacccccccccctccggcatctgccgcgacctctccgaccacctctcctcccaggccggcggcctccccccccaggacacccccatcaagaagccccccaagcaccaccgcggcacccagaccaaggccgagggccccaccatcaagaacgacgcctcccagcagaccaactacggcgtcgccgtcctcgacaaggagatcatccagctctccgactacctcaaggaggccctccagcgcgagctcgtcctcaagcagaagatggtcatcctccaggacctcctctccaccctcatccaggcctccgactcctcctggaagggccagctcaacgaggacaagctcaagggcaagctccgctccctcgagaaccagctctacacctgcacccagaagtactccccctggggcatgaagaaggtcctcctcgagatggaggaccagaagaactcctacgagcagaaggccaaggagtccctccagaaggtcctcgaggagaagatgaacgccgagcagcagctccagtccacccaggtctggggctgccacatcgacatgggcctcggcacccccggctccctcggcaacaagggctcccagctccacaactccctcgagccctcccccctctga

SEQ ID NO: 8840 - RNA, 963 nt, synthetic construct
  misc_feature 1..963: note = derived and/or modified sequence opt3 fromJNK__Homo_sapiens__BAG62261
  source 1..963: mol_type = other RNA
atgatcagccccgaccctagaccatccccgggcctggccaggtgggctgagtcttacgaagcaaagtgcgagcggcgccaggaaattcgagagtcacgtagatgtaggcccaacgtgaccacatgccggcaagtcgggaaaactctccgcatacagcagagagaacttgaggagaagggaaaagcccagcaccctcaagcgagggaacagggtccaagtcggcgccccggccaggttacggtgctgaaggagcctttgagctgtgctcgaagaatctcctctccaagggaacaggtaaccgggacatcgtcagaggtgttccccgcccaacatcctccaccgagcggaatttgccgggatttaagtgaccacctgtcctctcaggcaggcggtctaccccctcaggatactccaatcaaaaagccccctaagcatcaccgtgggacccagacaaaagccgagggaccaaccattaagaatgacgctagccaacagactaactatggcgtcgcagtgctcgataaagaaatcatacagctgtccgactaccttaaggaggccctgcaacgcgaattggttctcaaacagaagatggtgatcctgcaggatctgctctcaacattaattcaggctagtgacagctcttggaagggccaactgaatgaggataaacttaaggggaaattgagatccctggaaaaccagctatatacctgtacgcagaagtactcaccctggggaatgaaaaaggtcctcctggagatggaggaccagaaaaatagctatgaacaaaaggccaaggagagtcttcagaaagtgctggaagagaagatgaacgcggaacagcagttgcaatctactcaggtatggggttgccatatcgatatgggcctcgggaccccgggatccctgggcaataaaggtagccagttacacaactcgctggagccttctcccctctga

SEQ ID NO: 8841 - RNA, 963 nt, synthetic construct
  misc_feature 1..963: note = derived and/or modified sequence opt4 fromJNK__Homo_sapiens__BAG62261
  source 1..963: mol_type = other RNA
atgatcagccccgaccccagacccagccccggcctggccagatgggccgagagctacgaggccaagtgcgagagaagacaggagatcagagagagcagaagatgcagacccaacgtgaccacctgcagacaggtgggcaagaccctgagaatccagcagagagagctggaggagaagggcaaggcccagcacccccaggccagagagcagggccccagcagaagacccggccaggtgaccgtgctgaaggagcccctgagctgcgccagaagaatcagcagccccagagagcaggtgaccggcaccagcagcgaggtgttccccgcccagcaccccccccccagcggcatctgcagagacctgagcgaccacctgagcagccaggccggcggcctgcccccccaggacacccccatcaagaagccccccaagcaccacagaggcacccagaccaaggccgagggccccaccatcaagaacgacgccagccagcagaccaactacggcgtggccgtgctggacaaggagatcatccagctgagcgactacctgaaggaggccctgcagagagagctggtgctgaagcagaagatggtgatcctgcaggacctgctgagcaccctgatccaggccagcgacagcagctggaagggccagctgaacgaggacaagctgaagggcaagctgagaagcctggagaaccagctgtacacctgcacccagaagtacagcccctggggcatgaagaaggtgctgctggagatggaggaccagaagaacagctacgagcagaaggccaaggagagcctgcagaaggtgctggaggagaagatgaacgccgagcagcagctgcagagcacccaggtgtggggctgccacatcgacatgggcctgggcacccccggcagcctgggcaacaagggcagccagctgcacaacagcctggagcccagccccctgtga

SEQ ID NO: 8842 - RNA, 963 nt, synthetic construct
  misc_feature 1..963: note = derived and/or modified sequence opt5 fromJNK__Homo_sapiens__BAG62261
  source 1..963: mol_type = other RNA
atgatcagccccgaccctagaccgtcccccggcctggcccggtgggctgagtcttacgaagccaagtgcgagcgcagacaggaaattcgggagagccgcagatgtcggcctaacgtgaccacatgccgccaagtcgggaaaacgctcagaatccagcagcgggaactggaggagaagggaaaagcgcagcacccccaagctcgcgaacagggcccttccagacggcccgggcaggttaccgtgcttaaggagcctctgtcttgtgcccgcagaattagctccccgcgggaacaggtgacaggaacctctagcgaggtcttccccgcccaacatcctcccccttccggcatctgccgcgatctcagcgaccacctgtcttcccaggctgggggacttcccccgcaggatacacctattaaaaagccccctaagcatcacagaggcacccagacaaaagccgagggccccaccatcaagaatgacgctagccaacagacgaactatggggtggccgttctggataaagaaatcattcagctctctgactacctgaaggaggcgctgcaacgggaactcgtgctgaaacagaagatggtcatccttcaggatctgctctccaccctgattcaggccagcgactcttcctggaagggacaacttaatgaggataaactgaagggcaaactcagaagcctggaaaaccagctgtatacatgtacccagaagtactccccctgggggatgaaaaaggtgctcctggagatggaggaccagaaaaattcttatgaacaaaaggctaaggagagccttcagaaagttctggaagagaagatgaacgccgaacagcagctccaatccacacaggtgtggggatgccatatcgatatgggcctggggacccctggaagccttggcaataaaggctctcagctgcacaactccctcgagccgagccccctgtga

SEQ ID NO: 8843 - protein, 671 aa, synthetic construct
  REGION 1..671: note = KPCB__Homo_sapiens__P05771-1
MADPAAGPPPSEGEESTVRFARKGALRQKNVHEVKNHKFTARFFKQPTFCSHCTDFIWGFGKQGFQCQVCCFVVHKRCHEFVTFSCPGADKGPASDDPRSKHKFKIHTYSSPTFCDHCGSLLYGLIHQGMKCDTCMMNVHKRCVMNVPSLCGTDHTERRGRIYIQAHIDRDVLIVLVRDAKNLVPMDPNGLSDPYVKLKLIPDPKSESKQKTKTIKCSLNPEWNETFRFQLKESDKDRRLSVEIWDWDLTSRNDFMGSLSFGISELQKASVDGWFKLLSQEEGEYFNVPVPPEGSEANEELRQKFERAKISQGTKVPEEKTTNTVSKFDNNGNRDRMKLTDFNFLMVLGKGSFGKVMLSERKGTDELYAVKILKKDVVIQDDDVECTMVEKRVLALPGKPPFLTQLHSCFQTMDRLYFVMEYVNGGDLMYHIQQVGRFKEPHAVFYAAEIAIGLFFLQSKGIIYRDLKLDNVMLDSEGHIKIADFGMCKENIWDGVTTKTFCGTPDYIAPEIIAYQPYGKSVDWWAFGVLLYEMLAGQAPFEGEDEDELFQSIMEHNVAYPKSMSKEAVAICKGLMTKHPGKRLGCGPEGERDIKEHAFFRYIDWEKLERKEIQPPYKPKARDKRDTSNFDKEFTRQPVELTPTDKLFIMNLDQNEFAGFSYTNPEFVINV

SEQ ID NO: 8844 - RNA, 2016 nt, synthetic construct
  misc_feature 1..2016: note = KPCB__Homo_sapiens__CCDS10618.1
  source 1..2016: mol_type = other RNA
atggctgacccggctgcggggccgccgccgagcgagggcgaggagagcaccgtgcgcttcgcccgcaaaggcgccctccggcagaagaacgtgcatgaggtcaagaaccacaaattcaccgcccgcttcttcaagcagcccaccttctgcagccactgcaccgacttcatctggggcttcgggaagcagggattccagtgccaagtttgctgctttgtggtgcacaagcggtgccatgaatttgtcacattctcctgccctggcgctgacaagggtccagcctccgatgacccccgcagcaaacacaagtttaagatccacacgtactccagccccacgttttgtgaccactgtgggtcactgctgtatggactcatccaccaggggatgaaatgtgacacctgcatgatgaatgtgcacaagcgctgcgtgatgaatgttcccagcctgtgtggcacggaccacacggagcgccgcggccgcatctacatccaggcccacatcgacagggacgtcctcattgtcctcgtaagagatgctaaaaaccttgtacctatggaccccaatggcctgtcagatccctacgtaaaactgaaactgattcccgatcccaaaagtgagagcaaacagaagaccaaaaccatcaaatgctccctcaaccctgagtggaatgagacatttagatttcagctgaaagaatcggacaaagacagaagactgtcagtagagatttgggattgggatttgaccagcaggaatgacttcatgggatctttgtcctttgggatttctgaacttcagaaagccagtgttgatggctggtttaagttactgagccaggaggaaggcgagtacttcaatgtgcctgtgccaccagaaggaagtgaggccaatgaagaactgcggcagaaatttgagagggccaagatcagtcagggaaccaaggtcccggaagaaaagacgaccaacactgtctccaaatttgacaacaatggcaacagagaccggatgaaactgaccgattttaacttcctaatggtgctggggaaaggcagctttggcaaggtcatgctttcagaacgaaaaggcacagatgagctctatgctgtgaagatcctgaagaaggacgttgtgatccaagatgatgacgtggagtgcactatggtggagaagcgggtgttggccctgcctgggaagccgcccttcctgacccagctccactcctgcttccagaccatggaccgcctgtactttgtgatggagtacgtgaatgggggcgacctcatgtatcacatccagcaagtcggccggttcaaggagccccatgctgtattttacgctgcagaaattgccatcggtctgttcttcttacagagtaagggcatcatttaccgtgacctaaaacttgacaacgtgatgctcgattctgagggacacatcaagattgccgattttggcatgtgtaaggaaaacatctgggatggggtgacaaccaagacattctgtggcactccagactacatcgcccccgagataattgcttatcagccctatgggaagtccgtggattggtgggcatttggagtcctgctgtatgaaatgttggctgggcaggcaccctttgaaggggaggatgaagatgaactcttccaatccatcatggaacacaacgtagcctatcccaagtctatgtccaaggaagctgtggccatctgcaaagggctgatgaccaaacacccaggcaaacgtctgggttgtggacctgaaggcgaacgtgatatcaaagagcatgcatttttccggtatattgattgggagaaacttgaacgcaaagagatccagcccccttataagccaaaagctagagacaagagagacacctccaacttcgacaaagagttcaccagacagcctgtggaactgacccccactgataaactcttcatcatgaacttggaccaaaatgaatttgctggcttctcttatactaacccagagtttgtcattaatgtgtag

SEQ ID NO: 8845 - RNA, 2016 nt, synthetic construct
  misc_feature 1..2016: note = derived and/or modified sequence opt1 fromKPCB__Homo_sapiens__CCDS10618.1
  source 1..2016: mol_type = other RNA
atggccgaccccgccgcgggcccgccgcccagcgagggggaggagtccaccgtgcgcttcgcccggaagggcgccctgcgccagaagaacgtccacgaggtgaagaaccacaagttcaccgcccggttcttcaagcagcccacgttctgcagccactgcaccgacttcatctgggggttcggcaagcaggggttccagtgccaggtgtgctgcttcgtcgtgcacaagcgctgccacgagttcgtgaccttctcctgccccggcgccgacaagggccccgcgagcgacgacccccggtccaagcacaagttcaagatccacacctacagctcccccacgttctgcgaccactgcgggagcctcctgtacggcctgatccaccaggggatgaagtgcgacacgtgcatgatgaacgtccacaagcgctgcgtgatgaacgtgccgtccctctgcggcaccgaccacaccgagcggcgcgggcggatctacatccaggcccacatcgaccgcgacgtcctgatcgtgctggtgcgggacgccaagaacctcgtccccatggaccccaacggcctgagcgacccctacgtgaagctgaagctcatcccggaccccaagtccgagagcaagcagaagaccaagaccatcaagtgctccctgaaccccgagtggaacgagaccttccgcttccagctgaaggagagcgacaaggaccggcgcctctccgtggagatctgggactgggacctgaccagccggaacgacttcatgggctccctgagcttcgggatctccgagctccagaaggccagcgtcgacggctggttcaagctgctgagccaggaggagggggagtacttcaacgtgcccgtgccgcccgagggctccgaggcgaacgaggagctccgccagaagttcgagcgggccaagatcagccagggcacgaaggtccccgaggagaagaccaccaacaccgtgtccaagttcgacaacaacgggaaccgcgaccggatgaagctgacggacttcaacttcctgatggtgctcggcaaggggagcttcggcaaggtcatgctgtccgagcgcaaggggaccgacgagctgtacgccgtgaagatcctcaagaaggacgtggtcatccaggacgacgacgtggagtgcaccatggtcgagaagcgggtgctggccctgcccggcaagccgcccttcctcacccagctgcacagctgcttccagacgatggaccgcctgtacttcgtgatggagtacgtcaacggcggggacctcatgtaccacatccagcaggtcggccgcttcaaggagccccacgccgtgttctacgcggccgagatcgccatcgggctgttcttcctgcagtccaagggcatcatctaccgggacctcaagctggacaacgtgatgctggacagcgaggggcacatcaagatcgccgacttcggcatgtgcaaggagaacatctgggacggcgtgaccaccaagaccttctgcgggacgcccgactacatcgccccggagatcatcgcgtaccagccctacggcaagtccgtggactggtgggccttcggggtcctcctgtacgagatgctggccggccaggcccccttcgagggggaggacgaggacgagctgttccagagcatcatggagcacaacgtggcctaccccaagtccatgagcaaggaggcggtggccatctgcaagggcctcatgaccaagcacccgggcaagcgcctggggtgcggccccgagggggagcgggacatcaaggagcacgccttcttccgctacatcgactgggagaagctcgagcggaaggagatccagcccccgtacaagcccaaggcccgcgacaagcgggacacctccaacttcgacaaggagttcacccgccagcccgtcgagctgacgcccaccgacaagctgttcatcatgaacctcgaccagaacgagttcgccggcttcagctacaccaacccggagttcgtgatcaacgtgtga

SEQ ID NO: 8846 - RNA, 2016 nt, synthetic construct
  misc_feature 1..2016: note = derived and/or modified sequence opt2 fromKPCB__Homo_sapiens__CCDS10618.1
  source 1..2016: mol_type = other RNA
atggccgaccccgccgccggcccccccccctccgagggcgaggagtccaccgtccgcttcgcccgcaagggcgccctccgccagaagaacgtccacgaggtcaagaaccacaagttcaccgcccgcttcttcaagcagcccaccttctgctcccactgcaccgacttcatctggggcttcggcaagcagggcttccagtgccaggtctgctgcttcgtcgtccacaagcgctgccacgagttcgtcaccttctcctgccccggcgccgacaagggccccgcctccgacgacccccgctccaagcacaagttcaagatccacacctactcctcccccaccttctgcgaccactgcggctccctcctctacggcctcatccaccagggcatgaagtgcgacacctgcatgatgaacgtccacaagcgctgcgtcatgaacgtcccctccctctgcggcaccgaccacaccgagcgccgcggccgcatctacatccaggcccacatcgaccgcgacgtcctcatcgtcctcgtccgcgacgccaagaacctcgtccccatggaccccaacggcctctccgacccctacgtcaagctcaagctcatccccgaccccaagtccgagtccaagcagaagaccaagaccatcaagtgctccctcaaccccgagtggaacgagaccttccgcttccagctcaaggagtccgacaaggaccgccgcctctccgtcgagatctgggactgggacctcacctcccgcaacgacttcatgggctccctctccttcggcatctccgagctccagaaggcctccgtcgacggctggttcaagctcctctcccaggaggagggcgagtacttcaacgtccccgtcccccccgagggctccgaggccaacgaggagctccgccagaagttcgagcgcgccaagatctcccagggcaccaaggtccccgaggagaagaccaccaacaccgtctccaagttcgacaacaacggcaaccgcgaccgcatgaagctcaccgacttcaacttcctcatggtcctcggcaagggctccttcggcaaggtcatgctctccgagcgcaagggcaccgacgagctctacgccgtcaagatcctcaagaaggacgtcgtcatccaggacgacgacgtcgagtgcaccatggtcgagaagcgcgtcctcgccctccccggcaagccccccttcctcacccagctccactcctgcttccagaccatggaccgcctctacttcgtcatggagtacgtcaacggcggcgacctcatgtaccacatccagcaggtcggccgcttcaaggagccccacgccgtcttctacgccgccgagatcgccatcggcctcttcttcctccagtccaagggcatcatctaccgcgacctcaagctcgacaacgtcatgctcgactccgagggccacatcaagatcgccgacttcggcatgtgcaaggagaacatctgggacggcgtcaccaccaagaccttctgcggcacccccgactacatcgcccccgagatcatcgcctaccagccctacggcaagtccgtcgactggtgggccttcggcgtcctcctctacgagatgctcgccggccaggcccccttcgagggcgaggacgaggacgagctcttccagtccatcatggagcacaacgtcgcctaccccaagtccatgtccaaggaggccgtcgccatctgcaagggcctcatgaccaagcaccccggcaagcgcctcggctgcggccccgagggcgagcgcgacatcaaggagcacgccttcttccgctacatcgactgggagaagctcgagcgcaaggagatccagcccccctacaagcccaaggcccgcgacaagcgcgacacctccaacttcgacaaggagttcacccgccagcccgtcgagctcacccccaccgacaagctcttcatcatgaacctcgaccagaacgagttcgccggcttctcctacaccaaccccgagttcgtcatcaacgtctga

SEQ ID NO: 8847 - RNA, 2016 nt, synthetic construct
  misc_feature 1..2016: note = derived and/or modified sequence opt3 fromKPCB__Homo_sapiens__CCDS10618.1
  source 1..2016: mol_type = other RNA
atggccgaccccgctgcaggccctccaccgagcgagggggaagagtccaccgtgagattcgccaggaagggagcgctgcggcagaaaaacgtccacgaagttaagaatcataaatttacagctcgcttctttaagcaacccactttctgctctcactgtacggattttatctggggtttcggcaaacaggggtttcagtgccaggtgtgttgcttcgtagtgcataagcgatgtcacgagtttgtcaccttctcatgccctggagccgacaagggcccagcaagtgatgacccccgtagcaaacataagtttaaaattcacacatactcctctcctactttctgtgatcactgcggttcgctcctttatgggctgatacatcaaggaatgaagtgtgatacctgcatgatgaacgtgcacaaaagatgtgttatgaatgtgccatcattgtgcggcacagaccataccgaaaggcggggccgcatctacattcaggcccacatcgacagagatgtcttaattgtgctggtaagggacgctaagaacctagttcccatggatcctaatgggctcagcgacccatatgtgaagctgaaacttatcccggatcccaagagtgagtccaaacagaagactaaaacaataaagtgctctctgaaccctgagtggaatgaaacctttcggttccagttgaaagagagcgacaaggaccgccgactctccgtcgaaatctgggattgggacctgacgtcaagaaacgatttcatgggaagtctgagctttggtatttctgagctccaaaaggcatccgtggacggctggttcaaattactgtcacaggaggaaggggagtactttaatgtgccagttccccctgaaggaagcgaggccaacgaggaacttaggcagaagttcgagcgggctaaaatcagtcagggcactaaggtcccagaagagaaaaccacaaatactgtgtctaagtttgataacaatggtaaccgtgaccgcatgaagttgaccgatttcaattttctgatggtactagggaaaggatccttcggcaaggtgatgctcagcgaaagaaaaggcacagacgagctgtatgccgtcaagattcttaaaaaggatgtggttatccaagacgatgacgtggaatgtaccatggtcgagaagagggtgctggcgttgcccgggaaaccgccttttctcacgcagctgcactcgtgcttccagactatggaccggttatactttgtaatggagtatgttaacggaggtgatctgatgtaccatatacaacaggtgggccgattcaaggaaccccacgcagtcttttacgccgctgagattgccatcggactcttcttccttcagtctaaagggattatctatcgcgacctgaagttggataacgtgatgctagactccgaaggccatatcaaaattgcagattttggtatgtgtaaggagaatatatgggacggggtcacaaccaagactttctgcggcacaccagattacatcgctcctgaaattatcgcctatcagccctacggaaaatcagtggactggtgggcgtttggcgttctgctctatgagatgctggccgggcaagcaccattcgagggagaagatgaggacgaactttttcagagtataatggagcacaacgtggcttaccccaagagcatgtccaaagaggccgtagctatttgtaagggtctgatgaccaaacatcctggcaagagattggggtgcggaccagaaggcgagagggatatcaaagaacacgccttctttcggtatatcgactgggagaagctcgaacgcaaggagattcagccgccctacaaacctaaggcaagagataaaagggacacgtctaatttcgacaaggagtttacccgtcagccagtcgaactgacacccactgataaattattcatcatgaacctggaccaaaatgagtttgccggtttcagctacaccaaccctgaatttgtgattaatgtttga

SEQ ID NO: 8848 - RNA, 2016 nt, synthetic construct
  misc_feature 1..2016: note = derived and/or modified sequence opt4 fromKPCB__Homo_sapiens__CCDS10618.1
  source 1..2016: mol_type = other RNA
atggccgaccccgccgccggccccccccccagcgagggcgaggagagcaccgtgagattcgccagaaagggcgccctgagacagaagaacgtgcacgaggtgaagaaccacaagttcaccgccagattcttcaagcagcccaccttctgcagccactgcaccgacttcatctggggcttcggcaagcagggcttccagtgccaggtgtgctgcttcgtggtgcacaagagatgccacgagttcgtgaccttcagctgccccggcgccgacaagggccccgccagcgacgaccccagaagcaagcacaagttcaagatccacacctacagcagccccaccttctgcgaccactgcggcagcctgctgtacggcctgatccaccagggcatgaagtgcgacacctgcatgatgaacgtgcacaagagatgcgtgatgaacgtgcccagcctgtgcggcaccgaccacaccgagagaagaggcagaatctacatccaggcccacatcgacagagacgtgctgatcgtgctggtgagagacgccaagaacctggtgcccatggaccccaacggcctgagcgacccctacgtgaagctgaagctgatccccgaccccaagagcgagagcaagcagaagaccaagaccatcaagtgcagcctgaaccccgagtggaacgagaccttcagattccagctgaaggagagcgacaaggacagaagactgagcgtggagatctgggactgggacctgaccagcagaaacgacttcatgggcagcctgagcttcggcatcagcgagctgcagaaggccagcgtggacggctggttcaagctgctgagccaggaggagggcgagtacttcaacgtgcccgtgccccccgagggcagcgaggccaacgaggagctgagacagaagttcgagagagccaagatcagccagggcaccaaggtgcccgaggagaagaccaccaacaccgtgagcaagttcgacaacaacggcaacagagacagaatgaagctgaccgacttcaacttcctgatggtgctgggcaagggcagcttcggcaaggtgatgctgagcgagagaaagggcaccgacgagctgtacgccgtgaagatcctgaagaaggacgtggtgatccaggacgacgacgtggagtgcaccatggtggagaagagagtgctggccctgcccggcaagccccccttcctgacccagctgcacagctgcttccagaccatggacagactgtacttcgtgatggagtacgtgaacggcggcgacctgatgtaccacatccagcaggtgggcagattcaaggagccccacgccgtgttctacgccgccgagatcgccatcggcctgttcttcctgcagagcaagggcatcatctacagagacctgaagctggacaacgtgatgctggacagcgagggccacatcaagatcgccgacttcggcatgtgcaaggagaacatctgggacggcgtgaccaccaagaccttctgcggcacccccgactacatcgcccccgagatcatcgcctaccagccctacggcaagagcgtggactggtgggccttcggcgtgctgctgtacgagatgctggccggccaggcccccttcgagggcgaggacgaggacgagctgttccagagcatcatggagcacaacgtggcctaccccaagagcatgagcaaggaggccgtggccatctgcaagggcctgatgaccaagcaccccggcaagagactgggctgcggccccgagggcgagagagacatcaaggagcacgccttcttcagatacatcgactgggagaagctggagagaaaggagatccagcccccctacaagcccaaggccagagacaagagagacaccagcaacttcgacaaggagttcaccagacagcccgtggagctgacccccaccgacaagctgttcatcatgaacctggaccagaacgagttcgccggcttcagctacaccaaccccgagttcgtgatcaacgtgtga

SEQ ID NO: 8849 - RNA, 2016 nt, synthetic construct
  misc_feature 1..2016: note = derived and/or modified sequence opt5 fromKPCB__Homo_sapiens__CCDS10618.1
  source 1..2016: mol_type = other RNA
atggccgaccccgctgccggccctccgcccagcgagggggaagagtccaccgtgagattcgcgcggaagggagctctgcgccagaaaaacgtccacgaagttaagaatcataaatttacagccagattctttaagcaacctacgttctgctctcactgtaccgattttatctggggcttcgggaaacagggatttcagtgccaggtgtgttgcttcgtggtccataagcggtgtcacgagtttgtgacattcagctgccccggcgccgacaaggggcctgcttccgatgacccccgctctaaacataagtttaaaattcacacctacagctcccctacattctgtgatcactgcggatctctcctgtatggccttatccatcaaggcatgaagtgtgatacctgcatgatgaacgttcacaaaagatgtgtgatgaatgtcccgagcctgtgcgggacagaccataccgaacggcgcggaagaatttacatccaggcccacattgaccgggatgtgctcatcgttctggtgcgcgacgctaagaaccttgtccccatggatcctaatggcctgtccgacccctatgtgaagctcaaactgatccctgatcccaagagcgagtctaaacagaagacgaaaaccattaagtgctccctgaacccggagtggaatgaaacatttagattccagctcaaagagagcgacaaggaccggcgcctgtctgtggaaatctgggattgggaccttacctccagaaacgatttcatggggagcctgtcttttggaatttccgagctccaaaaggccagcgtcgacggctggttcaaactgctttcccaggaggaaggggagtactttaatgttcctgtgccccctgaaggatctgaggcgaacgaggaactgcggcagaagttcgagcgcgccaaaatcagccagggcacaaaggtgcccgaagagaaaaccacgaatacagtctccaagtttgataacaatggcaacagagaccggatgaagctcaccgatttcaattttctgatggtgctggggaaaggcagcttcggaaaggttatgctctctgaaagaaaagggacagacgagctgtatgctgtgaagattcttaaaaaggatgtcgtgatccaagacgatgacgttgaatgtaccatggtggagaagcgcgtcctggccctccccggaaaacctccgtttctgacccagcttcactcctgcttccagacaatggaccggctgtactttgtgatggagtatgtcaacggcggggatctcatgtaccatattcaacaggtgggaagattcaaggaaccccacgctgtgttttacgccgcggagatcgccatcggcctgttcttcctgcagagcaaaggcattatctatcgcgacctcaagctggataacgttatgcttgactctgaagggcatattaaaatcgctgattttggaatgtgtaaggagaatatttgggacggcgtcacgaccaagacattctgcgggacccctgattacatcgcccccgaaatcattgcttatcagccttacggaaaaagcgtggactggtgggcctttggcgttctgctctatgagatgctggccgggcaagctcccttcgagggcgaagatgaggacgaactttttcagtccatcatggagcacaacgtggcgtacccgaagtctatgagcaaagaggccgtcgctatttgtaagggactgatgacaaaacatcctggcaagcggctcgggtgcggacccgaaggcgagagagatatcaaagaacacgccttctttcgctatattgactgggagaagctggaacggaaggagatccagcctccctacaaacctaaggccagagataaacgcgacacctccaatttcgacaaggagtttacgcggcagcccgtggaactgacaccgaccgataaactcttcatcatgaacctggaccaaaatgagtttgctgggttcagctacaccaaccctgaatttgtgattaatgtttga

SEQ ID NO: 8850 - protein, 673 aa, synthetic construct
  REGION 1..673: note = KPCB__Homo_sapiens__P05771-2
MADPAAGPPPSEGEESTVRFARKGALRQKNVHEVKNHKFTARFFKQPTFCSHCTDFIWGFGKQGFQCQVCCFVVHKRCHEFVTFSCPGADKGPASDDPRSKHKFKIHTYSSPTFCDHCGSLLYGLIHQGMKCDTCMMNVHKRCVMNVPSLCGTDHTERRGRIYIQAHIDRDVLIVLVRDAKNLVPMDPNGLSDPYVKLKLIPDPKSESKQKTKTIKCSLNPEWNETFRFQLKESDKDRRLSVEIWDWDLTSRNDFMGSLSFGISELQKASVDGWFKLLSQEEGEYFNVPVPPEGSEANEELRQKFERAKISQGTKVPEEKTTNTVSKFDNNGNRDRMKLTDFNFLMVLGKGSFGKVMLSERKGTDELYAVKILKKDVVIQDDDVECTMVEKRVLALPGKPPFLTQLHSCFQTMDRLYFVMEYVNGGDLMYHIQQVGRFKEPHAVFYAAEIAIGLFFLQSKGIIYRDLKLDNVMLDSEGHIKIADFGMCKENIWDGVTTKTFCGTPDYIAPEIIAYQPYGKSVDWWAFGVLLYEMLAGQAPFEGEDEDELFQSIMEHNVAYPKSMSKEAVAICKGLMTKHPGKRLGCGPEGERDIKEHAFFRYIDWEKLERKEIQPPYKPKACGRNAENFDRFFTRHPPVLTPPDQEVIRNIDQSEFEGFSFVNSEFLKPEVKS

SEQ ID NO: 8851 - RNA, 2022 nt, synthetic construct
  misc_feature 1..2022: note = KPCB__Homo_sapiens__CCDS10619.1
  source 1..2022: mol_type = other RNA
atggctgacccggctgcggggccgccgccgagcgagggcgaggagagcaccgtgcgcttcgcccgcaaaggcgccctccggcagaagaacgtgcatgaggtcaagaaccacaaattcaccgcccgcttcttcaagcagcccaccttctgcagccactgcaccgacttcatctggggcttcgggaagcagggattccagtgccaagtttgctgctttgtggtgcacaagcggtgccatgaatttgtcacattctcctgccctggcgctgacaagggtccagcctccgatgacccccgcagcaaacacaagtttaagatccacacgtactccagccccacgttttgtgaccactgtgggtcactgctgtatggactcatccaccaggggatgaaatgtgacacctgcatgatgaatgtgcacaagcgctgcgtgatgaatgttcccagcctgtgtggcacggaccacacggagcgccgcggccgcatctacatccaggcccacatcgacagggacgtcctcattgtcctcgtaagagatgctaaaaaccttgtacctatggaccccaatggcctgtcagatccctacgtaaaactgaaactgattcccgatcccaaaagtgagagcaaacagaagaccaaaaccatcaaatgctccctcaaccctgagtggaatgagacatttagatttcagctgaaagaatcggacaaagacagaagactgtcagtagagatttgggattgggatttgaccagcaggaatgacttcatgggatctttgtcctttgggatttctgaacttcagaaagccagtgttgatggctggtttaagttactgagccaggaggaaggcgagtacttcaatgtgcctgtgccaccagaaggaagtgaggccaatgaagaactgcggcagaaatttgagagggccaagatcagtcagggaaccaaggtcccggaagaaaagacgaccaacactgtctccaaatttgacaacaatggcaacagagaccggatgaaactgaccgattttaacttcctaatggtgctggggaaaggcagctttggcaaggtcatgctttcagaacgaaaaggcacagatgagctctatgctgtgaagatcctgaagaaggacgttgtgatccaagatgatgacgtggagtgcactatggtggagaagcgggtgttggccctgcctgggaagccgcccttcctgacccagctccactcctgcttccagaccatggaccgcctgtactttgtgatggagtacgtgaatgggggcgacctcatgtatcacatccagcaagtcggccggttcaaggagccccatgctgtattttacgctgcagaaattgccatcggtctgttcttcttacagagtaagggcatcatttaccgtgacctaaaacttgacaacgtgatgctcgattctgagggacacatcaagattgccgattttggcatgtgtaaggaaaacatctgggatggggtgacaaccaagacattctgtggcactccagactacatcgcccccgagataattgcttatcagccctatgggaagtccgtggattggtgggcatttggagtcctgctgtatgaaatgttggctgggcaggcaccctttgaaggggaggatgaagatgaactcttccaatccatcatggaacacaacgtagcctatcccaagtctatgtccaaggaagctgtggccatctgcaaagggctgatgaccaaacacccaggcaaacgtctgggttgtggacctgaaggcgaacgtgatatcaaagagcatgcatttttccggtatattgattgggagaaacttgaacgcaaagagatccagcccccttataagccaaaagcttgtgggcgaaatgctgaaaacttcgaccgatttttcacccgccatccaccagtcctaacacctcccgaccaggaagtcatcaggaatattgaccaatcagaattcgaaggattttcctttgttaactctgaatttttaaaacccgaagtcaagagctaa

SEQ ID NO: 8852 - RNA, 2022 nt, synthetic construct
  misc_feature 1..2022: note = derived and/or modified sequence opt1 fromKPCB__Homo_sapiens__CCDS10619.1
  source 1..2022: mol_type = other RNA
atggccgaccccgccgcggggcccccgcccagcgagggcgaggagtccaccgtgcgcttcgcccggaagggcgccctgcgccagaagaacgtccacgaggtgaagaaccacaagttcaccgcccggttcttcaagcagcccacgttctgcagccactgcaccgacttcatctgggggttcggcaagcaggggttccagtgccaggtgtgctgcttcgtcgtgcacaagcgctgccacgagttcgtgaccttctcctgccccggcgccgacaagggccccgcgagcgacgacccccggtccaagcacaagttcaagatccacacctacagctcccccacgttctgcgaccactgcgggagcctcctgtacggcctgatccaccaggggatgaagtgcgacacgtgcatgatgaacgtccacaagcgctgcgtgatgaacgtgccgtccctctgcggcaccgaccacaccgagcggcgcgggcggatctacatccaggcccacatcgaccgcgacgtcctgatcgtgctggtgcgggacgccaagaacctcgtccccatggaccccaacggcctgagcgacccctacgtgaagctgaagctcatcccggaccccaagtccgagagcaagcagaagaccaagaccatcaagtgctccctgaaccccgagtggaacgagaccttccgcttccagctgaaggagagcgacaaggaccggcgcctctccgtggagatctgggactgggacctgaccagccggaacgacttcatgggctccctgagcttcgggatctccgagctccagaaggccagcgtcgacggctggttcaagctgctgagccaggaggagggggagtacttcaacgtgcccgtgccgcccgagggctccgaggcgaacgaggagctccgccagaagttcgagcgggccaagatcagccagggcacgaaggtccccgaggagaagaccaccaacaccgtgtccaagttcgacaacaacgggaaccgcgaccggatgaagctgacggacttcaacttcctgatggtgctcggcaaggggagcttcggcaaggtcatgctgtccgagcgcaaggggaccgacgagctgtacgccgtgaagatcctcaagaaggacgtggtcatccaggacgacgacgtggagtgcaccatggtcgagaagcgggtgctggccctgcccggcaagccgcccttcctcacccagctgcacagctgcttccagacgatggaccgcctgtacttcgtgatggagtacgtcaacggcggggacctcatgtaccacatccagcaggtcggccgcttcaaggagccccacgccgtgttctacgcggccgagatcgccatcgggctgttcttcctgcagtccaagggcatcatctaccgggacctcaagctggacaacgtgatgctggacagcgaggggcacatcaagatcgccgacttcggcatgtgcaaggagaacatctgggacggcgtgaccaccaagaccttctgcgggacgcccgactacatcgccccggagatcatcgcgtaccagccctacggcaagtccgtggactggtgggccttcggggtcctcctgtacgagatgctggccggccaggcccccttcgagggggaggacgaggacgagctgttccagagcatcatggagcacaacgtggcctaccccaagtccatgagcaaggaggcggtggccatctgcaagggcctcatgaccaagcacccgggcaagcgcctggggtgcggccccgagggggagcgggacatcaaggagcacgccttcttccgctacatcgactgggagaagctcgagcggaaggagatccagcccccgtacaagcccaaggcctgcggccgcaacgccgagaacttcgaccggttcttcacccgccacccgcccgtcctgaccccgcccgaccaggaggtgatccggaacatcgaccagtccgagttcgagggcttcagcttcgtgaactccgagttcctgaagcccgaggtcaagagctga

SEQ ID NO: 8853 - RNA, 2022 nt, synthetic construct
  misc_feature 1..2022: note = derived and/or modified sequence opt2 fromKPCB__Homo_sapiens__CCDS10619.1
  source 1..2022: mol_type = other RNA
atggccgaccccgccgccggcccccccccctccgagggcgaggagtccaccgtccgcttcgcccgcaagggcgccctccgccagaagaacgtccacgaggtcaagaaccacaagttcaccgcccgcttcttcaagcagcccaccttctgctcccactgcaccgacttcatctggggcttcggcaagcagggcttccagtgccaggtctgctgcttcgtcgtccacaagcgctgccacgagttcgtcaccttctcctgccccggcgccgacaagggccccgcctccgacgacccccgctccaagcacaagttcaagatccacacctactcctcccccaccttctgcgaccactgcggctccctcctctacggcctcatccaccagggcatgaagtgcgacacctgcatgatgaacgtccacaagcgctgcgtcatgaacgtcccctccctctgcggcaccgaccacaccgagcgccgcggccgcatctacatccaggcccacatcgaccgcgacgtcctcatcgtcctcgtccgcgacgccaagaacctcgtccccatggaccccaacggcctctccgacccctacgtcaagctcaagctcatccccgaccccaagtccgagtccaagcagaagaccaagaccatcaagtgctccctcaaccccgagtggaacgagaccttccgcttccagctcaaggagtccgacaaggaccgccgcctctccgtcgagatctgggactgggacctcacctcccgcaacgacttcatgggctccctctccttcggcatctccgagctccagaaggcctccgtcgacggctggttcaagctcctctcccaggaggagggcgagtacttcaacgtccccgtcccccccgagggctccgaggccaacgaggagctccgccagaagttcgagcgcgccaagatctcccagggcaccaaggtccccgaggagaagaccaccaacaccgtctccaagttcgacaacaacggcaaccgcgaccgcatgaagctcaccgacttcaacttcctcatggtcctcggcaagggctccttcggcaaggtcatgctctccgagcgcaagggcaccgacgagctctacgccgtcaagatcctcaagaaggacgtcgtcatccaggacgacgacgtcgagtgcaccatggtcgagaagcgcgtcctcgccctccccggcaagccccccttcctcacccagctccactcctgcttccagaccatggaccgcctctacttcgtcatggagtacgtcaacggcggcgacctcatgtaccacatccagcaggtcggccgcttcaaggagccccacgccgtcttctacgccgccgagatcgccatcggcctcttcttcctccagtccaagggcatcatctaccgcgacctcaagctcgacaacgtcatgctcgactccgagggccacatcaagatcgccgacttcggcatgtgcaaggagaacatctgggacggcgtcaccaccaagaccttctgcggcacccccgactacatcgcccccgagatcatcgcctaccagccctacggcaagtccgtcgactggtgggccttcggcgtcctcctctacgagatgctcgccggccaggcccccttcgagggcgaggacgaggacgagctcttccagtccatcatggagcacaacgtcgcctaccccaagtccatgtccaaggaggccgtcgccatctgcaagggcctcatgaccaagcaccccggcaagcgcctcggctgcggccccgagggcgagcgcgacatcaaggagcacgccttcttccgctacatcgactgggagaagctcgagcgcaaggagatccagcccccctacaagcccaaggcctgcggccgcaacgccgagaacttcgaccgcttcttcacccgccacccccccgtcctcaccccccccgaccaggaggtcatccgcaacatcgaccagtccgagttcgagggcttctccttcgtcaactccgagttcctcaagcccgaggtcaagtcctga

SEQ ID NO: 8854 - RNA, 2022 nt, synthetic construct
  misc_feature 1..2022: note = derived and/or modified sequence opt3 fromKPCB__Homo_sapiens__CCDS10619.1
  source 1..2022: mol_type = other RNA
atggccgaccccgctgcaggccctccaccgagcgagggggaagagtccaccgtgagattcgccaggaagggagcgctgcggcagaaaaacgtccacgaagttaagaatcataaatttacagctcgcttctttaagcaacccactttctgctctcactgtacggattttatctggggtttcggcaaacaggggtttcagtgccaggtgtgttgcttcgtagtgcataagcgatgtcacgagtttgtcaccttctcatgccctggagccgacaagggcccagcaagtgatgacccccgtagcaaacataagtttaaaattcacacatactcctctcctactttctgtgatcactgcggttcgctcctttatgggctgatacatcaaggaatgaagtgtgatacctgcatgatgaacgtgcacaaaagatgtgttatgaatgtgccatcattgtgcggcacagaccataccgaaaggcggggccgcatctacattcaggcccacatcgacagagatgtcttaattgtgctggtaagggacgctaagaacctagttcccatggatcctaatgggctcagcgacccatatgtgaagctgaaacttatcccggatcccaagagtgagtccaaacagaagactaaaacaataaagtgctctctgaaccctgagtggaatgaaacctttcggttccagttgaaagagagcgacaaggaccgccgactctccgtcgaaatctgggattgggacctgacgtcaagaaacgatttcatgggaagtctgagctttggtatttctgagctccaaaaggcatccgtggacggctggttcaaattactgtcacaggaggaaggggagtactttaatgtgccagttccccctgaaggaagcgaggccaacgaggaacttaggcagaagttcgagcgggctaaaatcagtcagggcactaaggtcccagaagagaaaaccacaaatactgtgtctaagtttgataacaatggtaaccgtgaccgcatgaagttgaccgatttcaattttctgatggtactagggaaaggatccttcggcaaggtgatgctcagcgaaagaaaaggcacagacgagctgtatgccgtcaagattcttaaaaaggatgtggttatccaagacgatgacgtggaatgtaccatggtcgagaagagggtgctggcgttgcccgggaaaccgccttttctcacgcagctgcactcgtgcttccagactatggaccggttatactttgtaatggagtatgttaacggaggtgatctgatgtaccatatacaacaggtgggccgattcaaggaaccccacgcagtcttttacgccgctgagattgccatcggactcttcttccttcagtctaaagggattatctatcgcgacctgaagttggataacgtgatgctagactccgaaggccatatcaaaattgcagattttggtatgtgtaaggagaatatatgggacggggtcacaaccaagactttctgcggcacaccagattacatcgctcctgaaattatcgcctatcagccctacggaaaatcagtggactggtgggcgtttggcgttctgctctatgagatgctggccgggcaagcaccattcgagggagaagatgaggacgaactttttcagagtataatggagcacaacgtggcttaccccaagagcatgtccaaagaggccgtagctatttgtaagggtctgatgaccaaacatcctggcaagagattggggtgcggaccagaaggcgagagggatatcaaagaacacgccttctttcggtatatcgactgggagaagctcgaacgcaaggagattcagccgccctacaaacctaaggcatgtggtagaaatgccgagaacttcgataggtttttcacgcgtcacccacccgtcctgacccctccagaccaggaagtgatccggaatattgaccaatctgagtttgaagggttcagctttgttaactcagagttcttaaaacccgaagtgaagagttga

SEQ ID NO: 8855 - RNA, 2022 nt, synthetic construct
  misc_feature 1..2022: note = derived and/or modified sequence opt4 fromKPCB__Homo_sapiens__CCDS10619.1
  source 1..2022: mol_type = other RNA
atggccgaccccgccgccggccccccccccagcgagggcgaggagagcaccgtgagattcgccagaaagggcgccctgagacagaagaacgtgcacgaggtgaagaaccacaagttcaccgccagattcttcaagcagcccaccttctgcagccactgcaccgacttcatctggggcttcggcaagcagggcttccagtgccaggtgtgctgcttcgtggtgcacaagagatgccacgagttcgtgaccttcagctgccccggcgccgacaagggccccgccagcgacgaccccagaagcaagcacaagttcaagatccacacctacagcagccccaccttctgcgaccactgcggcagcctgctgtacggcctgatccaccagggcatgaagtgcgacacctgcatgatgaacgtgcacaagagatgcgtgatgaacgtgcccagcctgtgcggcaccgaccacaccgagagaagaggcagaatctacatccaggcccacatcgacagagacgtgctgatcgtgctggtgagagacgccaagaacctggtgcccatggaccccaacggcctgagcgacccctacgtgaagctgaagctgatccccgaccccaagagcgagagcaagcagaagaccaagaccatcaagtgcagcctgaaccccgagtggaacgagaccttcagattccagctgaaggagagcgacaaggacagaagactgagcgtggagatctgggactgggacctgaccagcagaaacgacttcatgggcagcctgagcttcggcatcagcgagctgcagaaggccagcgtggacggctggttcaagctgctgagccaggaggagggcgagtacttcaacgtgcccgtgccccccgagggcagcgaggccaacgaggagctgagacagaagttcgagagagccaagatcagccagggcaccaaggtgcccgaggagaagaccaccaacaccgtgagcaagttcgacaacaacggcaacagagacagaatgaagctgaccgacttcaacttcctgatggtgctgggcaagggcagcttcggcaaggtgatgctgagcgagagaaagggcaccgacgagctgtacgccgtgaagatcctgaagaaggacgtggtgatccaggacgacgacgtggagtgcaccatggtggagaagagagtgctggccctgcccggcaagccccccttcctgacccagctgcacagctgcttccagaccatggacagactgtacttcgtgatggagtacgtgaacggcggcgacctgatgtaccacatccagcaggtgggcagattcaaggagccccacgccgtgttctacgccgccgagatcgccatcggcctgttcttcctgcagagcaagggcatcatctacagagacctgaagctggacaacgtgatgctggacagcgagggccacatcaagatcgccgacttcggcatgtgcaaggagaacatctgggacggcgtgaccaccaagaccttctgcggcacccccgactacatcgcccccgagatcatcgcctaccagccctacggcaagagcgtggactggtgggccttcggcgtgctgctgtacgagatgctggccggccaggcccccttcgagggcgaggacgaggacgagctgttccagagcatcatggagcacaacgtggcctaccccaagagcatgagcaaggaggccgtggccatctgcaagggcctgatgaccaagcaccccggcaagagactgggctgcggccccgagggcgagagagacatcaaggagcacgccttcttcagatacatcgactgggagaagctggagagaaaggagatccagcccccctacaagcccaaggcctgcggcagaaacgccgagaacttcgacagattcttcaccagacacccccccgtgctgaccccccccgaccaggaggtgatcagaaacatcgaccagagcgagttcgagggcttcagcttcgtgaacagcgagttcctgaagcccgaggtgaagagctga

SEQ ID NO: 8856 - RNA, 2022 nt, synthetic construct
  misc_feature 1..2022: note = derived and/or modified sequence opt5 fromKPCB__Homo_sapiens__CCDS10619.1
  source 1..2022: mol_type = other RNA
atggccgaccccgctgccggccctccgcccagcgagggggaagagtccaccgtgagattcgcgcggaagggagctctgcgccagaaaaacgtccacgaagttaagaatcacaaatttacagccagattctttaagcaacctacgttctgctctcactgtaccgattttatctggggcttcgggaaacagggatttcagtgccaggtgtgttgcttcgtggtccataagcggtgtcacgagtttgtgacattcagctgccccggcgccgacaaggggcctgcttccgatgacccccgctctaaacataagtttaaaattcacacctacagctcccctacattctgtgatcactgcggatctctcctgtatggccttatccatcaaggcatgaagtgtgatacctgcatgatgaacgttcacaaaagatgtgtgatgaatgtcccgagcctgtgcgggacagaccataccgaacggcgcggaagaatttacatccaggcccacattgaccgggatgtgctcatcgttctggtgcgcgacgctaagaaccttgtccccatggatcctaatggcctgtccgacccctatgtgaagctcaaactgatccctgatcccaagagcgagtctaaacagaagacgaaaaccattaagtgctccctgaacccggagtggaatgaaacatttagattccagctcaaagagagcgacaaggaccggcgcctgtctgtggaaatctgggattgggaccttacctccagaaacgatttcatggggagcctgtcttttggaatttccgagctccaaaaggccagcgtcgacggctggttcaaactgctttcccaggaggaaggggagtactttaatgttcctgtgccccctgaaggatctgaggcgaacgaggaactgcggcagaagttcgagcgcgccaaaatcagccagggcacaaaggtgcccgaagagaaaaccacgaatacagtctccaagtttgataacaatggcaacagagaccggatgaagctcaccgatttcaattttctgatggtgctggggaaaggcagcttcggaaaggttatgctctctgaaagaaaagggacagacgagctgtatgctgtgaagattcttaaaaaggatgtcgtgatccaagacgatgacgttgaatgtaccatggtggagaagcgcgtcctggccctccccggaaaacctccgtttctgacccagcttcactcctgcttccagacaatggaccggctgtactttgtgatggagtatgtcaacggcggggatctcatgtaccatattcaacaggtgggaagattcaaggaaccccacgctgtgttttacgccgcggagatcgccatcggcctgttcttcctgcagagcaaaggcattatctatcgcgacctcaagctggataacgttatgcttgactctgaagggcatattaaaatcgctgattttggaatgtgtaaggagaatatttgggacggcgtcacgaccaagacattctgcgggacccctgattacatcgcccccgaaatcattgcttatcagccttacggaaaaagcgtggactggtgggcctttggcgttctgctctatgagatgctggccgggcaagctcccttcgagggcgaagatgaggacgaactttttcagtccatcatggagcacaacgtggcgtacccgaagtctatgagcaaagaggccgtcgctatttgtaagggactgatgacaaaacatcctggcaagcggctcgggtgcggacccgaaggcgagagagatatcaaagaacacgccttctttcgctatattgactgggagaagctggaacggaaggagatccagcctccctacaaacctaaggcctgtgggagaaatgctgagaacttcgatcgctttttcacccggcatcccccggtgctgacgcctcccgaccaggaagtgatcagaaatattgaccaatccgagtttgaaggattcagctttgttaactctgagttcctcaaacccgaagtcaagtcctga

SEQ ID NO: 8857 - protein, 912 aa, synthetic construct
  REGION 1..912: note = KPCD1__Homo_sapiens__Q15139
MSAPPVLRPPSPLLPVAAAAAAAAAALVPGSGPGPAPFLAPVAAPVGGISFHLQIGLSREPVLLLQDSSGDYSLAHVREMACSIVDQKFPECGFYGMYDKILLFRHDPTSENILQLVKAASDIQEGDLIEVVLSASATFEDFQIRPHALFVHSYRAPAFCDHCGEMLWGLVRQGLKCEGCGLNYHKRCAFKIPNNCSGVRRRRLSNVSLTGVSTIRTSSAELSTSAPDEPLLQKSPSESFIGREKRSNSQSYIGRPIHLDKILMSKVKVPHTFVIHSYTRPTVCQYCKKLLKGLFRQGLQCKDCRFNCHKRCAPKVPNNCLGEVTINGDLLSPGAESDVVMEEGSDDNDSERNSGLMDDMEEAMVQDAEMAMAECQNDSGEMQDPDPDHEDANRTISPSTSNNIPLMRVVQSVKHTKRKSSTVMKEGWMVHYTSKDTLRKRHYWRLDSKCITLFQNDTGSRYYKEIPLSEILSLEPVKTSALIPNGANPHCFEITTANVVYYVGENVVNPSSPSPNNSVLTSGVGADVARMWEIAIQHALMPVIPKGSSVGTGTNLHRDISVSISVSNCQIQENVDISTVYQIFPDEVLGSGQFGIVYGGKHRKTGRDVAIKIIDKLRFPTKQESQLRNEVAILQNLHHPGVVNLECMFETPERVFVVMEKLHGDMLEMILSSEKGRLPEHITKFLITQILVALRHLHFKNIVHCDLKPENVLLASADPFPQVKLCDFGFARIIGEKSFRRSVVGTPAYLAPEVLRNKGYNRSLDMWSVGVIIYVSLSGTFPFNEDEDIHDQIQNAAFMYPPNPWKEISHEAIDLINNLLQVKMRKRYSVDKTLSHPWLQDYQTWLDLRELECKIGERYITHESDDLRWEKYAGEQGLQYPTHLINPSASHSDTPETEETEMKALGERVSIL

SEQ ID NO: 8858 - RNA, 2739 nt, synthetic construct
  misc_feature 1..2739: note = KPCD1__Homo_sapiens__BAG36853
  source 1..2739: mol_type = other RNA
atgagcgcccctccggtcctgcggccgcccagtccgctgctgcccgtggcggcggcagctgccgcagcggccgccgcactggtcccagggtccgggcccgggcccgcgccgttcttggctcctgtcgcggccccggtcgggggcatctcgttccatctgcagatcggcctgagccgtgagccggtgctgctgctgcaggactcgtccggggactacagcctggcgcacgtccgcgagatggcttgctccattgtcgaccagaagttccctgaatgtggtttctacggaatgtatgataagatcctgctttttcgccatgaccctacctctgaaaacatccttcagctggtgaaagcggccagtgatatccaggaaggcgatcttattgaagtggtcttgtcagcttccgccacctttgaagactttcagattcgtccccacgctctctttgttcattcatacagagctccagctttctgtgatcactgtggagaaatgctgtgggggctggtacgtcaaggtcttaaatgtgaagggtgtggtctgaattaccataagagatgtgcatttaaaatacccaacaattgcagcggtgtgaggcggagaaggctctcaaacgtttccctcactggggtcagcaccatccgcacatcatctgctgaactctctacaagtgcccctgatgagccccttctgcaaaaatcaccatcagagtcgtttattggtcgagagaagaggtcaaattctcaatcatacattggacgaccaattcaccttgacaagattttgatgtctaaagttaaagtgccgcacacatttgtcatccactcctacacccggcccacagtgtgccagtactgcaagaagcttctgaaggggcttttcaggcagggcttgcagtgcaaagattgcagattcaactgccataaacgttgtgcaccgaaagtaccaaacaactgccttggcgaagtgaccattaatggagatttgcttagccctggggcagagtctgatgtggtcatggaagaagggagtgatgacaatgatagtgaaaggaacagtgggctcatggatgatatggaagaagcaatggtccaagatgcagagatggcaatggcagagtgccagaacgacagtggcgagatgcaagatccagacccagaccacgaggacgccaacagaaccatcagtccatcaacaagcaacaatatcccactcatgagggtagtgcagtctgtcaaacacacgaagaggaaaagcagcacagtcatgaaagaaggatggatggtccactacaccagcaaggacacgctgcggaaacggcactattggagattggatagcaaatgtattaccctctttcagaatgacacaggaagcaggtactacaaggaaattcctttatctgaaattttgtctctggaaccagtaaaaacttcagctttaattcctaatggggccaatcctcattgtttcgaaatcactacggcaaatgtagtgtattatgtgggagaaaatgtggtcaatccttccagcccatcaccaaataacagtgttctcaccagtggcgttggtgcagatgtggccaggatgtgggagatagccatccagcatgcccttatgcccgtcattcccaagggctcctccgtgggtacaggaaccaacttgcacagagatatctctgtgagtatttcagtatcaaattgccagattcaagaaaatgtggacatcagcacagtatatcagatttttcctgatgaagtactgggttctggacagtttggaattgtttatggaggaaaacatcgtaaaacaggaagagatgtagctattaaaatcattgacaaattacgatttccaacaaaacaagaaagccagcttcgtaatgaggttgcaattctacagaaccttcatcaccctggtgttgtaaatttggagtgtatgtttgagacgcctgaaagagtgtttgttgttatggaaaaactccatggagacatgctggaaatgatcttgtcaagtgaaaagggcaggttgccagagcacataacgaagtttttaattactcagatactcgtggctttgcggcaccttcattttaaaaatatcgttcactgtgacctcaaaccagaaaatgtgttgctagcctcagctgatccttttcctcaggtgaaactttgtgattttggttttgcccggatcattggagagaagtctttccggaggtcagtggtgggtacccccgcttacctggctcctgaggtcctaaggaacaagggctacaatcgctctctagacatgtggtctgttggggtcatcatctatgtaagcctaagcggcacattcccatttaatgaagatgaagacatacacgaccaaattcagaatgcagctttcatgtatccaccaaatccctggaaggaaatatctcatgaagccattgatcttatcaacaatttgctgcaagtaaaaatgagaaagcgctacagtgtggataagaccttgagccacccttggctacaggactatcagacctggttagatttgcgagagctggaatgcaaaatcggggagcgctacatcacccatgaaagtgatgacctgaggtgggagaagtatgcaggcgagcaggggctgcagtaccccacacacctgatcaatccaagtgctagccacagtgacactcctgagactgaagaaacagaaatgaaagccctcggtgagcgtgtcagcatcctctga

SEQ ID NO: 8859 - RNA, 2739 nt, synthetic construct
  misc_feature 1..2739: note = derived and/or modified sequence opt1 fromKPCD1__Homo_sapiens__BAG36853
  source 1..2739: mol_type = other RNA
atgagcgcgcccccggtgctgcgcccgcccagccccctcctgcccgtcgccgccgccgccgccgccgcggccgccgccctggtgcccggcagcgggcccggccccgcgccgttcctcgcccccgtggccgcccccgtcgggggcatctccttccacctccagatcgggctgagccgggagcccgtgctgctgctgcaggactccagcggcgactactccctcgcccacgtgcgcgagatggcgtgcagcatcgtcgaccagaagttcccggagtgcggcttctacgggatgtacgacaagatcctgctgttccggcacgaccccacctccgagaacatcctccagctggtgaaggccgccagcgacatccaggagggcgacctgatcgaggtggtcctctccgccagcgccaccttcgaggacttccagatccgcccccacgcgctgttcgtgcactcctaccgggcccccgccttctgcgaccactgcggggagatgctgtggggcctcgtgcgccaggggctgaagtgcgagggctgcggcctgaactaccacaagcggtgcgccttcaagatcccgaacaactgcagcggggtccgccggcgccggctctccaacgtgagcctgacgggcgtgtccaccatccgcaccagctccgccgagctgagcaccagcgcgcccgacgagcccctcctgcagaagtcccccagcgagtccttcatcgggcgggagaagcgcagcaactcccagagctacatcggccggccgatccacctggacaagatcctcatgtccaaggtcaaggtgccccacacgttcgtgatccacagctacacccgccccaccgtctgccagtactgcaagaagctgctgaagggcctcttccggcaggggctgcagtgcaaggactgccgcttcaactgccacaagcggtgcgcccccaaggtgccgaacaactgcctgggcgaggtgaccatcaacggggacctcctgtcccccggcgccgagagcgacgtcgtgatggaggaggggtccgacgacaacgacagcgagcgcaactccggcctgatggacgacatggaggaggccatggtgcaggacgccgagatggcgatggccgagtgccagaacgacagcggcgagatgcaggaccccgaccccgaccacgaggacgccaaccggacgatctccccgagcacctccaacaacatccccctcatgcgcgtcgtgcagagcgtcaagcacaccaagcgcaagtccagcaccgtgatgaaggaggggtggatggtgcactacacgagcaaggacaccctgcggaagcgccactactggcggctggactccaagtgcatcaccctcttccagaacgacaccggcagccgctactacaaggagatccccctgtccgagatcctgagcctcgagccggtcaagacgtccgccctgatccccaacggggcgaacccccactgcttcgagatcaccaccgccaacgtggtgtactacgtcggcgagaacgtggtgaaccccagctccccgagccccaacaactccgtcctgaccagcggggtgggcgccgacgtggcccggatgtgggagatcgccatccagcacgcgctcatgcccgtcatccccaagggctccagcgtggggacgggcaccaacctgcaccgcgacatctccgtgagcatctccgtcagcaactgccagatccaggagaacgtggacatctccaccgtgtaccagatcttcccggacgaggtcctggggagcggccagttcgggatcgtgtacggcggcaagcaccggaagaccgggcgcgacgtggccatcaagatcatcgacaagctccggttccccacgaagcaggagagccagctgcgcaacgaggtcgccatcctgcagaacctgcaccaccccggcgtggtgaacctcgagtgcatgttcgagacccccgagcgggtcttcgtggtgatggagaagctgcacggggacatgctggagatgatcctctccagcgagaagggccgcctgccggagcacatcaccaagttcctgatcacccagatcctcgtcgccctgcggcacctccacttcaagaacatcgtgcactgcgacctgaagcccgagaacgtgctgctggcctccgcggaccccttcccccaggtcaagctctgcgacttcggcttcgcccgcatcatcggggagaagtccttccggcgctccgtggtgggcacgccggcctacctggcccccgaggtcctgcggaacaaggggtacaaccgcagcctcgacatgtggtccgtgggcgtgatcatctacgtcagcctgtccgggaccttccccttcaacgaggacgaggacatccacgaccagatccagaacgccgcgttcatgtacccgcccaacccctggaaggagatcagccacgaggccatcgacctgatcaacaacctcctccaggtgaagatgcggaagcgctactccgtggacaagaccctgagccacccctggctgcaggactaccagacctggctggacctgcgcgagctcgagtgcaagatcggcgagcggtacatcacgcacgagtccgacgacctgcgctgggagaagtacgccggcgagcaggggctgcagtaccccacccacctcatcaacccgagcgcctcccacagcgacacccccgagaccgaggagacggagatgaaggcgctgggcgagcgggtctccatcctgtga

SEQ ID NO: 8860 - RNA, 2739 nt, synthetic construct
  misc_feature 1..2739: note = derived and/or modified sequence opt2 fromKPCD1__Homo_sapiens__BAG36853
  source 1..2739: mol_type = other RNA
atgtccgccccccccgtcctccgccccccctcccccctcctccccgtcgccgccgccgccgccgccgccgccgccgccctcgtccccggctccggccccggccccgcccccttcctcgcccccgtcgccgcccccgtcggcggcatctccttccacctccagatcggcctctcccgcgagcccgtcctcctcctccaggactcctccggcgactactccctcgcccacgtccgcgagatggcctgctccatcgtcgaccagaagttccccgagtgcggcttctacggcatgtacgacaagatcctcctcttccgccacgaccccacctccgagaacatcctccagctcgtcaaggccgcctccgacatccaggagggcgacctcatcgaggtcgtcctctccgcctccgccaccttcgaggacttccagatccgcccccacgccctcttcgtccactcctaccgcgcccccgccttctgcgaccactgcggcgagatgctctggggcctcgtccgccagggcctcaagtgcgagggctgcggcctcaactaccacaagcgctgcgccttcaagatccccaacaactgctccggcgtccgccgccgccgcctctccaacgtctccctcaccggcgtctccaccatccgcacctcctccgccgagctctccacctccgcccccgacgagcccctcctccagaagtccccctccgagtccttcatcggccgcgagaagcgctccaactcccagtcctacatcggccgccccatccacctcgacaagatcctcatgtccaaggtcaaggtcccccacaccttcgtcatccactcctacacccgccccaccgtctgccagtactgcaagaagctcctcaagggcctcttccgccagggcctccagtgcaaggactgccgcttcaactgccacaagcgctgcgcccccaaggtccccaacaactgcctcggcgaggtcaccatcaacggcgacctcctctcccccggcgccgagtccgacgtcgtcatggaggagggctccgacgacaacgactccgagcgcaactccggcctcatggacgacatggaggaggccatggtccaggacgccgagatggccatggccgagtgccagaacgactccggcgagatgcaggaccccgaccccgaccacgaggacgccaaccgcaccatctccccctccacctccaacaacatccccctcatgcgcgtcgtccagtccgtcaagcacaccaagcgcaagtcctccaccgtcatgaaggagggctggatggtccactacacctccaaggacaccctccgcaagcgccactactggcgcctcgactccaagtgcatcaccctcttccagaacgacaccggctcccgctactacaaggagatccccctctccgagatcctctccctcgagcccgtcaagacctccgccctcatccccaacggcgccaacccccactgcttcgagatcaccaccgccaacgtcgtctactacgtcggcgagaacgtcgtcaacccctcctccccctcccccaacaactccgtcctcacctccggcgtcggcgccgacgtcgcccgcatgtgggagatcgccatccagcacgccctcatgcccgtcatccccaagggctcctccgtcggcaccggcaccaacctccaccgcgacatctccgtctccatctccgtctccaactgccagatccaggagaacgtcgacatctccaccgtctaccagatcttccccgacgaggtcctcggctccggccagttcggcatcgtctacggcggcaagcaccgcaagaccggccgcgacgtcgccatcaagatcatcgacaagctccgcttccccaccaagcaggagtcccagctccgcaacgaggtcgccatcctccagaacctccaccaccccggcgtcgtcaacctcgagtgcatgttcgagacccccgagcgcgtcttcgtcgtcatggagaagctccacggcgacatgctcgagatgatcctctcctccgagaagggccgcctccccgagcacatcaccaagttcctcatcacccagatcctcgtcgccctccgccacctccacttcaagaacatcgtccactgcgacctcaagcccgagaacgtcctcctcgcctccgccgaccccttcccccaggtcaagctctgcgacttcggcttcgcccgcatcatcggcgagaagtccttccgccgctccgtcgtcggcacccccgcctacctcgcccccgaggtcctccgcaacaagggctacaaccgctccctcgacatgtggtccgtcggcgtcatcatctacgtctccctctccggcaccttccccttcaacgaggacgaggacatccacgaccagatccagaacgccgccttcatgtacccccccaacccctggaaggagatctcccacgaggccatcgacctcatcaacaacctcctccaggtcaagatgcgcaagcgctactccgtcgacaagaccctctcccacccctggctccaggactaccagacctggctcgacctccgcgagctcgagtgcaagatcggcgagcgctacatcacccacgagtccgacgacctccgctgggagaagtacgccggcgagcagggcctccagtaccccacccacctcatcaacccctccgcctcccactccgacacccccgagaccgaggagaccgagatgaaggccctcggcgagcgcgtctccatcctctga

SEQ ID NO: 8861 - RNA, 2739 nt, synthetic construct
  misc_feature 1..2739: note = derived and/or modified sequence opt3 fromKPCD1__Homo_sapiens__BAG36853
  source 1..2739: mol_type = other RNA
atgagcgctccccctgtgctgagaccaccgagtcccctccttcctgtcgccgcagccgcggctgccgcagccgctgcactggttccaggctctgggcccggacctgccccattcttggctcccgtggccgcgcctgtaggtggcatctcatttcacttacagattgggctgagtagggagccagtgctactcctgcaagacagctccggagattactctcttgcacatgtccgggaaatggcctgctcgatagtggaccagaagttcccggagtgtggcttttatggtatgtacgataaaatcctgttgttccgccacgaccccacctcagaaaacattctccagctggttaaggctgccagcgatatccaggagggggacctgattgaagtggtcctcagtgcatccgctacatttgaggatttccaaatccgacctcatgccttatttgtgcactcttatcgtgcgccagccttctgcgaccattgtggagagatgctgtggggccttgtaagacagggcttgaaatgcgaagggtgtggactgaattaccacaagaggtgcgcatttaaaatacccaacaattgtagcggtgttcggcgcagaaggctatccaacgtgtcactcactggcgtcagtacgatccggaccagctctgctgagctgtccacatcagcccctgatgaaccacttctgcaaaagagccccagtgagtctttcattgggcgcgagaagcgatccaatagccagtcgtatatcggaagaccgattcacttggacaaaatcctcatgtctaaggtgaaagtgcctcatacttttgtcatacactcctacaccaggcccacagtttgccagtattgtaagaaactgttaaagggcctgttccggcagggtctccagtgcaaggattgtcgttttaactgccataaacgctgcgctccaaaggtgcctaataactgtcttggggaagtaaccattaatggagacctgttgtcacccggcgccgagagtgatgtggtcatggaagagggcagcgacgacaacgattccgaaagaaattctgggctaatggacgatatggaggaggcaatggtgcaggacgccgaaatggctatggcggagtgccaaaacgatagcggagaaatgcaggacccagatcccgaccacgaggatgcaaataggactatctcacctagtacatccaacaatattccactgatgcgggttgtgcagagcgtcaaacacaccaagcgaaaatcttcaacggtgatgaaggaaggttggatggtacattacacttccaaagacaccctccgcaagagacactactggaggctggatagcaagtgtatcacacttttccaaaacgacactggctcccggtattacaaagagatcccgctgtctgagattttgtcgctcgaacccgttaagaccagcgccctgatacctaacggggctaatccacattgcttcgagatcacaaccgccaacgtggtctattacgtgggagaaaatgtcgtgaacccctcctcacctagtccaaataactctgttttaacgagcggcgtgggtgcagacgtagcccgcatgtgggagattgctatccagcacgccctgatgcccgtcataccgaaagggtcctcagtgggcactggaacaaatctacatagagatattagcgtttctatctccgtgagtaactgtcagatccaggaaaatgtcgacattagcaccgtgtatcaaatctttcctgatgaggtactcggctctgggcagttcggaattgtgtacggtggcaagcacaggaaaactgggcgtgacgttgcaataaagatcattgataagctgcggtttccaacaaaacaggagtcccagcttcgaaacgaagtcgcgatcttgcaaaatctgcaccatcccggagtggtgaacctcgagtgcatgttcgaaacccctgagagagtctttgttgtgatggagaagctgcacggcgacatgcttgaaatgatcctgtcaagtgagaaaggtaggttgcccgaacatattacgaagttcctcataacccagatcctggtggctttacgccaccttcactttaaaaatattgtacattgtgatctaaagccagagaacgtcctcctggccagcgcagaccctttcccccaggtgaagctgtgcgattttgggttcgcccggatcattggcgaaaaatcgtttagaaggtccgttgtgggaacaccagcttatttggccccggaggtcctgcgcaataagggctacaaccgatctctcgacatgtggagcgtgggggttatcatatacgtgtcactgagtggaactttcccttttaacgaggatgaagacatccacgatcagattcaaaatgcagctttcatgtatcccccaaacccctggaaagagatctcccatgaagccattgacttaatcaataacctgcttcaggtaaagatgcggaaacgttactctgtcgacaagaccttgagccacccttggctccaggattatcagacatggctggacctaagagagctggaatgtaagataggtgagaggtacattactcatgagtccgatgacctccgctgggaaaaatatgcgggcgagcaagggctgcagtacccaacccaccttatcaatccctcagccagccacagtgatacacctgaaaccgaggaaactgagatgaaggctttgggagagcgggtgtctattctgtga

SEQ ID NO: 8862 - RNA, 2739 nt, synthetic construct
  misc_feature 1..2739: note = derived and/or modified sequence opt4 fromKPCD1__Homo_sapiens__BAG36853
  source 1..2739: mol_type = other RNA
atgagcgccccccccgtgctgagaccccccagccccctgctgcccgtggccgccgccgccgccgccgccgccgccgccctggtgcccggcagcggccccggccccgcccccttcctggcccccgtggccgcccccgtgggcggcatcagcttccacctgcagatcggcctgagcagagagcccgtgctgctgctgcaggacagcagcggcgactacagcctggcccacgtgagagagatggcctgcagcatcgtggaccagaagttccccgagtgcggcttctacggcatgtacgacaagatcctgctgttcagacacgaccccaccagcgagaacatcctgcagctggtgaaggccgccagcgacatccaggagggcgacctgatcgaggtggtgctgagcgccagcgccaccttcgaggacttccagatcagaccccacgccctgttcgtgcacagctacagagcccccgccttctgcgaccactgcggcgagatgctgtggggcctggtgagacagggcctgaagtgcgagggctgcggcctgaactaccacaagagatgcgccttcaagatccccaacaactgcagcggcgtgagaagaagaagactgagcaacgtgagcctgaccggcgtgagcaccatcagaaccagcagcgccgagctgagcaccagcgcccccgacgagcccctgctgcagaagagccccagcgagagcttcatcggcagagagaagagaagcaacagccagagctacatcggcagacccatccacctggacaagatcctgatgagcaaggtgaaggtgccccacaccttcgtgatccacagctacaccagacccaccgtgtgccagtactgcaagaagctgctgaagggcctgttcagacagggcctgcagtgcaaggactgcagattcaactgccacaagagatgcgcccccaaggtgcccaacaactgcctgggcgaggtgaccatcaacggcgacctgctgagccccggcgccgagagcgacgtggtgatggaggagggcagcgacgacaacgacagcgagagaaacagcggcctgatggacgacatggaggaggccatggtgcaggacgccgagatggccatggccgagtgccagaacgacagcggcgagatgcaggaccccgaccccgaccacgaggacgccaacagaaccatcagccccagcaccagcaacaacatccccctgatgagagtggtgcagagcgtgaagcacaccaagagaaagagcagcaccgtgatgaaggagggctggatggtgcactacaccagcaaggacaccctgagaaagagacactactggagactggacagcaagtgcatcaccctgttccagaacgacaccggcagcagatactacaaggagatccccctgagcgagatcctgagcctggagcccgtgaagaccagcgccctgatccccaacggcgccaacccccactgcttcgagatcaccaccgccaacgtggtgtactacgtgggcgagaacgtggtgaaccccagcagccccagccccaacaacagcgtgctgaccagcggcgtgggcgccgacgtggccagaatgtgggagatcgccatccagcacgccctgatgcccgtgatccccaagggcagcagcgtgggcaccggcaccaacctgcacagagacatcagcgtgagcatcagcgtgagcaactgccagatccaggagaacgtggacatcagcaccgtgtaccagatcttccccgacgaggtgctgggcagcggccagttcggcatcgtgtacggcggcaagcacagaaagaccggcagagacgtggccatcaagatcatcgacaagctgagattccccaccaagcaggagagccagctgagaaacgaggtggccatcctgcagaacctgcaccaccccggcgtggtgaacctggagtgcatgttcgagacccccgagagagtgttcgtggtgatggagaagctgcacggcgacatgctggagatgatcctgagcagcgagaagggcagactgcccgagcacatcaccaagttcctgatcacccagatcctggtggccctgagacacctgcacttcaagaacatcgtgcactgcgacctgaagcccgagaacgtgctgctggccagcgccgaccccttcccccaggtgaagctgtgcgacttcggcttcgccagaatcatcggcgagaagagcttcagaagaagcgtggtgggcacccccgcctacctggcccccgaggtgctgagaaacaagggctacaacagaagcctggacatgtggagcgtgggcgtgatcatctacgtgagcctgagcggcaccttccccttcaacgaggacgaggacatccacgaccagatccagaacgccgccttcatgtacccccccaacccctggaaggagatcagccacgaggccatcgacctgatcaacaacctgctgcaggtgaagatgagaaagagatacagcgtggacaagaccctgagccacccctggctgcaggactaccagacctggctggacctgagagagctggagtgcaagatcggcgagagatacatcacccacgagagcgacgacctgagatgggagaagtacgccggcgagcagggcctgcagtaccccacccacctgatcaaccccagcgccagccacagcgacacccccgagaccgaggagaccgagatgaaggccctgggcgagagagtgagcatcctgtga

SEQ ID NO: 8863 - RNA, 2739 nt, synthetic construct
  misc_feature 1..2739: note = derived and/or modified sequence opt5 fromKPCD1__Homo_sapiens__BAG36853
  source 1..2739: mol_type = other RNA
atgagcgctccccctgtgctgagaccgccctcccctctcctgcccgtcgccgccgcggctgccgccgctgccgctgcccttgttcctggctctgggcccggacctgcgccgttcctggcccccgtggctgcccctgtgggcgggatcagctttcacctccagattggactgtcccgggagcccgtccttctgctccaagactctagcggcgattactccctggctcatgtgcgcgaaatggcctgctctatcgttgaccagaagttccctgagtgtgggttttatggaatgtacgataaaattctcctgttcagacacgaccccaccagcgaaaacatcctgcagcttgtgaaggcggcctccgatattcaggagggcgacctgatcgaagtcgtgctcagcgcttctgccacatttgaggatttccaaatccggccgcatgctctgtttgttcactcctatcgcgcccctgccttctgcgaccattgtggcgagatgctttgggggctggtgagacagggactcaaatgcgaaggctgtgggctgaattaccacaagcggtgcgcttttaaaattcccaacaattgtagcggagtccgcagacggcgcctgtctaacgtgtccctcacgggcgtgagcaccatcagaacatcttccgcggagctgagcacctccgcccctgatgaaccccttctgcagaagtctcccagcgagtccttcattgggcgggagaagcgcagcaattctcagtcctatatcggaagacctattcacctcgacaaaatcctgatgagcaaggtcaaagttccgcatacatttgtgattcactcttacacccggcccacagtgtgccaatattgtaagaaacttctgaagggcctcttccgccagggcctgcagtgcaaggattgtagatttaactgccataaacggtgcgctcctaaggtccccaataactgtctgggggaagtgaccatcaatggagacctcctgagccctggcgccgagtccgatgttgtgatggaagaggggtctgacgacaacgatagcgaaagaaattccggacttatggacgatatggaggaggccatggtccaggacgctgaaatggccatggcggagtgccaaaacgatagcggcgaaatgcaggaccccgatccggaccacgaggatgctaatcgcacgatctctccttccaccagcaacaatattcccctgatgcgggtggttcagtctgtgaaacacacaaagagaaaatccagcaccgtcatgaaggaagggtggatggtgcattacacatccaaagacaccctccgcaagcggcactactggagactggattctaagtgtatcacgcttttccaaaacgacacaggaagccgctattacaaagagattcctctgtccgagatcctctctctggaacccgtcaagaccagcgccctgattcctaacggcgccaatccccattgcttcgagatcacaaccgctaacgtggtttattacgtgggcgaaaatgtcgtgaacccgtccagcccttctcccaataactccgttctcaccagcggggtgggagccgacgtcgctcggatgtgggagatcgccattcagcacgcgctgatgcccgtgatccctaaaggcagctccgtggggacaggaacgaatcttcatagagatattagcgtttctatcagcgtctccaactgtcagattcaggaaaatgtggacatcagcaccgtgtatcaaatctttccggatgaggtcctgggctctgggcagttcggcattgtgtacggaggcaagcaccgcaaaacagggcgggacgttgccatcaagattatcgataagctcagatttcccaccaaacaggagtcccagctgcgcaacgaagtggctattctgcaaaatcttcaccatcctggagtcgtgaacctcgagtgcatgttcgaaacacccgagcgggtttttgtggtcatggagaagctgcacggcgacatgctggaaatgatcctcagctccgagaaagggagactgcctgaacatattaccaagttccttatcacgcagatcctggtggccctccggcatctgcactttaaaaatattgttcactgtgatctgaagcccgagaacgtgcttctcgcttctgccgaccctttcccccaggtcaagctgtgcgattttggattcgcgcgcatcattggcgaaaaatcttttagacggtccgtggtggggacaccggcctatctggctcctgaggtcctcagaaataagggctacaaccgctctctggacatgtggagcgttggagtgatcatttacgtgtccctttctggcaccttcccctttaacgaggatgaagacatccacgatcagatccaaaatgccgctttcatgtatcctcccaacccgtggaaagagattagccatgaagccatcgacctgattaataacctcctgcaggtcaagatgcggaaaagatactccgtggacaagaccctgagccacccttggcttcaggattatcagacatggctcgacctgcgcgagctggaatgtaagatcggggagagatacattacccatgagtctgatgacctccggtgggaaaaatatgccggagagcaaggcctgcagtaccccacacaccttatcaatccttccgctagccactctgatacgcccgaaaccgaggaaacagagatgaaggcgctgggggagcgcgtttccatcctctga

SEQ ID NO: 8864 - protein, 890 aa, synthetic construct
  REGION 1..890: note = KPCD3__Homo_sapiens__O94806
MSANNSPPSAQKSVLPTAIPAVLPAASPCSSPKTGLSARLSNGSFSAPSLTNSRGSVHTVSFLLQIGLTRESVTIEAQELSLSAVKDLVCSIVYQKFPECGFFGMYDKILLFRHDMNSENILQLITSADEIHEGDLVEVVLSALATVEDFQIRPHTLYVHSYKAPTFCDYCGEMLWGLVRQGLKCEGCGLNYHKRCAFKIPNNCSGVRKRRLSNVSLPGPGLSVPRPLQPEYVALPSEESHVHQEPSKRIPSWSGRPIWMEKMVMCRVKVPHTFAVHSYTRPTICQYCKRLLKGLFRQGMQCKDCKFNCHKRCASKVPRDCLGEVTFNGEPSSLGTDTDIPMDIDNNDINSDSSRGLDDTEEPSPPEDKMFFLDPSDLDVERDEEAVKTISPSTSNNIPLMRVVQSIKHTKRKSSTMVKEGWMVHYTSRDNLRKRHYWRLDSKCLTLFQNESGSKYYKEIPLSEILRISSPRDFTNISQGSNPHCFEIITDTMVYFVGENNGDSSHNPVLAATGVGLDVAQSWEKAIRQALMPVTPQASVCTSPGQGKDHKDLSTSISVSNCQIQENVDISTVYQIFADEVLGSGQFGIVYGGKHRKTGRDVAIKVIDKMRFPTKQESQLRNEVAILQNLHHPGIVNLECMFETPERVFVVMEKLHGDMLEMILSSEKSRLPERITKFMVTQILVALRNLHFKNIVHCDLKPENVLLASAEPFPQVKLCDFGFARIIGEKSFRRSVVGTPAYLAPEVLRSKGYNRSLDMWSVGVIIYVSLSGTFPFNEDEDINDQIQNAAFMYPPNPWREISGEAIDLINNLLQVKMRKRYSVDKSLSHPWLQDYQTWLDLREFETRIGERYITHESDDARWEIHAYTHNLVYPKHFIMAPNPDDMEEDP

SEQ ID NO: 8865 - RNA, 2673 nt, synthetic construct
  misc_feature 1..2673: note = KPCD3__Homo_sapiens__AAY14817
  source 1..2673: mol_type = other RNA
atgtctgcaaataattcccctccatcagcccagaagtctgtattacccacagctattcctgctgtgcttccagctgcttctccgtgttcaagtcctaagacgggactctctgcccgactctctaatggaagcttcagtgcaccatcactcaccaactccagaggctcagtgcatacagtttcatttctactgcaaattggcctcacacgggagagtgttaccattgaagcccaggaactgtctttatctgctgtcaaggatcttgtgtgctccatagtttatcaaaagtttccagagtgtggattctttggcatgtatgacaaaattcttctctttcgccatgacatgaactcagaaaacattttgcagctgattacctcagcagatgaaatacatgaaggagacctagtggaagtggttctttcagctttagccacagtagaagacttccagattcgtccacatactctctatgtacattcttacaaagctcctactttctgtgattactgtggtgagatgctctggggattggtacgtcaaggactgaaatgtgaaggctgtggattaaattaccataaacgatgtgccttcaagattccaaataactgtagtggagtaagaaagagacgtctgtcaaatgtatctttaccaggacccggcctctcagttccaagacccctacagcctgaatatgtagcccttcccagtgaagagtcacatgtccaccaggaaccaagtaagagaattccttcttggagtggtcgcccaatctggatggaaaagatggtaatgtgcagagtgaaagttccacacacatttgctgttcactcttacacccgtcccacgatatgtcagtactgcaagcggttactgaaaggcctctttcgccaaggaatgcagtgtaaagattgcaaattcaactgccataaacgctgtgcatcaaaagtaccaagagactgccttggagaggttactttcaatggagaaccttccagtctgggaacagatacagatataccaatggatattgacaataatgacataaatagtgatagtagtcggggtttggatgacacagaagagccatcacccccagaagataagatgttcttcttggatccatctgatctcgatgtggaaagagatgaagaagccgttaaaacaatcagtccatcaacaagcaataatattccgctaatgagggttgtacaatccatcaagcacacaaagaggaagagcagcacaatggtgaaggaagggtggatggtccattacaccagcagggataacctgagaaagaggcattattggagacttgacagcaaatgtctaacattatttcagaatgaatctggatcaaagtattataaggaaattccactttcagaaattctccgcatatcttcaccacgagatttcacaaacatttcacaaggcagcaatccacactgttttgaaatcattactgatactatggtatacttcgttggtgagaacaatggggacagctctcataatcctgttcttgctgccactggagttggacttgatgtagcacagagctgggaaaaagcaattcgccaagccctcatgcctgttactcctcaagcaagtgtttgcacttctccagggcaagggaaagatcacaaagatttgtctacaagtatctctgtatctaattgtcagattcaggagaatgtggatatcagtactgtttaccagatctttgcagatgaggtgcttggttcaggccagtttggcatcgtttatggaggaaaacatagaaagactgggagggatgtggctattaaagtaattgataagatgagattccccacaaaacaagaaagtcaactccgtaatgaagtggctattttacagaatttgcaccatcctgggattgtaaacctggaatgtatgtttgaaaccccagaacgagtctttgtagtaatggaaaagctgcatggagatatgttggaaatgattctatccagtgagaaaagtcggcttccagaacgaattactaaattcatggtcacacagatacttgttgctttgaggaatctgcattttaagaatattgtgcactgtgatttaaagccagaaaatgtgctgcttgcatcagcagagccatttcctcaggtgaagctgtgtgactttggatttgcacgcatcattggtgaaaagtcattcaggagatctgtggtaggaactccagcatacttagcccctgaagttctccggagcaaaggttacaaccgttccctagatatgtggtcagtgggagttatcatctatgtgagcctcagtggcacatttccttttaatgaggatgaagatataaatgaccaaatccaaaatgctgcatttatgtacccaccaaatccatggagagaaatttctggtgaagcaattgatctgataaacaatctgcttcaagtgaagatgagaaaacgttacagtgttgacaaatctcttagtcatccctggctacaggactatcagacttggcttgaccttagagaatttgaaactcgcattggagaacgttacattacacatgaaagtgatgatgctcgctgggaaatacatgcatacacacataaccttgtatacccaaagcacttcattatggctcctaatccagatgatatggaagaagatccttaa

SEQ ID NO: 8866 - RNA, 2673 nt, synthetic construct
  misc_feature 1..2673: note = derived and/or modified sequence opt1 fromKPCD3__Homo_sapiens__AAY14817
  source 1..2673: mol_type = other RNA
atgagcgccaacaactccccgcccagcgcccagaagtccgtgctgcccaccgcgatccccgccgtcctccccgccgccagcccgtgctccagccccaagaccggcctgtccgcccgcctgagcaacgggtccttcagcgcgccctccctcacgaacagccggggctccgtgcacaccgtgagcttcctgctgcagatcgggctcacccgcgagtccgtcaccatcgaggcccaggagctgagcctgtccgccgtgaaggacctcgtgtgcagcatcgtctaccagaagttccccgagtgcggcttcttcgggatgtacgacaagatcctgctgttccggcacgacatgaactccgagaacatcctccagctgatcacgagcgccgacgagatccacgagggcgacctggtggaggtggtcctcagcgcgctggccaccgtggaggacttccagatccgcccgcacaccctgtacgtgcactcctacaaggcccccaccttctgcgactactgcggcgagatgctctgggggctggtccggcagggcctgaagtgcgaggggtgcggcctcaactaccacaagcgctgcgccttcaagatccccaacaactgcagcggggtgcggaagcgccggctgtccaacgtgagcctgcccggcccgggcctctccgtcccccgccccctgcagcccgagtacgtggccctgccgagcgaggagtcccacgtgcaccaggagcccagcaagcggatcccctcctggagcgggcgccccatctggatggagaagatggtcatgtgccgggtgaaggtgccgcacacgttcgcggtccactcctacacccgccccaccatctgccagtactgcaagcggctcctgaagggcctgttccgccaggggatgcagtgcaaggactgcaagttcaactgccacaagcggtgcgccagcaaggtgccccgcgactgcctcggcgaggtgaccttcaacggcgagccctccagcctggggacggacaccgacatcccgatggacatcgacaacaacgacatcaactccgacagctcccggggcctggacgacaccgaggagcccagcccgcccgaggacaagatgttcttcctcgacccctccgacctggacgtcgagcgcgacgaggaggccgtgaagaccatcagccccagcacgtccaacaacatccccctgatgcgggtcgtgcagagcatcaagcacaccaagcgcaagtccagcaccatggtgaaggaggggtggatggtccactacacctcccgcgacaacctccggaagcgccactactggcggctggacagcaagtgcctgaccctcttccagaacgagtccggcagcaagtactacaaggagatcccgctgtccgagatcctgcgcatcagcagcccccgggacttcaccaacatctcccaggggtccaacccccactgcttcgagatcatcaccgacaccatggtgtacttcgtgggcgagaacaacggcgacagctcccacaaccccgtcctcgccgccacgggggtgggcctggacgtggcgcagagctgggagaaggccatccgccaggccctgatgccggtcacgccccaggcctccgtgtgcaccagccccgggcagggcaaggaccacaaggacctcagcacctccatcagcgtgtccaactgccagatccaggagaacgtcgacatcagcacggtgtaccagatcttcgccgacgaggtgctggggtccggccagttcggcatcgtctacgggggcaagcaccggaagaccgggcgcgacgtggcgatcaaggtgatcgacaagatgcggttccccaccaagcaggagagccagctgcgcaacgaggtcgccatcctccagaacctgcaccacccgggcatcgtgaacctggagtgcatgttcgagacccccgagcgggtgttcgtcgtgatggagaagctgcacggggacatgctcgagatgatcctgtccagcgagaagtcccgcctgcccgagcggatcacgaagttcatggtgacccagatcctcgtcgccctgcgcaacctgcacttcaagaacatcgtgcactgcgacctcaagcccgagaacgtgctgctggccagcgccgagccgttcccccaggtcaagctctgcgacttcggcttcgcgcggatcatcggcgagaagtccttccgccggagcgtggtggggacccccgcctacctggcccccgaggtcctgcgctccaagggctacaaccggagcctcgacatgtggtccgtgggggtgatcatctacgtcagcctgtccggcaccttcccgttcaacgaggacgaggacatcaacgaccagatccagaacgccgcgttcatgtacccgcccaacccctggcgcgagatcagcggcgaggccatcgacctgatcaacaacctcctccaggtgaagatgcgcaagcggtactccgtggacaagagcctgagccacccctggctgcaggactaccagacgtggctggacctgcgcgagttcgagacccggatcggggagcgctacatcacccacgagtccgacgacgcccggtgggagatccacgcctacacccacaacctcgtctaccccaagcacttcatcatggcccccaaccccgacgacatggaggaggacccgtga
